United States Patent Application Publication US 2014/0057251 A1 - sequence listing, part 77

SEQ ID NO: 120052 - DNA, 1958 bp, Cannabis sativa
ctagaagaaaaaaattgatttgattaaagaacagcttattaatgctaataataaatggtgggtgttccacatttattaaatattttaatgttttgtgtactctcaataataattttacaaaagaaacctttccaccatacaaacaaaatcacattttacaacatatcctaactcttttcaatatctgtacaaaattttagacatttgggaaaatttagacatgaaatgtacttaaaattaagagaaatcttaaaagctactactaatatctaacatattcttaatattatgttactagtataaatattagattttatataatttaatataataatatttaaaaaatattattaaacagagtgtcacatttaaaaagtattaggcaccactaatactcaataacaatactttcaaaagaaaatattataatagtatttattgtagtgttatgaaactttaaaacaaatatgctcaaataaaagctcaaaaaatttattttcatacttataaaagaaaataagcatggagaccttcgattttatgttagacactttaattaattttttttttttaactcatatactttcattgtaatattacaaaatttaaatataaaattattttagattttacaatgaaaaccttctaataatataaaaatttaattatctttagaatttgtaaaattcatttttacaacataaaaattgtcttcttcttttttttatcaaatctagaagataaattacctaaccgcataaacataaatttagtgagaacaacactctcgctgaaagttcgatatgaaaaaaaaaaattagcaaaactactattaacaaaatgataaacaaacactaaatgattccactcatactaataattaattatccacaatcattaacaactaaattaaaatgagagtttatcattaaatgactatgaatggcctcaattatcactaaacaatccatctcaagaatcaccgtcaatcatattttgtccttaatccaactaagagtctcctcatacctatataactttttagttataagattagagtgctctaaagggtgttggcagtaatttagaattttgtagtaaaatcttacaatatggtaaataaaagattattgtcttttttttagttgtgtttttattcttcttttaaattgcatttgttgggtcgcatttgttgggtttcaaaattcaaaccaaaagttattatgggccgattagagactattagatgagatcctacttttgtcatcagaatatttcatttcattatatgtttacgtccaacttttttgttgctaataatttaagggaaatttacaaaaatattagaatttagattaatttttacaaaaatactgtcacacggaaaaatttttaaaaatactgcagaacaactcaaaacaacagtagaacaactaaaaaacagcagtagaacaccagtgaaaacttaacacagatactgcagtatgaaagctataaaaaaatacagtaaaaaagaaaaataccgcttaacaatatttttgtaaaaaaataacaaaagttaatataccatgtaaatttctctaatttaaaaggatatttgctataacaaatcgttaatgtttgtattttgttgcacttatatactaattaattatgataatatattcttttaacatgattttattttttatttttacagtaaaaatcaataatatttttaatttgttaagcttatttctacaatcttatttatttatgtgaaaattatacattttatagttttttaaatttttatacaatttgtgcaaaaatatactttgttttttttactttctaaaagattgatttatggaaaaaaaaattagaaaaagattaaaaaaatatgagaaaaatagtataaggtaactggttacccctttggttatctaagggtaacaattaggggtgttcatccgatc

SEQ ID NO: 120053 - DNA, 862 bp, Cannabis sativa
ctctgaaattcctctctaaactctctctatttctgtcttgaacatacacaagtatgaggtaaatatataagcactcgggtagaacatttaactaacaaaattgtcaagtctgttaagttagttaataagggagttggttaactgtcaaaactgacagtgagtgtgtccgagttcaagggttcaaacgtcaacaaaagctgatgcaaaaaataaaaatcaaagtaactgatggaattccaaaaagatacaaagaatcaaagatgatataatttgcattaaaagacataaaaggaaatatgcaataaaattttaaaatcaacaaaaattattataaattaaataattttaaaaagaaaataaatgagagtaattataaattatacagtagattgtatgaaaaaatgtaaatacccgaacaaataacctgaaccaaattgaataaactgacaaaaatagaatcagaaaataaaacaacctaattataatctaaatcgccgaattaatatattaggtggattaaaaattatttaaatcgttcagttaacccaaataaatggatttatatatatatttataaaagtgtatataatatattacataaattatgtttattagttaaattattttgttttaaaatttaaattttatagtgtttaatttaaaatttatagttaataatttttattgtattcgaatattaaagttgaaatttaaaatctactatcatattattattattattttctatttttttgatgaatatttgtcttatgctaaagttttttaaattgatttaaggtgtagaattttaaaacttaaaatataaataatatatatattttaaatctaattatttaaatat

SEQ ID NO: 120054 - DNA, 3394 bp, Cannabis sativa
  modified_base (1784)..(1788): a, c, t, g, unknown or other
tggaggcttgaagcggggacgttacaaaatacagttgaaaaccaataatttatcaatgatgaactactgttttaatattctatttgaactactttgctataagaattccattgctcaaaaaccagttaaagatccaaggttttactgctccatgccagtacaaaagagtccgttttctaatttaacctgttaaaaaataacatttcaatacttaattttttagatcaataataaacaatttttttaacttaaacaaattcatatatttattcatcatttctaaacatccaccacaacatcatgtacaaaaaatgaaatcacatgcccagcttaacattgtacttcaccaaaataacattgtacttcaaaaaagaaaagtccaatacaaaagccctttaaccaacgcaaccatacccaacttaacattgtacttcaccaaaataaaatgtaacaatcataacaaccataaaacatatgtattagcatgatcactacaagacattaggtggttgttgggatgaactagcttctcttgccatttgtttcattctccgtttgtttctcttcacatttttagggtctggattcttcttgggggatgacccttccttttcttttcagtaagaggatcctaagaaagtaatttaaacagattatagttacaattcaagaaattacagttctaatagaaatttagttagaagaaatatacctgagtgactttttggttcttacaactagtttcgatatgctcacgttgtttgtaattggaatactggttagtttgtggcattttcctcaatttagttgcacatgctggaggtttattcacttctctgttccttaattttttgggcctcccgggtaatacaatttcaagtggaggaaggattggattttcgcctttgttctcccattcatcaggattaggcattggtgcaataccctttgcataggtagcttcaaaggcttccttcttgtagcaaggatccacaaatttataggcattaagattagaaaaccacaaataagctgaagcatgaccacattgtttagatcaaatgatctacatgtacatattcttgtctccaaattaatagataatacttgaaccgttatgtaggtaacttgaaatgatccaccaattgacttagtacaaatgtattgttgtgctacctttttgttcttctcaatgatttcaaagatcctctttccaactgaacaattctatttagagacactttctctttgcttgcacatccttcccattaaccaaaaacatattgattctaaaagagtgatgatcattttgtccctgccatctaagattgctgaattgaagctctcagaggtagtcgatctagcacattcccatagcgcttgcttcaacaacaacctaggaaaatccttcttgaagttttcataaagatgtctcacacaaaaatcttatatgagaatcttcaaaaactgtacccaaagctttttttatgcctttttgtctatcagatatgaaagtgaagcttcttgtgtttgccatatttaagtcctctttaaccagccctaaaaaccaagtccaattgtcagtattttctttctcaacaacaacatatgcaagaggaaacgtgtgtgacctatggtgacagtcaaagccctgtgatctgaaggggaaagactgggaactgtacaatctcacattgcttgggggaaggtcatgtgtgatgattttgagactgtgtaggtataagactacatagttgaagagggcttaaatggattgattggtnnnnnctatatcaataaggtgcatcttatttttcggtagcccatcacgaaagaactcaacagttaagcgtgcttgacttggaataatttcaagatgggtgatcttgtgaaaagtttttccaagaagtatgcgagtaaggacaaagtacgttggaaacactcgtgttggtttgtagggtcattcgtcactccacgaagcagccaaagtgacgtacctgtgtataagagccacattccatgggtgtaaagacccaataaagacttgaagcgggaactttacaaagtcctcccaaaatatctcctagaatatatttcgagttcttatttgcttctgctttcacagataaacaccaataagaaagtagaaataatattcaatcatttataaagaaagatatttaaataagttaaagtaaagataaatttaaatataaaatcacatttaataaagattctttgatttttaatgctgcatagcatgattcactgtgtttcaacatctgtcacctcctttaccaaattattaaagcaaagatgaataaattacactattggcttgttaagctaatggaatagaaaaactcaaatgacaattcatcatgattccaaacataactcaattacaaagcataggatgatagctcaaagttcaaactctaaaatgtgaattaaattaaaactaataaattgtattttttgtgactaatacttttagttacgaacattttaatcacaacgtaggaaatgttggactaagtctaatacactctcttcatgtttgggcctggaaagtgtgggtataacgaatgacctttaagagaccacaggaccgaacgtgacatttgaaagaatctcacaaggccaaatatcaggaaatttgtggattttaaaacaggtcaaagaccccaaaactggaaactggcacacattggtcgaaaggtctctgataccatgttataatttaggataaggttgttgagattaacaacctcaccaagcataacaaacaataataaaaaaaaaacaaaaatcaaacagctataatttgcagaaataaaaaatgatagaaaattaagaacacaaaaagattatagaggttcgaactttcttcactaaagtgaagagcctagtcccttttaaactcccttaggattagtctttattatgacaaaaatggcaagattacaatctatttagttgtacaaatcttagaacacaatgatgatgaagtactccccttgttttatcctaaacttgaagcttgaaccttggaaataccctgaagcttgatccttgcttctcttgatttctcaccctttagttcttcatagctccattaattttcccctttaaaacaagtcttctttcctcaccatacatggctctctctccctctctctatctatctatgtttgtaatgttactaaaatgaaaagagaaacaagagtttaaataggcaaaaatcacactcagttatgcctttattagttataatagaaaattaataaaactaacactctttatgaatcttgttgatgtgtcaagttcccacttgccatgttagaaaaattaataatatacccaagatctatttgtatataacatagaacac

SEQ ID NO: 120055 - DNA, 3149 bp, Cannabis sativa
  modified_base (738)..(740): a, c, t, g, unknown or other
tggagagcaagagaaaaagctttggagttagcaagaggaaggcaagatgaatcttatcagcaactaccaaaatacctacacatgctaaaagtagcaaatcttggaacaattgcacaattagaaacagataagaaggatcatttcaaatatttgtatccagcattttcaaactcaataaaaggttggaaacattgcaagccaatcattgtaattgatgtaatgtttttaaaaacatcatttggaggaactctattcactgcttctaccatggatgcaaacaactacatattcattctagcatttgagataagagactctgaaaatgactgctcttgggaatgattcttcacaaaactaaaggaaacatacggagataggaaaggtacactattaaaaaaactaatttcgtttgatctaaattcaagctaaaattttaactttatatataaaacatgtaataaattgcatgcattttgttacaattacaaacatcaatgataggaaataggtgttatctaataacaaataaagaaaaaaattagaaactggtttccactaaataaaaataaatgatgatgctttgaaaaataattatttatcatacacttacctactgatctcattaaaacgggtttccaggagcaaggttgacattcatatcagagaggcataaaagtattgaaaaggcagtgaacaatgtctacccaaaccgcttccacggagcatgcatattccacnnnctaaacaacatcaaaacaaactttggagtgcatggagatgatctgacaataaacttcgtaaaagcagcaaagacatacaagttgacctcatttgagcattacatgacagaaatagataaaattgacaaaagtataagaccatacctagagaaaattagacatgaggtttggaccaggagccactgccctacaagaaggtacactatgatgacttcaaacatagtagaatcaataaattcagtgatcctagctggaagatcattacctattacaataatgagtgatttagaagccttatgcaaaaatgggtgtggaaaaaaggcagtgaagcatatagaatatttaagtatcatcagaagctgaagcactacttagagaaaatttggttaaggcaatgaaatgctaggtaataaaactaaaataaaaaaagatcaataattagaaaacatgtttctttataatgttccaaaaccagtttctaacacattatttttttttcaataaatccacaggtcatagcaatcacaactatcctataccaagtaaaggtccaaaaaaaggcaattttacaatcaacctactggacaaaacatgcagctgcagaaggttccaataagatgtgataccatgtgcacatgcaatagctgtatttgcaaaaaggggattaagaccttatgactatattgccgactactacaaaactgcaataatgaaggcaatatatgaaagaaatgtacatcctctaccaaatgaaagagaatggactatatttgagagtctggagcagatagtgttgccaccaaaatcaagaaagccagcaaggaggtgtagagaataagatcaaaaggagaatcaaaagttgacataaaatacacaagatgtggaaaaattggacataatcgtagaacgtgcagtaatccacaactttataaacctccaaaatagaatagccaaaacaaggagtcaaagaagaagcattgatcaactaaaaaataaataaatacagattaacagtttatgaaaacttgtttctcagcattgattaaatttgagaactcttgtactttttcaataagatacttacaataacatttttagatttctaaactatgatctggttaaataaactttgctttaaagattttttcataatttcatatattttagaaattaaattcaatccaggtatttttatgataaaagttacatgaaaaatatttaattttacataataagaaacgagttattgataaagcaagaagaaaataaaattcaaaaccaacttacctagaaatataaataaatacattgaccattgaatatatcatcacaaactgctattttattacctacaaaaaaaaaacaaaaatgaactcaattaactacacattcaaagtaactacaaaaaaaataatataatgaagaaaaaaaacagtttaaaaaaaatgagcaaacaaataaaaactcataatataaagtggcattcattcaacatccagtctttacaaaaaaagataaccactaaaacttaacatcagtctttacaaaagataacgactaaaaaactatataacactatctttaagtaccaaatacaaaataaaaccaaaagaaacaagttttccatcaacatagggacataaatccaacaaaaaaaaagtattataagcatctaatcattcatttgtaatcatttgcctttgccttttctctttctctttgtcatatcctttgctttaacctttgtcttatcccttgccttatcatttgcattatcctttgatttttgcccccttttcaacacttcatcatctgttatataaccacaaatttttttccttctagcatgaataaataaactgatagtaagatcatctcgatatcttgcgaccatatttgccatcttagatggaatgtcattaatttttccacaaataaataagttagcaaacttaatgacatatactccacagtcactgcatgaaacaaaacaataaattaataggaaagatgaagtccatgaatcgatttctatacaaaataataccataattgacacattaaaaacagagcaaataataaaactggtttctataaaaaaaaatattaagatcaaaataggacaaattacctattgacctgacttgaaagccctttaataaacttgtaattcaatagttctctttttccaactgaatatggaccttcaaccaaattaatatcatctctagaagaataaacatcaagatactccaaagaaaacagtagcatagtagaataagttttgacatgatccaatgcacgtttcttattgacggcaccgaacatatagttatatacgttcaatatcctctccttgatatcaaagtgaacctgttgggttttgtgccctaaataaaaccctttaca

SEQ ID NO: 120056 - DNA, 3252 bp, Cannabis sativa
  modified_base (34)..(80): a, c, t, g, unknown or other
  modified_base (2586)..(2590): a, c, t, g, unknown or other
  modified_base (2790)..(2796): a, c, t, g, unknown or other
tatgtgtttaattcatcgttttagaaagttcatnnnnnnnnnnnnnnnnnnnnnnnnnnnnnnnnnnnnnnnnnnnnnnntaaaataatttccaacactaatgccctagtgtacaaagtggtcccatggggacaaaaatatcgctttcccgctgcatgctgcaggtgctagaggtagtctggcacctcgcacccttgtttggtgtcaggtggtccccggttggaagagggtggttacaatgtgtgttctttgggcccacgtgcgtggtcctcagttgttgtgagggggtcctcaagtacatgctcgtggtccttggttgcatgcggggtggtccccaggtacaggttgtaggagagtagttatagcttacccttggttcggtctttaggcctcacaggtccattatcgccgctacttgtacctccttgctctcaatcttcagaaggtgtggttgtacggtcttcccttgcacaaggaggtagaagtagcggcaacaatggacctgtatggcctgaagacccgaccaagggtacattgcaaccactgtcctacacacatacccaaggaccaccgcacgtgcagatggggaccgcgcacatgaacctggggtccatcctcctacaacctgcaactggggaccatctgacactagacaagggtacggggtgccaggctacctccagcacctacaacatgcagcaggaaagcgacatcttgtccccatgggaccactttgtacaccaggccattagagcctataaatactcccatttcaaatgtgaagggggttggaaaattatttggtgtaactcagatgttgaattcaatatagagaggaatatctagacatcttttcactttcatctttgtcttatctttatcacatttttgggtaaccttgtattttccgaccactaacttagttgacgagttctctctgtcaacaataattatatagtatatgtacataaaataataaataaataaataaataaaatactaaccatgttttaggtgggtttcaaattttgagttttcaaaaatattaaactcgaacccggcccgatatataatcccggatctggtctactaaaattgaaacccattttttctagattctttaggtttcgggcctggtgaattttttgtttcgggtataaatgtgcaccctttaatttattacaatataagatatatttatgtcattattgaagtagagttttttgcgactaaaccctctcaattatcactctacttgcacttaaccctctaagctcaaattttgacggtaaaaccctccaaactacttgactgtttgcaaatttaaggtgtcatgaactttctatagttaactgccaacatagactactcatgtgtacactcttatacacatgacacgtttatattggtacacctaatattattatttaaaaaatataaaaaatatttcaaattttataatattttttatttttataattttatttaattttaaataaattttgaaaacaattttcaaataataatattcaatataccaatataaacgtactacgtgtacaagagtatgcatataagcagttggtagttaataactgaatgccactttaaatttgctactagtttagtaatttagatgattttactgtcaaaatttgagcttaaagggataaatgcaagtgaaacgataattgagagagtttagcgcccaaaaactctgttgaaatataagatatttagagtttttccacttatcaagtcacaccacagctcgttacatccgatgctcaatcggcgagacctccgtgtttgtaggaacatccaacgaaccttcatcacatgctcatcgcttgtgatagtggtgagatcaagcacacggtggtgctgcaaaaattttttgcatgtgtacaagaagaaattctagatgatgctctttgtaaatggtttgtgtattcaatgtatctttgttacaatctttttttttttcaaaaagtttggttccagttttagatctgagaagaaaaaacgcagggaagaagaaaggggaataaagtgcagttttgggaatttttttttattagattactagagtttaaaaaattaattaaaaagaatttttcataatctttatgattttttttgaaaactgaacgttaaaaaaaactggttctattttatttttctaaatctcattatatagttttgttaaaataaatgtttatattcttcataaaaaatgattagattatattagggatattggcggctaaaccacttgaactttacggtttgtaacacttaaccacaaaaatcgaaattttggcgactaaactacctaaaccctggttccgttttgctttgcacacctccgtcccaaaatcatagttaagtgccacggtagactgtccacgtgtccacacttgtacacgtggcaagtttttagtggtccacgtaatattaattttaaaaattaattataaatatttaaaaaattaaaaaatatttttttttcttttttactttttttaatttaaaaaaattaatttttttttttttacttttgttttctttttcttcttcttcttnnnnnttctttcttcttctttttcttcccaaccctctttctctcctcatttgtctactgggcggctaaacaatgaaatacataaataaaaattaccccgaaactaatttgtcttaaataagtgaccgatagaaacttatttcgattaatacaaaatccattttccttcttctcttcatcatcatcaccatcaccatcaccatcannnnnnncatcaccatcaccatcaccatcatcatcatcatcatcatcaggcacaaaaatctgtccaaacaaattatttgttaattcttttcgtttgggttttggtggaaaaatcttatcaatatagatgtaaataatctcaactatttccattactagctagctaaggctaagagaaaagaagaagatcagagacaaaaacaaagatctagagagaaaaagaaaaaaaaaatgagtgaaatgagtcggcaaattaatctcggaccgcggcctgggaccactaccatcaccagttcttccctaaagatcaccaccaccaccaccagtcggccgcccagcagatgatcaactataacgccaggatgaggaatgataactctagaaattagagttatttttcacatttttttaactaaaattggcttagttcataagtttttaattaattgagtaagtttttaatt

SEQ ID NO: 120057 - DNA, 2840 bp, Cannabis sativa
gttatttgtatgtttatgttatgcttttcttactgagtctgtcgactcacagtgttatttccatgtataggtaaggggcaaagccaaggctgagcagatgaagattgtacatgttagggcggttaggcctggagcgtccgatctttaggacatcagggcttttgttgtctcgtcactaggcgacaaaacttttttataagaatagtgaacttttgtaaatgtattttgtaaacaggatcccagaattctataaatgtattactttatgtttttaattaattaagcaaattttaatttatcacgtttttcgttaattaatctcactcatattagcaacgaacgagttgcacagtacgtttaaaatcacgctaacacgcttaaattagttagggtgttacaatagactttctagcattgaagcaagtctagaaatatgagttagtgtagcctaaaaggtctcaaagcatcacctttatagagtaacatatatgtcctctttctaatcttaagatttatttaattgtcttccaatgttcctaccttggattagtctgatactactcataactcccactcagcagtaggtgtctggtctagtccacattaaagtgtacataagacctcttactgttgatgttcaagaaattcttttcttgtggcttttgtcttttctagaatagttgaaactattccaaagataaataaaatctatgtctagaagttagatgtcctcctttagatttgaccattgaaaagtgttctagcaccttacttatataagttacttgcaagggagtaagtaaattaccaggtataccacaagccataggtttagatgttctcatcaaatccatgatactaggagcaggaagttagcttaagtccattgaatagacctagcatagtttcacttcttgtccttgcattctacaacttttggttaatccatgtgaatggctgaatcaaagttcttggcttcgagtcttagttccttactaggactttctattgcttgtttaaactaacaatggattgtaatcactagtgtcatccaagtcataacgagatgggtttctagaaactctcccacgacgatgaggtactatgactttctatctaagaacatcaatggtattattctcttcagttgtcacgactcgcgtcgatacaacagaggcagtgggatcaccttttgacttttgtagaagatgatggaacatttagtatttaaatcaaagattatctctactactttgctactttagtttagagattacgtatttgtaaacaaacctttctaaacttataactttagaatagtccacacttaatttttttcaaaacaaccaataaacatgcaaaccttagttagcagaactagcttttcttaagttcatcatcagagcatccttggatctaataatggtgtacagttagggcatcattggatctaataatggtgtacactaagtatacaaccattgaaacgttccaagattgtcttgggatcagacttagatgggatgacatttagaatgtcgttcgctgtctctaaggcatatccttagaaggactctggcagctgctattaactaatcataaaccttaccattttcatcaataggcaattttgaagttttagggaggtaagtttagatacaattcgcagttcagcctaatgatctttgaactgcataactaaatatctatctgtccttgtcagattgcaagatcaatgcatattttaataagtacagaccataagttatatatgtatatatttttttgtgtataaaatgcatattaattatcatttcaagatcattataacaaaatataaaacttgagatagatggatatgggtaacatatttgtttatttatttttttttttgacaagttttgtttaggtaaactaaaaggaaccattaggttcatagtaggctaaaacatagtactaatgtagtacttattactttaatagtatgtatcaaatgttatgaaaaaaatgctatttttatgtagtggtgttctttctctttcgtgatggctttagaactggttcatttttgcatgatcttttgttgtgtcctttttggttgcaccccccacatttgacctgtgtttttgtttctagcatacatttgtacctttgttttcttggccgccctgctggcctcttgtgtgtcgggaataaaataatcatatcctttatatgatctggtatatctcaagatgttgaatctgctagtgataagatactatcttcatacgttgacaaaaaaaacttttgttgtgtagtagtatgagcagtagctgtagcaagataggttctttttggttaatacagccattacatgtgagcaaggcatttcatcatattcaaatttctgacagctgcaaatttttttccaggtttactatgtatgagttggtacaatcatgtactttgtattagggtgtactacaaaaaaaattttcgtaagtaaactaactgcccaacttgaaataactaacccgccgcccaaaccaaaccgacaaaaccgataaaaaatacaaaccgacataactcgacaaaattctaaaccgcccaatcagttaattggatgggttgaaaattgacccaaaccgcccaacccgatttaacccgatttttactttttatttttattttttttattttatatatattatataatatataatatatattaaaaaaaaagtccaaaatcctaaaattctttctcaacctctcaataaaattcttttctcacatagtgtgtatttatgtggttaatttttattttagttgaaactaaaaaaaaaaaaaaacccctctta

SEQ ID NO: 120058 - DNA, 1029 bp, Cannabis sativa
tcatttgattaacacttgttgtgtttttggtggttgaattccatgtttcttgctgctatttctttttctaaccattgtgtctggcctttgtttgagaaaaatttagaatcaactaagacaataatattacaaatatcactaataatgacttgacatatactaactcaagtatctatacatatcaccattgacatatacaactatttagttaaagtttcataagtagaatgtaataagccctaaagaaacaaatcacaaggcagagaagcagcttgtaccaaaaataaagagacaactttgtcaaagagtgaaccaaaatttgttctctgtttagtccaaatgatctgatgatataataacttctaaaccatacaaaagaaatgtggaccaagagcatggacaagttcaatttaggagagaaaaaagtgttccaatccaataaaattcatggaaagaaatttgctatatatttctttggaatcattcttgggaacatagtgtaatatttcaaggtctacatatactcatgattaagcacaaggtcggttctgggctaaggcgtgctaggtcagtgcctaggggctaaggtcgatgaaagcatcttctttgcatggaattgttagagctcccattgaatgatcaaaaccaaattcttcttcagcttgactcaacaattcttggatggaaggctggttcaagtatgatgacataggaatattttgtacttaaaaagattttttaatgaaagctaaatacatgggatggtagtagtgtaagtgatcctataacttcccaattctgagatgtgccattgtatatgatcacatctctctattttgcttattctccaaggatgaagcattatgccacatgagcaaactttaaggaaaaaaaaaaagaagttaaccaagttcaacgacatcccaataattgtgggatatttttctataagtgtgagatcttttcttagatttttatttatttacatttattattcattattttttaatgagaaatactattttggac

SEQ ID NO: 120059 - DNA, 4011 bp, Cannabis sativa
ttattataaattaaaaagatgagtcatttacaatagcagagtagatagtcggagggatatcctccaactagaaacaagcctcatgcaccgctaacgcaaacttaacaaacccgtaagtagccatattggttgtatgtttgacatgtcaaacagttacattaagaaaaaagataaaagacaagtgatgtctacaacaaatcattaaaaaaagagattgaattgaagggagctcgcaaaacagaagaaaccataagagcatttgtctccatttgtgcaattagaaaatattgttgaagagcccaattcaaactgtgaaaaagagctttggcctccatttcatgagaactgaaattttcaactagcggcttggaaatggcagcaacaacctgaccattagagtctcaaaggacagtaccgacatcgataatattttgtgagacgtccataacattgtctacattcatctttaaatcactaaagattggagatctccacggggcggggtagcagcaggtagtggttgtagtggttgttgtggcgtgatagtagcagcagtttggattgagttaatctgaagttgctcaagtaggttgtggcgatagaggcaaggtcttttgctggttttgctttttgaccatggacaactcgattccgtttagtccaacttgaccaaagcgtgcaaaaaaaattgttccatttcagctttggagtagattgaagataaaataaatagtcacctttatacatcgaggaggacaaacaccaatcaaagaccatactcatgtgtcgccaaactgctcaggcatatttacaactaaaaagttcatgtccaacagattcccatgcttggtaacatatatatcaagttgagtttgtgattacctttcttcaaactaaagaggttgcattcggaagagcattgtggaattccctccatgtaaaaattctgactttcagggggaaatgcaaagaccagaagaacttccaccaagatgtagtcgagtgtgaacttgaactttgatcagtttcgtcaagagcagatgctaagtgatagccagtttgaactgtgtagaaaacatagctgtgataatgccatattagagtgtccttgcagttgaaaaaacttagcggaatggtcaaaattttgtccacatccaagggagtaaaaaattgttacagaacgggaacatccctttgtcgtttatttgttatcaaattaataacaactccatctatcagtccagtgtaatgaagaggaaaaaaagtattgtgtcccgggatccaagggtcaaagcctgacctgattgtccttccttcactaattttccaacgcaaacctgttgaaagtagatccttacccccaacaaataccctggcaagttaaggaagggacttgacccaaatttgcttcaagaaaagtgttatttggaaaatatcgacactttagaactcaattgagaagagagtgaggtttctttaggagtcactaagcttgttttgctaataacacttgattaaagtaggcaaaagaacgaaatttcatgcctccatccgctttagatttacaaagaagattctaagaacatcaatggattttcgaaccattttcagtcaaactccaccaaaagttagctatcattgactcaagttgtttgcaaaaaaaacctgtagacgaaaacaactaatggcatatgtaggaattgattggaccactgccttgagaaggacttcatcaccccctggtgaaaaaatttctcattccaagtgacataagttcctaaatcttttctttaatgttactaaacaattcctttttgtccattccagaataagatggcaacccaagatacttttcatggcattcgcaaataggcatggagagatgctgatgaaagaaaatttgagtgtcgaaggttgtgttgggggagaaagataatactgatttgtccaaattgagtacttggctagtattcaaggcatattggcaacctaacaaagcatctgctatgagaaatagcaattagcatatcaaggacaaagtcagactatgaaatattgctttagcatatcggctttgcaagggcgataactacctggcctttatcatcacggatcacaggtccaactccaaatggtgtttcgacaagcattcaacgctgcatttacattcagtttgaggtgatcaccagttagcgggggcgtccatggaacctgtactggtatcgtcggggagaacataattagggttgcaccttatgccggatggaactttatgcgagctgctttgaagtcatgcataattctcagcaaagaaagctactgttgaggctggttttggtgtagctccatgaactattctgtttttttcagtccatttgagtggcgaaggttgtgttgggggagaaagataatactgattcctcaacatatttacatagattaaatgtgcactacatgataagaaagatttacctcttgtagtctatcagggtattctcaattttttttgtatataaacaaacatccaatccaaagcttttgatttgtaaatagctcacacaaaagtcttccagataaatcatcaacactataggacaagtgtgggcttacttgggcttgtaggattaatcaaggataattacttttctatccaatgtgtactcaacttatgacattgtaatgatgagagagagggagagtctacaagtgtatcacacaagtagagagagaggctatatggtcggctatgacctttctctggttagaaaaaagtatcgaccatgtatcatatcatttaggttaaacctatagtgatatataagcctttatttaatctaaaaaaataaatataaataactgaataactgaattcagtttatctttaatttatttaatcattgttaacccataaactttctttagtgacgtgaacatcagtgtttgacacatggaaagaaagatgacatctcggagttgagtagtctcgagtcatagcagtcgacttgggaggggtccctagccttacgtccaggttgactctgagaactctagaatggaagttcaaattccgataaattgtttctaactcactatcttttagtattctgtaccatgaagacatggagtgactaagtcctggccctaagatcggtcttaaagtatatgtggcctaagaaaaaaatcaaatttcggggcccctatgtatagtttaattattatcaaagtgatagttctaatattttattgtaatggtaaagttttaaaaaactcttaagagctccaaggttcaatcctccatagctacacaataaatatttttttttttttttttaaaaaaaagtagagatttgggattgatcccttgacctcttggcttaaagtaaaatcttttacaactacaccaaataatatttattatattttcttctcatttaatattttatctatatattaataatttttttttacaatttcggggccctgagcggttgggggcccgaggcgcacgcttagctcgcctaccctcagggtcggccttgcctactactggtgcatcaactgtaggaggaggtatgtcggaatgctcaggattgtagccttcgacccttgtagcttcttcagctactagctcatctccattcaagttaaagtctattctctggagagcatcttcattgaaacgctgctcacaatgccttataaggaatggaagttttgtctcagggaaggccgaatagttaaaagactacactcctccattagacaaccaagcacagtagatggcatcaaagcataagtcattgtaaaaggtgacttccacaacaaacccgttgattactaacggattacacagttagttttaaatcacgataacacgcctaacctagtagggtgttacatcctatgtcttgttgagtgacatccttgtgcaattttgactttatgtttaagttcaagtttttttatgcctaaataagtcaagtccttgttggttttcttgtcggattaagg

SEQ ID NO: 120060 - DNA, 978 bp, Cannabis sativa
  modified_base (87)..(89): a, c, t, g, unknown or other
attgatgggtttagctacgttaaatgttgcgaaagccgctttgatcctatgttagtataatcaatggacgagattgttttgaaatannnataattataatagcaaaagttaagggcttataacgttatacactatcagaaaatatatatagcccaagtgggagactgttggattaaaatgctcaatataggctcatatgtatattagtgtattgctatttgaagtttgaccctaaataaagtaatcattttagtaattgtgggtcattgggtattaatgtgtcatgagctaaatgtgtagataccccaagcgatatttctaatttgttgaggggataaataagaaatacttaaaattaatgacgtagctatgaggttataaattggtagtgggtccccaagaaataagagccaatttctattttcatcttcccccatcaagagaaaaaattagaaaaccctaagtcttgttttcttggaagatcattacccaaagtcatcacaaataaagattatttctacaagatagattaagatcatcactattaaggtaagcttatcattcccaaatatatagattcacttattggaaccatcaacaactatagttgtttactacaaatcatttgagcaaattcatgaatatcccctctattcaatgtcttatttgcgagttagctaaaaaatcgcataatcacctgttcatagactgtatttttactacgaaggttgttgccgagattgattcttggttgggtgtgcctcagtggccaagggacctaaaagaattgattcattattaattggtgttcgatttctgacaataatatgagaaatagagtactgatcaatgttgtaatggctgttactatttacatgattcggagtgtggaagttgatcctctaaaccaacttattatccaactccttaaaccaactaacttaactaactttcggttatgttagttagttagttggt

SEQ ID NO: 120061 - DNA, 2759 bp, Cannabis sativa
gtttattttcatcgttttagaaattcatattaggatgttaaaaaaatacttgtttgtaaatctagatcctggtaaaatatattccaatataggccctggccacccgtgattccctagttggctggtgcagtaggtgtgttgacatggggtagattgcaccagttgctagagttaggtggatccaaatagctgaagtgattaaaatcacttctcaagttattattttgggtgtttccacgcattctcgcacctatccagttgaagattggcctctaggtcactcgctcccagatgcctcgggaagggagttcacttccctggccaaccagaggtgcaccactagagggttggttgttcaagggttggccagtgggaggatttgttaagcctaagatcccttgtcgccccctcgaccattagttgtcgagatttggttgttctcgccatcagaccttcgtggcaacgcatatactccttcaagtaggggaaggtctgtcctagtttgtgaggaacctggttggatagtttgttgatagacgctccccaatttgttgactagtcttccttagagtggatctctaataaaagcttggcctctcccaatagttcgttcattgaactgtcttatcaggttgttgacttctctgttgcggtggtgtagctcttcctagtgagatcggaggatgtactcttggtcatccatcaatctcaggaatttacatctctattgagcaaatacattgcagtcaacagcgtgtggttcttcagtttggccggtttagtaaataatctctctaagtctggctaactcgagaactttttccatgtctagaaggggctcaccaatcgcgggcttgcaaattcctggccccatctctccaaccttataccgtagatgaggtatgattgttatgcttagtgttgttccctacgggtccttccttggaggcgctagtggagggtcttccgtcgaaggcaagggctgattgatcagatccactgagatggcaggattgaccacatctgtagtctttatggaaattccagtcatgacgggacatgaacattaggatctacagtcaaaggatcttgagggagccccgaggtggcagaggatgtagctggagttctcctcgtgttaaccatgacattttatcagataaaatattatctctctctctatgaaagcacctaattcttgacctctaatttggccaaccaacagcggagttgtatttaatgttgatgttttccacgtgttacataataagaaaaataaagtaaatgaacatgggattttatggaggttcgacccccttagttagcgggtaatgacctattccccttttagttgtactggtaccgagagataatactactcagatcactatagtgatgggatctaaagtagctctgtaaaggttacaatgtaggaatcaaagttggcaaatctcaagtatgagtatagaagtgggcgtgtgcgagagagaggtgagttctcagacttagagttagggttcctaacttaatgacttaggattttagggtttgggtaaggcttttttatataggagagcttacacccttcatatcccttagaaataggtaaactaagctattatttacatattaaattagttaaatacaaatgactaaaatacccctcaaaaatagatatttttcctctatttccattgcatgttaaggcccaatctgttgtctagcttgatgtccacgtgtgaagttgtacacaaaaatcctacgaggaaaaaatctggttggccatgcatctgttggatgcatgctggctgcccctaaaatgtccagaacctggccgacctatgctggacatagggacggccaagggtggccaacaaaccccctctaggtggctggttcatcattcattgtgtggcttgagcagttggactcctcattggttgtagtactaaagagatgacttggctttctcgttggcgagatttagtgcaatgtggcattgatgttggccacgtagacatgccacgtaaggtgggaaaaaattgagataataatagggaaatcaatgctctaggtctttactttttgtttaaaattgttatttgtctgtttgcttttcaattatttaataatttcattcttaagcatgatttactttgaattatctaattaaagcatacaaccaaaaaagtattgtaattagtgaaatgtaataattaatccctgtaggtcggacaatctttttagaattaaaacttttatataataatgttgtacgcttgaagtgaaagttgtatatcaattatccctgattataggacacaaattgaacaactatcaacatgatgtggcatctacattaacatacaactggcacctcatgggctggagtccaccaaatgggcccaagtcaatatgttatttgtatttaccccattagtgggaaaagtgaaaatgaataagaaccttagaactataaatataagaacacttggaatggacgaaatttgagaaaatactatcagtaactgtaaaaggtttgatgacccccttcacgtacacgatgctcgaacatctactcttaagtagatggccttctgagcggacctcgctcaagggtttggataaaatgattgacactcaagtcgaatgaccatctctaaagtacagtttagaaaatacaattctttcatgttttaattagctaaagatcagttagatcatgtaatagctttcataattcaataaatgtaagttac

SEQ ID NO: 120062 - DNA, 2186 bp, Cannabis sativa
gcatagaaattggtaataggaagataatcatattaggtcataatcaatagaaacaattgaaaacgaagccctagtttttattaattgttaatttcctttatttatttagttgcttactacttccactagttttcttaatttaatttattttcttaatttttattcaactaaatagaagtaaaagtttaattttaaagtacttaactacaatccttgtgggatcgacctcagtcttagtgagtctactactttttatgacacgtacacttgcgtgttgaatttaccacaacaatcacttcaagaattattcatcataacttgttattacatattgaacttctttcttaagatcttcagtcaataggtcgggttgccattatgaatgattcattaatctaagggcagtagtcccattctttttgatgtattaaggactttctctctagctaaatctttcgtcaaaaggatcagacaatttatcatcaatgcatacatgatccactctaatagctcctgttaagagaaactctctagcagtgttgtgctacgatgtattcgttgcctcttaccattgtaataacggttctaaacttttacaatagtcgcagtattatcgcaatggatcaacacaattagtattggtcttccccataaaagggatcttagctagcaggcttctgaaccaacctgcttcttcactagcaattattaatgctatcatttcaaactccatggtgaactgtgcaaaaatattttgtttctttgatttccaagaaataaatgcactagctatacttaaaatatagtcattggttgccttggaatcatccgataaagtgttccagtcagcatcattatacccttcaaggacagctaaaaacttctgataatgtaatccaaagtttaggactcttttgaagtacctcatgaccctctcaatagcataaaatcctctacactaggtctattggtaaactagcatagtaatcccacgacataggttatgtcgagtctagtataatcaatggcatatcgaagatggccaatgatgctcgcatactcagattgtcttacaccatcactagtgttcttaaataattttacacttggatcatatagtgtacaagcatgttaactaataaagtaattatatttctttaagatcttctcaatgtggtgagattggttcaaagaaattccattttcagacctagtgatctgtataccaaggatcacattcacttcacctagatctttcatgtcaaaaagtttcacataacacaaatttcacattgttcaaaaatgaatatttgatccaaaaatcagcaaagtcatcaacatgtaaatgtataatacagcaaatgttattttcatatttataataaatgcttttgtcactttcatttactttaaaaccatgtgagatgacaagattatcaaatttctcatgtcattacttaggtgcctctttcaagtcatacaagcatttatctaatttacatactttatgttcctgaccaggaacaacaaaaccttccgattggtccatgtaattttttttttctaattcaccattcaaaaaagaaattttagcatctatttattgcacaacaagatcacgagtagcaacaaaagtaataagcacacaaatagatataattctagtaacaagtgaatatgtatcaaagaaatctacattttttttgtctaaaccctttgtcaatttctttttaagaatccacttacaacctattatcttacaacccggtggtaacacaattaaatgccaagttccattttactcaagagagtccattttgtcattaataacttcaattcacaaatcaacagtgaagtcaaagcttcttggaggttagaaggatcctcctctagagtatatgcacaaaaattagaactaaaatctttagatactctagttcttttaattcttctaggtttagtttctatacccttttcatgctcattatccctaataacagacatgtttctagatgatgcacccctactatttctcaatttaaatagaaatctatgttcataaaaattagcatcattagacactactacaatatgggcctttcgcttccctttttttaacccattttataaaaagggaagctaaagggtgtgaaaacacccacctgattcgaaattgacatttagag

SEQ ID NO: 120063 - DNA, 928 bp, Cannabis sativa
tccaaaagagatgtggacgtctaacttgaggataaactcgaattggccagcaacgtttatgcttacacaggatcagatcttgtcccccgtaccagaacatggtagtgcgcgcaccctatacacctttttgtcaaacgattattctagacatttacttttcaagattaaaccttttgcccaagtcagttctccacacttcaaaaaggtgggcaatccatctctgacttcgtcgacaaaatgctattgataatactcattggatgtagctggatcccccatccccgatcaagatgtcatacttcaattgttaaatgatcttggaccagagtttggttctctattatcatgcatcattgcgcgtagcgatactcctacctccgaagaagttcaggcactcctcttatcttatgagagttgcctcaaacgccataacaccatcacaaatctcaccataaatcttcaagccaatgtggcatttttcgggatcaagaaccaactcttatagaccaccacaaggttccaaaattggaggttgaagcagattttgtggaatgaatcagaatattcgacctcattgtcaattctgccttcaatttggtcacacttcccctgtgtgccattataggtttgacaagaactagaatcttcccaaactaggcacaaacagtcaaacaagcaacaccacgaacccctctcctcgtgccttcatcacagaaaatgaattcgattatgatccacaagcatttgccacttctttcatccctgcctttgaagatgattctagctagtttgtggacactggtgccacaaatcatatcactccaggcactgaaaacttggactctgctatggcatacacttgtttagaaggtcttgtaatagtagacggtaagaaattacttgtttttcatattggttctactacatt

SEQ ID NO: 120064 - DNA, 1149 bp, Cannabis sativa
aatacatatgatatctgtaaatctggagaatacaaatatatgatatatatatatatggaaagaagggttatatatattcatatggcatacatgaacagccccaaaatcattatttataaaccaaaatagtattaattaccatttttttcagcaaagaatcaaaaataaaataggaaacttataagtaaatcaaagaaaaagaaaataaagaagtactgtcaagtaatgcaaagggaaaaataacaagaaaaaaaaaaaaggaatgaagtctgaagttagtgaagctcacctcaaatatgggggctgcaacaagaaacggtggagaatggagattttgtgttgagtatttgtgttagggttagggatagggttagaagtaggagaaagtatcactatcaggtaggtgggccgggttgggttgattgggccattgtgggcagcccgtgtccaaccctaggtgcatgtgttccacaaattttttagattattttagaaatatccaaaaactacaaaatgtttacgtttttacagaatatatatattatatatttatattttctcggatttttttttaatttttaagatgttctaaaaaagattattgtatacatattgagcactagtggtaactaacactttcaatagatggcgccttatattctttaaagctatttttttaagttatatgagatttaatacttaattacactaataatgcggtacaccaagaaggaaggagggtgctagacactagtagtgtcttttagtatttctcaaaaataaaaactattttaagtggtttctgtaatttgacctaaaactcaattgggcctactttttaatggactgctcggcccaaatccagtagtagtattacacattaaaagggagaagcagcaacaaaagaataattaagagaaaattatctcagaatacactttttttaaattatttataaaaatacgctttaatatttaaatgctcaaaatataacgaattttcaattaataatgtagtatgtctgtaccgagattccttttcttttgggaattttacaaaaatactgctttttgaccaaaactttacatttttactgggacacggcaaaaacaacttttgtactgcccaagcccaatttcattacttttg

SEQ ID NO: 120065 - DNA, 3574 bp, Cannabis sativa
  modified_base (26)..(42): a, c, t, g, unknown or other
  modified_base (3382)..(3385): a, c, t, g, unknown or other
ttcatattaggatgttaaacaacatnnnnnnnnnnnnnnnnngatcctggtaaaataattccaacggatagatgtatccgtttgaaagaaatatgaaggtacttaaaagttatgtgcataaccactatcggccagaagcatctatggttgagtgctacatatctaaagaggctgtaaaatttggttcaaagtacatggccgaagttgaggcaattggaattagcaaaccaagaactgacccaaatgaggttgatagaggattaagggggaaaggaacaatggtgaaagtgtccaaacttgatctagatcaagctcaattagttgtgatgaacgataatgtagaggtttagccatatataacgtaagttgtaggtagcttttcctttgattaacatttaattagtcacgatgaacaattacttgattaatctttcatgttttgtagtgaccatatggagatattacaatcaacggttacaagaaattataaaaataaacaaaaatggggtgcggacaagcatcatcaaactttcattgggtggttaaggaatatcattcaagtaaagttgaatgaaacgaatcatggagtatcctatgagctgagtcgtattgccctatgactaaattttgcggtagcaaaggatgaagcgtacattgtgaggggtaaaggtttttatacaaatcaagagatgatgctcgagaggtttaaaatagtggcatacgtattgtcgcagaaactatgcattttataagtgcaaaagatagaaaccctcttttaggtaccatgacatattatggggttcttgaaaaaatatgggagcttaattattttgcgttcagaattctactttttaaatgttcttgggtttacaacagtgttggagtaaaactgacgagcttgatttactttggttgatttaagtaagagaggaagcaagaatgatctaggctagccaagcagtacaagttttttacatttttgatccatggccaaaataacattctgacgcaggtgctcgggagaccagagcatgtggacgtgtcagggctgctaggtgtactagtacttgaaaaatattttttcattagttatacaaaataaattatagctaactttatttattgatttgcaagttcattgccaaggcatctaaactgtttgacaggaagaaaatagaagtttttgatgttgtggctcagaaccagagggagattgacaaattgaaagccgaaatcaaatcccttaaacagaagaaagatgttgccgaacaagagcagaatgaggatgaggatgagaaagaatcacaggtggctcatcaagcatatgttccacaacaatatgatcaggaggatgagggtccacaaaattatgctcaggagtttgtttctctaaatgagccacctctcatgtacaatttttgctgaacagagggcatctaagcagcctatattttctctatcagacaatatcgacaacatagtggccccagataatctgtacgaacatgagagtaaaatcatagtttacactaagccctatgatgattcacatgcttgggttctcatttcaaaaatggtgcaagagaatgccgaaatcccaatctcaattgacgggtgcagatgcgttaagaaagtagcgaacatgttccttccttggactaaatacctaattgtaacactcgaggtaatggtttgttataaattaattattaatgattagtggagtttgaatatcttaaatattcaaccataatgaagtaagttctgcgaatacatatgctgcagtcggatgaataaataatcaattgttttatctttttgtttgttattaggcatgtttaaaatttttgagagtattcaattatagtcgttatgctgctgaaaatttggtagaattaagatcaaatttggtgttttgtataagacgtgatgtgtcgaagggaaaatgtcccatgtcttgtggaaaaggcggtggtgatcaagcagatctattattcacactagagatcatggcactaatccccaagtcaattaaatggatggttgaagaatttttgatagtcaaggacaaacatgagataatcctaattcgggtaccccgtcgattcatagcaccttgtacccagttcaagatatctggagaaaatttacagcaggtggcgttgtgtgacttcattggcaaccaggaaatgatttttggaatgatgtatactcttctttaatctaattaaccttatatattaaattctaatgaaattattataaaacactaatatttaactatttaatgcagacacatctggaagagcttaaatgatttgagatgaattttcaagttttatgacccataatttctcgtagtgaacggtatcaacgatttagagaaggaagagtcttttgagaatgcatcacaaggattattagttatcatcgatgaatatccaacactaaatgttctttatgtccaggaatattgagtaaacactatttaagaggtaatttaaaattgttttctatattataacttaaaattatttttacactatcttacatacatcccaatataatttttttagttcgcattggatgctagagatcgttgcaccaagaaaaattatctatttagaccctatacgtggccacaaagttctcccacaaattaatccaatgttagaaaggtaataatttaattcctcattatgtaacaaatcttttgattaactaagttatatatatttatgttaatgaattgaaatgttaatataatttttaaaatagagcatacaagattataggggcttcaaatgcgtatcttggggtgtggccaggaattttactatcaaattgtctaagacaatttaaaaaccaagaatgtggtttttatattttgaaatacatgactgacatcgtcgcacgtgcaaattctaaccgttacatacacgatcaaaaaactgtaagtttatttattaattatcgtatttattatattaacaaatataaatatatataaactaatataaaattttacttctttttatcgtttggggaaaagaagacataggatccaaaaactgaattgttaccattacaatgaccgtggatagaatgattgctggcaatgattcacgaagacttagacgattgatgctgaaatgtataagaatgtttcttccctaacttatttttttaggttaacttgtaattaaatttattaacttgttaacacttagactaattttaaaatatttgcataatataattgtaattttcttaattacttctatgaaattaatttaagtatattggctaatcataaaattaagtgtaaatactattttggatcctacgttttgcaaaagttactaattggaccctctatttnnnnaaatgacaaaatggaccttatattttccaaaatggtaaaaataggaccctaagctcaattttcaacaattttattttataatataaccaactttaagataatttttaacacgaatagatacagattatgtaaccaattttttcataacatatctatatcagattattgttaaattttattttgacaaaa

SEQ ID NO: 120066 - DNA, 661 bp, Cannabis sativa
aaattttactttcattttgtattttgtgattaaaaaattaaaaaacaaaaatgttaccaaacgtcacctaactcaagtgctactaacttatgtttcaactctcatttaaatctatcgtaaatatgtttacttatcattggccaaatatgtgttccacattttagtactttcgtttaaattaaattaagggatgtaatattctctagtaaaattcaatcaagatgcgtagaaagaatacaagaatacttttgctactacttgtaagaggatgccttgaacaacttatcctacgtatctttaaggtcttaaggacccatgcatttaatgagcccacaatccatttgcactagatatgacaaaacaagcttttagaggagtgttttttttcttcagctaattaataatcaaccgacactatggagtgtaactcaatgaaatttaataaagattattttataataatcaatgtcataagataataattttttaattgtaataaaaaaatacatatggcgtccatataaccctttcctgctatcatcttctacaaacttcaaaataatcagcagtcattattcctctcgaactacgaaattctcgaccaaccacctattttttcatttttcatccgtttttacccattttttttttttttttaaaa

SEQ ID NO: 120067 - DNA, 930 bp, Cannabis sativa
  modified_base (895)..(898): a, c, t, g, unknown or other
gtgttaagaaatgaaatatgcaatgctctgcctttcccttgctgctgacatctgtccgaatggtccatcttcatcaatcactgacagctcatcatttgccaatgattactctctgatttgcatatctttctgttatttccttttataagaatattccctttcttgttacaatatttgctgaggtgtactctttctagaattatcctttgtattgtatttaaacactaaatgaatgaatggctcattgagctgaatattacaattacagtctacatccatatttccaactggttggacaaaattatctaatttcccataaacatccaaataaaagattgtaaaattgattaagctcattctctcgagaatacaatataggaagaagaagatgagaggtggatataaatagaatagccgataaataatttttacaaaattaaaaaaaaaaaacattactaaaaaaatgataccatttcatcaccacaataatttattactttgaaattagcattgccacttcgtgacatgtttgagatattttttttgtggacaaaatattagataatgtttagttgttaattgttatgtttattttatttttctttttttttttttttttctggggacagttagttaaaagtatattttttagttgacataacaacaaataaaaacatgctgcaaaaaagaaaagtataaatgaacggtatttcaataattaatacaattacaagaaatacgttaacaaatatacacttttcttttctttttctgtttttttttttgattcatttttcgttttatttaaaaaaacagaaaaggaaaatactttgttaacgtagattacaagctttttcttgaaaaattaccacatatattatttttttaacttttnnnntttttttcaaatttacgatttgagtttctaaa

SEQ ID NO: 120068 - DNA, 3201 bp, Cannabis sativa
ggcttgaaagaaggttatctagaatgaagttaaaatctccatctttattccgatttcggaataacggcagccttaggtagttaatgttgccctttaccgtactgagcccaagagccttcttaatacatcgcttcatcccatcactgatattcttatatttgaagaaaataaaagttttcattttattaacacgttgtcccgaccaattacagaatttctccagacaattttaaaagcccgtggcttcatccactgatgctctgcccaccaaaataaggtcatccgcgaagaactggtgaaagagtctaggccatactggctcaactttattcctctaatggtgcccgtgtctagggcattctcaagaattcgagagaggatgtctacaattaagtctaccaacctttactgtcattgaggcagatatatattgaaaactgacctggatatgcactgcctaacccacctacaaaacttttctggagccttaaaacttcgaagcatatgatcattaaattgtcagcttagcttatcataagctttaaccatatcaatttttatagcgaagaattcctcttttccttttttaagtttaaaaagagtggattatttattgtactaacacattgttgtcttggatacattgtcctggaacaaaggctacctgagtacgtaggacagataatttgtgggagaaccctcttaattcactttgcaatgatttttgagataactttatagattacattacaaaggaaaataggtttgaactgcaatacttttttcgggttaggaaccttagaaatgagaactatattagttttattgattcctttatgtatagacccagaaaggaaaaattccaccacaccctcacagaaatctttttccactaactcccagtaatgtttgaagaacaaagtggacatgccatcttggcctaggactttaagagctatcaattgagcaaaaggtttgtctaacttcctgaatctgatccgagatcaaaatcaaatccacctactccaaaggcgataagtggtccactatcaagtattcaaacaaattagatcatataccttaagtaaatacaatatacatattatatataatataatgtaaacctagatctttccaaaaaaataaataaataaataaatacaagctacgattataattttttaacaagtgtatggcaataaatttaccatgaaggacaagtaagaaatttattggaaggacacacatgtgattcacatgatgtttaactaagacctaaaaagaaaaagttagttatccataataaatttaattttctcaaaaaatagaaataaaactttcatcatcttaatcatattggcagcaattaatgttattaacactggatacctttaaaaaaaaataacattaaaaaggaaatcatataattcaacaacctttaacttgattttaattttcaaatgcttaaataagaatttaaatattacttctagattattatcagtatttggtaatggtaaatgcataagttttttttttcttcatatttacaagattcaactatataagttgtggccatggaaattcatcaattcaatatatactcccccattaaagttacacgaatgatcaatagtcttatatcatccaaacaaaatcattcaatctaacatatatatatatataaataacaaacaaattcttttggtggagaatcaaaaaaaaaaaattaaaaagaaagggaagccgacagcaagaatcgttggaacagtggaaaaatgaactagtattttaagttggttagattaattaattgtaataataataattaagtaaatgtatgtatgtaccttaatatgtactactttccctcgtgcggcctttcttgtttatccactcttgcccccactccaacaaaattttctttatttcataatcaaacaatttcccattaattattaagtatattaatttattgggctatccagttgttatttgtgaccatatactaaatatatagtttcctttaatgaacaaaatgaatgactaattgatgagacgttattacatgtgagagggctccatatatctacttcattatcgaatgacaaaattagcatctatatatagcttcaaacaaaattatatatataaatttggtaaatcagatatatgcatattaccactgaacaatattaacaaccatacaagtgtacaatctaagcaacacctatctaaaatacctgcaataagttattactactcttcacaccattttctatctatttgagattttttttttttttttgataaaatgtctaattgtattctttacgtaaatttaattctctttataatagaattgaatagattctcaattttcaaaaaatttcattctaacaacaccaaatataataaacggcagctgcatgggtagttaaattttcgaaatttattcagatttaaatattatgtatctacttgggtaaattattaatagaagttgtggatgtatgtcattttaaccaatcacaaatactttctaaaatttaaattcaattttcatatattttttttttaaatataactaactttaagataatttttaacacaaacaatgtaaaaaacgtaattaattttatcataacacctctatatcgggttattattaagttttattttacaaaaaaatcagtttatgattctatttgtactattttaaaaaatacaaggtttattttattatttaataaaataaaaaatcaaatcgataacttttacaaaatataaaatctcaaataatactactttattagacattcttcttaccatataataacttaatcttaaattaattttgtatgcttttcaagtaaataaaaaacttgttattaaggaattttcctttcttccttttacactgtcacaaatatgtaatacattttttttttcacaataatgtaatcaaaaaattttcaaatttaatgcaaaagataacatgactaaatttatattacaataaatttcactatttatttacttttttttagcacttatatatgatataataagtaatgttttatattttatgtatatttaatagagtttattggatttgtagttttgcttctttagttattattttcatttattaggattgaccatttattttctctacttgtaatttattttttgaactta

SEQ ID NO: 120069 - DNA, 575 bp, Cannabis sativa
cattgttactgctgtaacaacttgttttgagggtgaggattcaccacaaatatattatatagctataatatatataattatcatattcattttactaattcttagcctacttcacacaataaatttttggagaagatgatcttcattcataaagatatggagaaagtagagacatgagtctaattttactgcatttgttgttaaatcatcagtagaagagagattggaaatgaatagccaataagttgtatatatgatcaagaaaagaattcaatcaaaaaaaaattatgtccaaataaagttcttagtggttacacatgaaaaacaattttactaaaatcaagctcgttatatcagtttgatctgaattattattattgaacaaaatagagatgataattgaagagaaacattacagaaaaaaaccacacatgcataataaaatacataggacatcatcaaaagattgatgtcatttattttttggcaacattgataatattaactaaaatcttagacaaagcttcataattttttttaacatagtgattagaatcactcataactttgtaatg

SEQ ID NO: 120070 - DNA, 2640 bp, Cannabis sativa
ttattgtgtatttatttattatttaaaaataaataaatataaaatttattagcgacaggcatttattaataccggcggatagcccgccgctaataggagagggatattaagtgtgggaaaaatcctgacaatcccattcaaaagtcattagcggcgaaccaataccagcgggagtcccattttttcctttctccaatatttttcatctcttcctcttcctcttccgtcgccttcctctctctttggcgtgcaaacccagcagcgaacccagtcgccttcctctctctttggcgtgcaaacctagcagcgaacacaccaccaatcaccaccgtcgcctttctctcttattctcaagtatatttttttcctacttctcattagttcctttgatgtattttctatgagacagatatttgtatttgcagtgtttctaatgttgctattgcataattagttttaaatttataaataaaatcaatttaactggtaaaagaatatctgtggagtatgaacttgggcatgccccttatattttttcgtatttttgcaaccttgttcttcatgagaatatctgattttttagggtttttaattttagtatgtaattaaaatttgtgttatatattagttttaggattttttatctattgtgatataatctgtatatttttttatatacactttaatactttttttttttttatagtttatataataaattttatctatatagtttatatatataatataatatataattttttgttaatatacgaaataaatatgtatattatatatattatattttttttctgtatataagtataaatattatatatattatatttttttatatataaatatatattgtatatattaattttttttatatataagtatatatattatatatattatatttttttatataaatatatatatattgtatatattatatttttcttatatataaaataaatgtatataattttctgtttttgtatatattacatatatagtatatgtatatttattttatataagtaaaataaaaaaaaattgtctttatatattatatttattatgtaatatatattttattttgtataagtaaaataaataaaatttttgttatataaaatattttatatataatatttcatatattgtatattatatatataaatatttatttaaatatggttatatttaaatttattttgttgtatattattgggaattttatttaatttttttaatttggtgttttatatatgtgtatttgtgaaatgtataattttatatataagtgtgtttgttgtttacttttgattgtaagtgaaaatatgatattatgctcataaaattttttaaaaatttaaattttagaaatttagaagaatgaaaaaagtgacaaaaaaatagaatttaatataaatttttagtatgaaatttaatttagatttatataaatattttaaaatttttaatattaataataaaaaaaaattaattaatatatttttattttatcataaaaaataagtataataattaattctttttaattaatttataaataaatttttatatattttaataaaaaaatgaataagattttttaatttaattttatgaagaaaaataatttaattagttaaattagtaagatttgttatactaatttacttataaaaaaataatttaacattttaaagttaattataaaaatattgaatgtatttaatattaaatatttttattaatatgcttttaaatataccatatataatttttttaaaatttacaaaaataattttctaagtatacttaaatataccatatggttaaaaaaaaatatagattcaactaaaatacttttttagtatacttaagaaaataattttagtatacttaaatataacttcaactattaaccttgattaattaaaaaaaatacaataataattatatataaaacattaaataatatggtaatatataaaacatgaaataataataatgcaaatcaaatataaaatgataatttaatttataaataaaaaacatagtaaattaaaaaaattaataaattaatcgcataaaatttttataaaatagcataaaattttcataaaatagcataaaattattttaattattttattgccattgctagaactcataaagttttaaaacacttttagatgactgtcgataaatgttggatttcttggagaaaatgtggtaaagaatatttgggagtgtttacaaacatttttggcaatggcttcagcatataaaaattctgatggaaaaattaggtgtccgtgtgttagattcttaaatacccgatttgagcctttacatatggtagaagcccatatatttgattggggttttgataatggttatcaaaagtggatttaccacgaggagctagaagtagaagttgcacgaaatgaagttgttgagccagttttagatgatgaagatgacgagatgattcccatcgatgaagattttatccgaccaacaaccgaagaagttcaaaccaaccctgactcttttcagtattacgatgaggtatttgaggagattgaagttgaattgtatcctggatgccattggatttcttca

SEQ ID NO: 120071 - DNA, 1054 bp, Cannabis sativa
  modified_base (983)..(1001): a, c, t, g, unknown or other
aggatagaccaaatttgatccgtaacaaattatttatgtactgaaccattagttaattataaatgtattttatataattaaagagcaaggtacgtactacaatttataccaattcattatgtcattttattaatggtaatttgttatgttagtcctacttatagagtcatttatacagtgtcctaatccttcctttcataactttgtttaatatatacatatatataataacttttctccaatatgaaagtaactcatattttcaattcccaagaggtaaatcatgaatgtaaaacacattcccaatatgataaaacaatacctactgttatttttcaccggtattattatttttaatttaaaaaaatattttcaatttttaatatttatataataaaaataattttatgtaataattatttttttaaaaaatattattaactaatatatgtatttgaatttaaaaaatcaaacattaataataattatttataatatttatttatccacaatacacactaaaattgtcttaaaaaaactttaaaacatataatttttcttaattaaaaaacctaattatcattgttatgatcactaaattccattaaatcatctaggcatgtcttgaaccatcacgattatcatgagattgaggtgccgacgggatagggtaataagattgtgcaaattattccgtaggtaagatctcaaccaattgtcaagtttgtggacgaaccaaagtagtctattcttgttgctaactctgtgaactgaaaatctgaccatacacaagctgttttggagattctcctatttgaccatacatcggttgttgctgcaacaaagaaccaaattgaccatacacagtttgttgttgtgatgactcaaattaaccatacatagggtatttttgttgctgcgatgagcctccaaaatggcgcacaataggttgttgtgtctgagtgttgggttttgtgccctannnnnnnnnnnnnnnnnnntaatcagatttacttaataataaagatcagaaataacatttttatgttgcatg

SEQ ID NO: 120072 - DNA, 3446 bp, Cannabis sativa
aggttgaatactcgcaattgttcctcatataatttcttcttattattattattattattcatttttggtgttgcgaaattcgctcgagaacatagccattcacttaggttaggttagatgagatgatcttaaataaaggcttgagttgaatctttctcttagggccaaaattacaggccttggagttagatttttgccactttatttcaactaatgaaactaaagtgtcttttctactaaatttaccacttatcttgtatagttatttaaataccaattttattttaatgattatagataagtatcaaataaatatattaattagccccacgaagcgtactaattaacaaataaatccctatttctcttttcttctcaaaattacccaaactggtaaaaattctcaactaagacaatctattttttgaattaattgacttataaaatagattatttgagtctacaagatgatattcttccagacaatgtggggaccatgggcctacgtaaccaagatcttaataagtagatcatgaaatttatcgagtaaatttcctaacttattaattcctcctgactccactatagattcaaaattgcactattgattacatagaatgctctatataccaaatatagatacgctacaaattattgattattttaaacacaacaatcattgatcctctacagtcgatctacattgaataaggacaaaaattattgtgatataccttttaatgttttttatcctagaatacttagctacttgtaaatgatatttcaggaaactaatattattaccaaagtgaacgatctatcatttatcgcattaagccaagctctaaggaaactatcatttcacttctaatagacatagaagttatatatgtccaaatctatgattaacattcccactcaattgcactaccgagttcccgagatgtaagtattgagttggttccacgataagcttgtaacgaacaagttaaagaattcgtgtaatgcatttaagttagagcttgaccatctcaggattgagatcaaatgatctatgatcaactaagtgatattgacttagagaaaatataacggtaagtttatgatatcatttccactgtcaatattggtccagtctgatgtatagcccatacatatatcctggtttactttactaattccttggaaaagacattctactcagctaaatgtaagtaaaccttatcggttatcatcatgtcagtgtaaatccagtgcactaataaatcgtgggactaaataattgaagcatatattcacaattactttacactatgatggcatcaatttaattgtgaataactatatattcggaatttaatagaacttatatattaaacatatattcatgtataaaatatgtgaacaaagcatataacaaggtcaaggtatgatttttgatctttattgaaagcaaagaatcttacaatgaattgggttttattagggcataaaatcccaacaaaccaaaggtccttgcatccaaaatctcccatacaattgttctgtttgcttactagcaataatctattctattggcaactcagaagctaaagtgtctgatacttgaggtgaagttacaacaggagattgatgtttcctcaaccacttaatctcctcctctaaccattgaattctaacttccaattcaacaaactttttctctaaagctggtagagcctacagtggattttcatgaccaagttcatgcgtccttcaacgacttctgtcccagacacggggatgaggggaatcccaatctctcaaacaaccaccagtcttgacctcatcatcccaaatccttatgtttcgttaggtttccattctataggacaaacctagaaattcatgagtcagcttggccatatagcgatcaaaattgtaatctacttaccacttacatgggaacttagtatactcctatttagctatcaatctacaaacatgcttcgtatcatatttttataatcatgcataaaaaactagaactactaaaatgcgtaaaagcttactgaaccatcagctgagcttatctcttatgatgattgtcagatcctgctagaccccactgtgatgtctaatgccctaaacattgacctagactttcattccgtccagtagaaaagaagactactggacaaagaacaggcacaagcactgaaagaagaggtagaaagactaagcataaacaagttcatcattgaagctttctaccatgcttgggtggctaaccccgtgctagtgcccaagacgaacagaaaatggcgagtacgtattgattttatcgacctcaacaaggcatgtcccaaagactattttctacttccaagaattaatcagcttgtggatgcaatagaaggacatgaaatcttgagctttatggatgcctactcggggtataaccaaatcagaatgcatccactagaccaagaacatacaagtttccgaacaaatatgggtttgtactgttacaaagtaatgtcgtttggtttgaagaatgctagagctacttatcaaaggctactgaaaaaaatgtttaaaaatcatattagatggaatatggaagtatacgtggatgacatgctcgtcaaatctaagaagggtggggggcatatagaggatttgtttgaatgaatgctgcaaaatcctcaaaaaataccaacatgaaactcaatcccttaaagtgttctttcagggtcatctcgggtaagtttcttgggtttattgtcaatgctcagggaataaaagctaatcagaaaaaaatacaagccctctgggatatgaagtcgccaacaaaaacaaagaaagtttagagcttaactggtcagatagctagactcagcaaatttgtttcaaaatcaatgaacaagtgtgttcctttcttcaacatcctctgaggtaataaaaagtttgaatggatcgaggaatgcgagaatgctttccaagaattaaaaagaaaactcgcaaagcctctcgtactctcaaaacccctaaacagagaagaaaataatgtccaacatccagtctactatatcaccaaatgactcgttgaagccgaaggtcagtatcctctgatagaaaaactcacttattgcctaatcttagccacaaggaagttaatgccctcttttcaagcttaccctgttcgggtatacactgaccaacttttgcgccaagtattacaaaagcttgatgcctctgggcgattacttaagtgggcaatagagttgggaaagtatgagataatcttccaaccccgtacagcagttaaaggacaggccttggcggactttgaagttgaatgtacaggcaaagaagtgttggaatatattttaccaggatctagacttactaacaagtatgtttttaacatcctaatatgaatttctaaaacgatgaaaataaac

SEQ ID NO: 120073 - DNA, 4439 bp, Cannabis sativa
ttatcattaaactagtgacaagttgtattcaaataatactgataacaaataattttttgttataactagtgatatttaatcaccaaaaatttatgctgactaaaaaataatcattaaaatagcatttttgagagtgcactaatatgatgcctatatatatgtaactcccaaaattactccaaagtatccaaagtactcatcacatatttcaacatggagcttcaactactaccctcttattatttcccaatagccctattgatcatctcttttgcttttttgtttaagttagtgaaaagagctcctcatcatgatcataccaaaaactcagcttcaaaactaccaccaggaccatggagattacctttagtgggaaacatccaccaactaataatcttattattaggttcgaactcattacctcatcatacactcagagacttagccaaaaaacatggacaactcatgtacctcgaaatcggacaagttccaacaatagtagtttcatcagcagagtatgctgaagaggtcatgagaacccatgatgttgttttcgcatcaaggcctcaaatgcttgttgggaaaatcatgtcatatgattttagtggcattgcattttctccatatggtgagtattggaaacaaattagaaagatttgcatgcaagtgcttttgaatcccaaaattgttcaaacatttcaacccattagagaagaagagttgtttaatcttgtagaagaaatagcttcatcatcatcatcatcatcatcatcaaatgatattggatttgatggtcctatcattaatcttaccgaaaagtttaaagctttgacttataacatcatatctagggctgcgtttggcaagaaaagcggtgatcatgaagagttcgtattgatttcgaaggaagctctcaaagactttggagcctttgaagttggtgagttttttccttttcttagttttcttgataaatggattaagggagctaaatatgaaaggctccaattaaaggcttctaagatattggaaaatattatggaggaacatattacagagaataatgaaaagtccttgtcatcgtcgtcatcttcatcgttgtcaatagttaaaagtggaaaagaagaggacttggttgatgttcttttgaagtttcataacaacggagatcttggcgaatttaacttaacgaaaaataatattaaagcagtaatcatggtaagtatgtagtaataatatgtatatttaaaatatgcactaaaatattacaaatagtgataacagcatacccaagatatttgttctacaagagcttaattattataaaaaatatttaggctatatactttttttttttcaaaaaaattataacaaatcttagtaatttttttgctaaataaatttataatcaatcttactaaatttatttaattttgtagcgctgaattgttatatataaaaaaattacaaatctttttactatttcggtttataattaaagtatcatattagaaaaatatttaattatttaaactatatattttttcaatctttgtcagttcttgatgtgtggcattaatttttccaacaaatattctcaattaggtgtaatattggtgcacatatcattactcaaataataaatattgtttcctataaggcatgctatatatgaaagttaattaaataattaagtgacacaatattttcttatacatataatttcaggacatatttataggtgggagtgaaacatcatctgttactctagattgggctatggccgaaatgatgagaaatccaagaataatgaaaaaggctcaagacgaggtgagaaaagttgttaaaaaaaatgggtcgataatgaatgaaggattactcaatgagatgaaatacttaaaatcagttgttaaagaaactttaagattacatcctcctggtgctttagttcctagagaatgtagagaaaattgtgagattaatggttatcaaatacctaagaaaacaagattgattgtaaatctttgggcaattggaagagatccaaagtattggattgagcctgagaattttatgcccgaaaggtttttcgatagctctattgagtttaagggcggaaattttgagtacatcccatttggcgccggaaggagaatatgtccaggaatatcatttggtctcatcaatgttgagcttcctttagcatatttgctatatcattttaattggaatcttcctaataaaatgaatcatgaaaatttggatatgacagagtttgttggtgcatccgttagtagaagagatgatttgtatttgattcctagcattaattctttttaattaactactcacatgcatcaatatataaatatatatgtaatagatagtttgttatatatctatttgtaatgtacaatccttcattttctataaaaatattagattatgtttatttagttatattttatcttattttgtgaagtttagaatttacttggtatgttaaatttgtttatagtatagagtgacgtgggatactcactttaagttagtcattttaatttttatcttctttttaatatttcatcttttatacttatttttattttatagttgatgtctttctaatactctttcttcaattcgaaacaatagtatttagttttcagtctttaatgctaatgtgagaagatattgagaaatctccttattataaaaatgagtataatttaaatgaatatagtttgccgataatttttgttaactaacacaaaaataaggtaatcttcaagttatccctcttatcgattccagtcgaataaatattagtgggaattaatctcaatattgggaagcttcttcctgcaagaacacaaggattattaatttttattaaacaataattaattacatgaccaatagaagaaaattaatgtcaattgtaaatatatagatgattgattattatgtatatatatatgtaccgtggagaatggactcgagtaagggctttctccattgtaatgaaataatcttcagacatgtactcgtaatcatcatcatcatcatcatcatcatcatcaactgttgtggtttccattaatgttgtctgatcaactacacttgctttatttatgtaatacttcttacgccttttctccattagtgtctcaacacttccttttttctctccttttatgtaatatttcaaacaccttttcctgtatcatccaacaataacaatatattaacactttaaccacggccggccctgaagtttagtggactatagaaaaaaatatacttttcaatttttatttaaaaaaattaagtattttttaaaatcaataaaaaaatatgtaattttaaaagagaatttttttttgaactcctgtgctaggtgtactgtaggcacaggcttaacccgcctggcctgacttaaacatgcatgcatgttttgtacgtaataaaattatgagcattggcgtgcgcccaatagttaaacgataaatagaggcataagtattcaaaattttgagtttgtaagcagtaaaattgtaattttcttttatttttcgtaagtacaaggtctattttgaatatattaacatttgaaagtaattgatactatatgttttcgtccatagctataataattaagaatttgagtcttaattatatgtttttgttataaattatatgttttagttgttacaaataattaagagtatttatagaattcattgagctcaagaaccaactcagtaattatactaactggttattactaaaccaactcactcgcgagtaactaactgagaaagacatgattcaatttggtatatcgatgaaatttcgtacattttagtttaataactaatatagaaaattgctaactctagtacttgtacgtaaaacatatatacatgcatgtatatgtgtatacatatagaatatatattagttatataattacttacaatggggtttcacagaagtggagataagattggtcgggtgagagtccaactccattggcataaagattagtaagaagaactagggtttggttagtgagtggatcatagctgagcaatcttccattagataattgagaagaagaagaagaagaagaagaagagtctgtgaagtaaatgatgccatcctcagccacatctaagcctgctgttaacttaaactttacaccctcagcttcatctgttaatatcttcatctcacctttgtcttttgttatgcttagtagcccctaataataaccatgtgttatattataatgtacttgtaaaaaacagataaaaaaaaaccctaacttcacattgttggataaattcccatactattgtcccataaataaagttacaaggaaaataaaatagacctctttataaagcctcaacagaccattataactcatagag

SEQ ID NO: 120074 - DNA, 1402 bp, Cannabis sativa
catatataactttaaatttaaataaatgccatataagggtggtaaacttaaaaaagccatttttttcaaacttttttgtagaatcccatatttggtgtaattttcactttaaaaaaaatcacacccttgctttccatacactttcttcaacttatttagttaccttttttttttccttaacaccttaaattttactacacgttttttatgagtgaacattgttaatatttttaagctatccaaacacacatattatatgttaatcatcattactcataatcactaaataagatttatattttatttagagcatcccaaaaataaaaaatacacataccttccatattggcatttttcattgtagctatcaccaagatcctccaatgtatgcacaagatagtagaagaggagcttatgatagcaaaccctttttcttatcaccacacccacatacatcttactaaacacacattaaccttttttatatatccaacacctaacccctaagggatttattaggcttattgggctaatgtacataattagtggtggactataatttaatgggctaattatagtttaagggtgctctcatgtgcctctaatacatttattaattattaaccatcccattatggttgttgacaaatattgggcacatagttaatgattgtgtttatggtattaaacttatgattatattagtccacaatattaattccaacattcttccacttggacaatataatcaaccaccataaacattgtcaacaacacataaggtaactaattaaaacgtacataattaaaatcatatcaacatgatacatatattatgtatgaattgaccttgaagacatttaatatattaacaataaaatcaaatattctgaggtacaataaaattgagactatgcgcattcatctccttttgcatctgttacttcagtaaacaacacatgcatacacatatcaataataactagaaatgactacaacatcattatgcatgttcaaaacacaagtcataagcattccatacaagatactagcatgcatgttcaatacataatagtaaaactccactgagctcaacaagctagggtcctaacaatctcattcgagtaacatgctccaaaaatacacatatgggtaagccttctgttagtgggtctgctaacatgccagtgctaggcgtgtattcaatggaaataagagactttgtaactttctctttaacaaaatagtactttatgtcaatgtatttagaatgggaagtacttctagcatttttagagaaagctactgctgcggaattatcacaatacaattttagcggcctcgagatagagcccattgttggaacttattttaccaggatctaagatctactcacaagtat

SEQ ID NO: 120075 - DNA, 1608 bp, Cannabis sativa
tcattgtcgttggctaaaagcgaagtcaacagacttccaaaactctagaaaaatgttattttggtacgccaatccacctaccaacattctctagcataaaaaatatcaattccatcacttttttactcataaaaatcaattttcttttaaacccgagttattctaaaataacaaaaaaacgctaaaattattaagtaacaacatcttctaactatgaagaatcaatatttatagaacctaaaaggctcttatcagctactcaattgttaacggctcaacataaaaattgattaattagaaataagagtaaagtgaccagagaaaatcattaatttaaaaaaatatcaaaaaatcaaactaatatttgtgtatcagaaattttagaatttataataaataattaaacataattattgccaccctttagaaattgagtctaaaatctaaatttaaattcaaattctcttaataccttaacttaaaataatctatttttgagatgatatataattactcaaacacctacttgataagcatgggatatttaaataaaaatagataatttaaatgagttaatttttgtttgatgttgttggattacgctactccattggtaatggtgttttatatatttaaaattaatacataaaaatatataatcaattaggttgtattagactttatcaacctccagttctggtacagaagctcaactgattgtgagtaagttatgtctgactcgactttaatttttttttttagttccattaaaaactcaatctcttcccacgtgcttccaaacatcattgtacatcaaatagctaaacaatgttgaccttatcaattttataaaataaataccacaaaaaaaaatatctacaaattatataaatcaaatacacatcatcaaagatatatcgagtaccatcgaacaagtatcacgaagcaattgaacaaattacataacttcttatgtattgaacatgcagcgtgtaacaatcaaataggtactataactaatatatatcgaggagaaattgaacactaatcgaaatatcatccctaacctctaaaaatgctaatcattaagtaagcattgagtaagcgtcaaatacgttgaaatttatgcaaaaaatgagaaaatcccaaaaaatatagatctctaaccaacaaattgacaaaacacacaattaaatgtatatttaagctacaaaataataataacaaatttaatattaataataaatttaacataaaatcacatattcatttcttttccatcaaaaaaacaatctaaaatcttaaaaactttgacattctcctcctatcttgtgataaggctttttcttgatagaaatatgtttatcttttatagataatagctttaaaaattagtgtcatggctaaaattttttgggtgtagagaagagagaaaatgtttggagtgaagagagagaaaaaagagaagataaaaaaaaatgattgggtaagagagggtattttgagtttacacaaaaatatgtatatttaagatggcacaaaaaggtttaagtatttttttttttattttaatgtaaaattatatattaatggcatgtttactaataa

SEQ ID NO: 120076 - DNA, 1001 bp, Cannabis sativa
tttaattttaaaatttttatttctaaactaattaaatccctccaatgtcattctcattcacaataaatatatattacatagaatatatacaatacatgcaattacaaattacatttacttaaaaaaatatacacacaaacacaatatatacatacattatatacacacatattcaataaaatataaaaatacatatatatactacacattgagatttaaatttttaccttataaccgcaatccgacgaactattttgcaaaaaatccgggcactatgcgcatacaacacaactgatgtgatcagtatatgatcactcacctcgcaaacaacacaaaccaaagagattaatcaagaataatgtaaacaaatgaaagttgtatagtggatcaatgattaaatggctaataaccacttataaaccagtggcaagaaccagaaaagacctaaagttaatgaacaattaagaacaatagtaataggagaaaagatcaaacacaatcaagtttacgaggttcgaacaagtgatgatgaatcacttgcctactcctcggccagaacagccccaatggcttcagtctttattgatgctagaagagaggattgcaaagttgtttacaaagtgttcttgacacattcattcatgaagcaaagcttcaattacaaaacaactcatctcaccaagactctctctctctgttacaatctgaactagcactcaaaaattccctcttaattgctaccagaacgctatagcaattggctatttatagccttgttcaagacccgatcctaactgtcataactgacagttaggtaaaaccgttaggggcagttggaatgtattagccaatgttgtctattcattagtggccaatcacaacaattagccaccttggtcattaatagaggaaatgaatgatgataagggttgaactggtcttgaatcctcttttagcaaatgaggatgtttagcaagtctaggcaaagcctaaacttggct

SEQ ID NO: 120077 - DNA, 1653 bp, Cannabis sativa
ttgaagaaaaacgagcctcaacaaacctaaagttagtagcacaccaacaaaaggtggctcgatacttcaacaagcaagtgaaagcaaggaaattctttgtgggagacacggctggtgtgctcggacctaattgggaaagaccatattatgtggtcgaagttctagggtcgggggcatataagcttcggcagtatgacgaaaatatggagctcgttctagttccaaggtattggaatggggaacacttgagaaagtactaccagtaaatgtacaaggtcagatgaccacttgaagtagacaaagtaagaacatttacttctaagtagatggccttctgggcggatcccgcccgaaggttttgattaaaatattaagtacccaggtcggatgaccacctttaaatgtacaatttctgttttttctttaagtgaaattgttttatgcttaaatttagctaaagatcatattagatcatgtaatagatttcataaatgtaagttactacggtaaaaaaactattccgaccaataaatgaatatgtttatttccattctaattgtgtcaattgtattagcaagttatgaacttaccattaaagcgtacaaaaggtccacttgacccaaagcaccaaatagatgaaaatcatacttctgaaatgcaagtgaccaagagtcataagtctgctcggtcaattgggggcaactatacccgtacaaagcactggtaaaagtaaataagaagctaaaaaaaatcatatcagttaacacgaataattatcataataagggaaaatattcattgaaaaaagataacaaagcacggtctaaacctaagattaaaggctgcccggtcagctagttgtctcaaaataaaatgaaatattccaagtttaaaaactgcttggccggtaattttggtctctattaaaggctcatgggccgaacagatataaaagagaaaaaaattattatttcatatagcaggggtcccaggctccttgtatggatcagcctaatcagaaggggctagaggctcgacactctggatggtaggagtctcaatgctctggtcggttggaacagtggaattagcttcctttaggatttctttggtcgcctgacccacacagtaattaagatatgtctctttggaatctctgaggtaatcaaaattgcctgatgggtttgcctttcaaaattcataaaagatctccagggcagcagtttccaagttttccacccccttcaagagctcttcttccctcagctacctagacttgacatcctcttccaagtccttcttatccttgattaagtacgcaagaagagtacgaaggccctccctctcgtccttgagttcattgacatccttggttaaagcgtcattgtctgcctcgagctgggcggttgatgacatctcttggatctctttagttagctcttggaccaagttgttggcagcaaggagcttcttgttcacctctcccagctcatttctcacgtccaggaccttcttgttggccgcatccacctccctctgtagattgttagttgtggcaaggttcttcactattggaattgttttaccaggatcttaaatttactaacaagtatgttattaacatccttaatatgaacttctaaaacaatatga

SEQ ID NO: 120078 - DNA, 2250 bp, Cannabis sativa
  modified_base (2030)..(2041): a, c, t, g, unknown or other
ggataatgtagtgttagaaacggatagtttgatgtgtgttcaagcagtccaaagtaaagtttttatgtcctcacagtttggctcattgcttggagagactcttgtttctctacaggttgtgtgcttcagttggaggattgttcttctgaagtgcgttctattattttgaatgagtttaattaataaatctcctgattaattcaaaaaaatatatattttaaataaaatacattaaatataaaaaattataaatgtattttaaaaatatataatatgaaatgtgaattttgagagttttgaaatcaaaatttaaattttaaagtatgtattagggactataatgcaatttactcttttataattgaaccgcatcataatcataatataataagaaaagctcattacaatctctttctcaattttgtgttcgaaaacacatatagaattataattttttttgctaatttttacatcataaattacaacatcaacttgattattattattaatattattatttattagttttttgtttctattgatacaaatgttaatgatttattattacaagtgtaagtattgggagaacaaaacaaagaacaaccttgtccattcacaaacaatggataaaccgagtacaacggtggaaacacatacacacacatatacataataataataattccaaatggctaactttgatagggacccaacacttttattttctttttcatatttttaaatgaaagaaaaaagcaaagctataaagttgtggaaaaaaaaaataaaaaaaaacatgtgcttcttcccatgaagaattctaacttatctttagtatataaatatccttatctttggtagctaatagaagaaattaatgtttattgagatatatagagagagagatctagagaggaaattttgtttttaaaatattttgtattattatttatttattgagaattgagatggagaagaacatgttgggacttttgaggattagagttaaaaaagggcttaatcttgctgttcgtgatactctaagtagtgatccttatgtggttgttaccatgggtaatcaggtaatttcacttctcatcatcatcttattaaactttctcattttgggtttgattaatttgattcttacaataattacaattttgtttattagctttaattttccagaaaaggtgggtattgggttgtggttttctcttgattttcactttgctttaattttaactttgaaaggtacaaaaaagagagtataattaaattaaattattttgtgaaaatgataaaattttgatcttaacaatgaaaaattgttatgcagaaattgaagacacgtgtggtaaaaaacaattgcaatccagaatggaatgatgaattaactctctcagtaacatgtcttgacaccccaataacacttgtaagtaattttaatgaattaattcatcaaactattaatatgtgattagtgagtaattaatgaatttgagtgttaataatttgtacagacagtgtatgataaggacacatttacaggagatgatagaatgggagatgcagatatagatctaaaaccatacatagaatgtttgaaaatgggattgaaaaatttaccagaagggtgtgtagtgaagagggttcaacccacaaaacaaaactgtttatctgatgagagcccttgtgtttgggaagctggaaaaattgtacaagacatgtgtttaaggctaagaaatgttgagtgtggtgaaatctttgttcagattcagtggattgatattcctggttctgatcctctctttccacaagacacatgattatgatcaagtaattggtgttttaaattagtaattaatatttaatagaacttcaatgtctgtctttatgtacataattactcttattaaattgttattaagtttgtttatgtatgtaatgttaaaatagctatgtattgacttttgtggtatgtcatatcatgtggttgtgtgtcattcataattaataataataataannnnnnnnnnnntaataataataataattatagtttgtttctcttttagcagtgttggagacacagggtcgtctcttctttctatttttaagaattttttaaacatcaatttagtgaatcggtaaatttagtggaagtcacttttgattgatattgagtagtgaaaattacatgaaatatggaattttgtaaaaaagttacaaaaatatggtatttatagg

SEQ ID NO: 120079 - DNA, 985 bp, Cannabis sativa
caagctcgttgaccctccctggacttagatgtgacttggtcggggtttgtagtttagctactgggattgtatttttactaacgtgattagtcttgtttttgtgacatgttattaaaatctttttgcttaggttacaatgattagtcttgtctctgtgacatgtttttattttgttgttgctttttcttctttgttcttcgatggatcgccatcaaatcattgttagtggttgaaaataacaagttttctggagctgaaggagttattagtgatgcaattgcacaataattaagcgctcaagctaaggggttgaatgaatcacttgcaacaatttttactgttgtatcttctgaacattggatgaaattgaataagtattcttaagattaactgtatgttacaatctttttcatcgaattttattttagtttattttattaaacgattcaggaatcaagcgaccgattagttagcttatagttttgaatctaatcctaatcatatttctaatgagggagatgtatcgattgaattatatatgctgttattttaactaattgttaattacataatttattaaacaaaatacatataaatatgtatcatactcgatccaaaattttaataaaaatttgaaaagaagaggagtcttatatttatagccatctccatcattgtagaacaataatgtacggcttaacaagtgatcaacatacatatatatagctatccgtagtagcttaataagtccaagctgatcattcttgaattatttaaaaataaaaagaacttcaataaatggaataaaaataatgagtggctcttgttaattataagtttctataatattaattatctatagaaatatagagatgttgcaaagaaatttcggtagtcaatcgtattggagacaaagtaaggtatgagctataaaagatgttgttcgatttcagtattttaaattatttagatttttttttaaaaa

SEQ ID NO: 120080 - DNA, 1354 bp, Cannabis sativa
aaaaaaaaaaaaaaaaaggaccatggaagagtggagcatagaagaagagaatcaaaagtaagggtgtttagaaagtcatttgattcaattacagccgaccaattcaatcccaactgatccaatagaataaatatccaatcataattagatcggatcgattgtaaactttgaaaattcaattggatcgtatcagttgttggatgggacatccgatccagtgaataacctaaccaaactaatccaattatcatctaatgatcatccaattatatttatcttattaaaatatatttataattttatatattaaatactttttatttgaaaaatatatcgatttaatatatattaaacacattagactaaaacttcagttataaaatattaattctcattttcctaaacgttaataaaattgtcaatgggtattaaataagtttcatttttcggtaatttaattatagaatcatgagaattagattagaccaaattaatgtttattatgtatctagggttgttagtttttaaattatattttttacatatatttttctttttaatgaaatcaacttaaatggtagctaaaataaattggatggatccaatccaatccaatagaaaaccagttaatgaatctaatggttggaatcaatctagtcaaatacatctattgaatcgaattggatgactcaattcaattagattggatcggatgataaaatccaatatttaataaataattgaattggattgaatcgaatgggtcaaaatctattgaatgtaatccaataaacacccttaatcaaaaacctagatctattatttgagagtgaaggagagagagcaccccttcagggttttcctttttgatgatgtgattttttttttttttttgagcaatttctcataataattatacataaattcgttacattgtcaaaacaaaaaatggttaaaaaattactccactaaatttttgaaaagaaaacaaaataataaactaattaattgtaatactaccgttattatggaaacgagactattttgaaggaaaaaaaaacttcggagtgattctagaatgtatcctcttaaaaagaatgtattgatgcactctctacttgttttggcatgcagaagaattttttagtctactttttttcgtattcatgaccgttatagttatttaaggtatcttacaaaattttaaaaaattcagaataatttataatatagaaaacaatgtttaaacagcctattttacacacatataaaataatataataacgcgtgcaatacactatttgaacacagtttttggtattttaaacttttccaaatttcttaaaattttgca

SEQ ID NO: 120081 - DNA, 1388 bp, Cannabis sativa
ttgaagctcaataatcaatggctggaggtatttcgatctttcattgcatatatgttttcgatatatttatagtattttctgcattacatatcgtttacatatgttgtatttcatattatacattatagtctaacagttggtatctgagcggtttaatttctgccttgattttgtttgagtttcgtttatatatatacacgtacatatacaattttttagtttatatatattttatatatatacattcatattcatattcatataatcctgattatatacatacatttttatttacgtatatacatatatatattctgttcatattcacaggtttatatatattgtatacattcatacggtataatatatatttttcttggtatatatgtgtatatatatttatatatattatacgttaaatatatatttgtattgcataataatgattataatattcttcttcatatatttataatattttatgcaatatatattataaacgtgcatatatataaacatggagtttttcagtccgattgtttgttttttccattttttatttttttagtgtttacttcgaattctatatgcattactatattcgtatagtattatagatcgatctaagcatatgaaaatgatttgaaaaacttaaagatggaaaaaaatttcagtaaaaactttttcaaacccgactaaactttgtgatattaaagtcatattttttcgtgttttcgtgcataaaatctatgtggatctttttattattcaatttagaacattttagatttgaaaacacgtaattttatcgtcgaaattatcttttccgatcgggtttgggtcgggtccgtaggacccacgtggcttaaaacgggtcaaatttgactcgactgaaggttgaagatacagctaagcgacgtgtcatttttctcttgttgaaaatgacgtgtcatttttaggtttaaagcagccatcgtttgttgcaaacgacatgtcgttttccacactgtgaaaacgacatgtcatttttcgtcttctcagtagcccttcaggttgttaaacgacgttttgtttttcatcttgtggaaaacgtgtcattttttacatgcgtgatcagcctttctgtttgaaaaataacgtgtcgttttgcttttgcaaaaacgacatgtcgtttagggagtgttattttcaaaaaaaaaaaggagggaaatttttttgaattttttatattttttatttggaatattaattattttcctattttgtgttaatttattcaataaattgtatatggtcaattttccattttttatttaatacatatatttactataaattgaaagtagaaatttgtttaatttggtaatttattgcatgatttatttagg

SEQ ID NO: 120082 - DNA, 1800 bp, Cannabis sativa
gtgcattcatttagtcgctcgcgaagatcgggttgtctatgattcaagtgctcgtaaagatcttgttgtcttcgctcgtaattactcatagacctcatctctaagtaactctcagattagtagttttgcatattcctcatgctttcttggtcaacataacgtcaaggtctacttccctctcatgtttgcctacccgatcgactgtttccttgagaccttgagtgtttcgaactagaacttccttcgtcttgtatcagccttctccttcggaagaggttagatacatgccctttatttagatacatgtatacatttcccctctttgatcgagaaaggcgttgagggtgtcttggaggtagcccacttgttctaggttagtttctagggtttctctcgttgccacgagggtttccttgatccctaggttgaggctgtctcgcatcctcattcatgcgagaagcttctggtacatcagtctgttcattcccttggttagtaaatccttaggattcttgaggaacgtctcaccgttgctcttaattatttgtttgcttatccactagaacatccctagtgccccaaagttgttcttcctgggtgttttggggatatccctagtttgcttcatgtctcctggttttagaacctcgtggtctgctttgtggtcttctttgaaagtaggggtgtagaggtagaatcgctccctgcttcatataatgctctgactaggccatccacctaaatgctatacaatgtgctagctagtctttagtgggcctatcacatcaaacttctcctatcgcctcctcagtcttttgtacaaagcctgctcgatagagtttatacttgacaaagttagcgtcagtgcctaggagagagatgtttcgttcgtctgaagggagttgaagaattgcctgagccctcttcctaagttctagtgtgaacagaggatgatagtaggacggaatgtgttggaaactggtatgattggtgtccatccccttgacaaaatagtagtcctcaacgaagccacatatttttatcaccttagtatcggtgatgcccatcagccatgactccttgatctgagagaagtagaatcaccctgacctatttttcttggggcttgaattcaggtcaacaaccagttggtatcatgaggaaaaatggttcaccccatccttgcgaggcctctaacacgaacaaggcataatgatacttgaggcccttgggagtgaattgtgttgggctgatgtggtaatcgttggccatcttcttgaagtatggaagcaaaggaagcattacaccttgcttgtgatgagctcccgacaaagcacaataaccctctctagggtcgatagccagtttaccaagggagggaaggaagcatgtcctcgaaaagattagtcaatcttttaatggtcaggatagatggcagagaaatctattaatctccttttgaaactctccttcacatgggatgagcctcggtgtactcctccttgacgtactcccaaccagcttccaggacatcacttgctttaaaaacaagttctcattccccattagaaccgccaaacaatagcacctaagctaccccctcttcctcatcttattcagcatcagaaggagtagcgggatagatctcaccatggtcctccacttcttggacttcaacatctccagcagtttcttcttcctcgatggcaggacgagcctattctgctctagccagagtagctagacgggcaatattggggttagtagatgaaggtttcctaacagtctatttggttcgtg

SEQ ID NO: 120083 - DNA, 2374 bp, Cannabis sativa
ctgcggcctgtgaagccttgcttcctgaatgagaaaattagcaagaaacactcgagtggagcatagaatcacctaagaaaattgacagcggctgcacacattaaacactccaccgcattttgatgatcatattcatagatcgcacagaatcgtcaacgttttcctttcgatgaggggttaaggcaaattactcaatattaattatccaattactaaaacctatcatggattaaggcttggttagtagcattgtgggacgtttggtatgagatttaaaatctatggaaatgaaaatgtaaaatttaaattaaattttaataaccaaaggtttgtgtttaaaagtgggtcttgctttttaaattaaaaatgaggatttttcataaatatgggaattttaagtgccatttacttttttttttttatggtagaaaaaaataactaaacaagatatggaaaaaaaaaaaattaattgtaaaaatatgggtaaccaaaaagtgtataaataggcttaatttgaaaaaaactcatatttttcaaattaaaatataacagaattcggatcctctctctctctctctctctctctctctcagattttctctttgatattctctccgatcttctctctcggaatcgcacgataagctacgatgattaaacactgcaatcgatctgcaaatcgaactcaaacgcaagcatcatgcatagcaaatcaatctcacaaactagaaatttgatcgattgacgacagagctgcaagaacaatcgttgcctccgattgtcttctccaattccggtaagttcttcaattgcttctgatcatcttcctcatctgtagaacctgaaaatcaatgatcaaaaaactcgaaaaccagaaaatgaaacatcaaaccgaaataaacacagaaacaaaacttcaacaacaaatctcagtataaaaaaccagttttataaactcaataatcaaaattatatataacccatattatataatatatatatcatttcgaagaaaaaaagaacctcgacattttaaataacatatataaaataaatataaccggttaaacaaagataaaaaactaaggacaatcgtatgaataaaataatcaaagacataacagacaaaaattaaatataacagaacaaaaataaccagttaaaaacttaaattagacaataaaacataaaaattaaatgaaaccggttccaaatacaaaattaaaatcagattctaataaaacatttcatttaacaatacaaaaaagtaataaaagttataacagataaaaaaatatataacagaaaaaaaattagttaaaaccttacctaaaacattgataaatataatttaaaagtttggttccaaataaaaaatataataagattataatattactcttccataaaacagtaaaaaaattaataaaagtcacaaatgacaaaacataacaaaaaaaaaaaaaacggttaaaaaaacagtcaaaaacttgaaaaataattaaaaacataaacaaaacatacaatcataaaattagaaaaaaccagttaaaaacaaaattacgattatattttaataataatttttctttaaaaatgcaaaaaagtaatcaaaaaaataaatgacaaacagaaaacaaaaaaccagtaaacaaattaaaaaccagttaaaaacttaaaaccaaaataataacacctataatttttttttaaaaaaaaactggttccaataaaaaattataataagattatgatagtacttttttttctttttctaaaattgcagatatggaacaaatcatgtgtgtcatcaaatatgggggtcaatagagagaaaatataaattatgatgactacacaatgactgaaattctaattccaaccaattcatcactagcaaacttgatggagctaataaaaatagagataaactgtagcagaagcagcatcgacatatcctaccagatatcactgggaacaacaccgatgaagctactaactgacaattccctcaagttctacaatgagctaagaaaatcacaggctggagtaactgattctgcactgtgcatcacaactacagaagaaataactatacaatcagtggaaaatcaatcttctgaacaaccaatacaagagcaaatcaagacaggggaggaactggttctacaaatacacaacgaaccattcgaccagtaatctgatattgaaggacaagattcaaatcatgattatttgtcagataacaattgccccaaacatgtttgcaatgattgaacaagttgcagattttataatagagcaatcaaatgaagcaacaaaaaagagaagggatgaagaaatggagatcatcacagattacatggtgcttgag

SEQ ID NO: 120084 - DNA, 965 bp, Cannabis sativa
cgcaaaacgtcttaaagagagcgacattgtccgcgactcaaccagattattttatcggtaattcgttccaatttcattgtttttaatttcgatataacagatccccatacctctggcatgctaatccaatttttatgtttattgtttgttagttacggggtggtccaatcttagttgctgattatatggaggaagtttcgacaaatcctaaagttagattctatattaactgagatgtgtttggagcaaaaggtgatttcatcacctctcctgaagtgagccagatgtttggagaggtaatttgcttttttgagattcattcttgttagttcatttgagtactgaaggttggttataatgaactactttgtatattgaactgttgttatagatggttggtgtttgggcaatgtgcttgtgggagcaaatagggcaaccaaagaaagttaatctagttgagctaggcctaggaagaggaactcttatggttgatcttcttcatgtatgaatccctgattctcatttcagttttcatgttttgaggtagataatagagaaatgagagtgtatctttaatataatacttgtaatgtagagtgttgtttaaaattttcattaagttattgcatgtacacttggtgacgtgtagtccaacattgcggaaacttcacgaaacttgaaatgtgttgatgaatatattacaaaccaaattgataaaaggacagttagtacattggctcaaacattggtatcaagtcatgctgcattggagcaagttccttcgggaggtaaaaaagttatcttattgatgatgttgtgtattataatgtgtattttgtaattgaataaaataaaggaagaattacataaggcactattttttgtaaaatatttacatttttatgttcaaagaatgtttttgttacatttttacggttttccaaaaaaataacacgaaaacaaca

SEQ ID NO: 120085 - DNA, 6177 bp, Cannabis sativa
  modified_base (6113)..(6121): a, c, t, g, unknown or other
gaatttctttcaaagataggtatttggattgaactgactgcccctagtccaatcagcgcagagcgacccatcaatatgttatgcactgatggtagatccacaactagaaaaacttgcattaaagttgtagataatggtggctcgcctatagttaatgggagttcaataatgccttgactggcgacactatctccagtaaatccacataagttcaccatacaagggtttaactttgcattttgtagtcccatcttctttaacgtatcccggtaaaggatgtttaccgagcttccattatccaccaacactctttttatccttttgtttgtgagttttattgtaatcactagaggatcgacgtgtggatatctcacgtgttttgtatcttcctctgagaatactattggaggttcttctatttttgctttctttagtggttttggtgcaagcaacgattgattatttttgacttcattgacatatcgcttttgggcattactactttctctagcgagatgtggccttcgcaagatgaccaatatatcgtcgccctcaatagagggaggttgcattctttggttatctaggttgttgggctgaataggtttgttttgttcatttccttggcacttcacatattgtccaaagtatccacgagcaataaagctttctatcttatcttttagttgctgacactctttagtcatatgcccaatgtctttatgaaattgaaaaagtctattcgggtcgcgtttgtgttttgcatgtctcataggctcaggtttgtggaatgcaaccctgtgctcatttgcaagaaagatgttttcccgagttttattaagctcagtataaacagtgtaaattggcacatacttatcgtgccttttctgtttcttcttatttttagatgattccctagagtcatcttttctcttggtgttagaaccacctgaattgtcagcctttatcgagacagtgcttgctttggcaatgctgggtttatttctcgagccagtcttcaacaatttcatctcatttcttgcttcctctttctgcacaaagacttgcgctctcttattgaattcattaccaggcaaccttgcgagtcatcccactgctcgcccccagctgttgagaggtgagtcgtgatccttgcttgaagaatagtaagttgaatactatcgttcaagtttctaactttagcggtggcagtactgaattaacttaggtaagccttaagtgactcgcctggttgctgctttatgtttgtcaaggaggatgcttcaggttgcctgtctcttgctgcctgaaactgttacttgaaatccttggacagctgttcccaagaagttattgaatgatgggtaaacttatcgaaccagctactcgctgctccaatcagcgaggtggggaataaaatacaacgtaaattatttgagacattgctggctcacattatggtattgaaaatgttaaggtgagtgactaggactgaagtcccatgatactatgagacgtgagggtttttgaacccctagaggaattcaaagttcataatgtctggatggaaaaactcaggctcctcgtccgagtcataaccgggtaacttcccatattccccatcttggtatctcctgaatttatcttccaactcaatgattcgcaattggattggatcctcttgctgtcggttaacattgagttattggcgtaaatcaggtgcattttgatttaagcgctctcgtaaatcaggttgtcttcgattcaaatgttcacgaaaatcttactatcttcgttcatagttgctcacagacctcgtatctgagtaactctcagattgatagctcttcgtattgctcatactctcttaatcatcataacagcgaggtctatctcctcctcgcatatgcctttctaatcgactgtgcccttgggatcttgaatgtcccgagctagaacttgcctcgtcctgcacaggccttctccttcagaaaaggttagatacactccctctgtttaggtacatctatgcctcctccctattagttcgagaaagacgctggtggtgtctcggtggtaacccacttaccctaggttgagtcctaggatttctctcgttattacgagggatttcttgttccctagttctgggttgccttatgttctcgtttctacgagaagactctagcacattattgttttcattcccctaattcgtaaatccttggggtctttgaggtacttctagacgaggtgcttgattattctgttgttcgtctactagaacatccccaattcccccaggttgctcctcttgggtgttttggggattttcttgatttgcttcctaccttctggttcttgaagctcgaggtctaccccgtggtcttcttactccaggatcaggttgattttgtgcattgtttccttgagacgccctggctgctgctgcctctctttccaactcagtgttgtgcttgttagactcagccaagtgttgccagagttgttgattttctgattctactaatggtacatacctagtggggtcataagcatcgtcacttctaggtacataaccaatattagtattggtttcctcattccttctttttgggttttgataatgaccaccttggcttcttcttgaacgtgttgttcctgaagtaggtggcctctatgaacccattggttctttcccaagaaaatgagtagtctcttcagaatgactatcatcattttgattatgatcagccatggacaaatttttgttggttaggagggatttttctgagttttatcacgtaggctctcaatgaaagtatcaaattgttaacgcagatttttgttaacgaataatgagtctttttcgtaataaattatacatagatatacatatataggaaaatttataattataataattaaaataataacaccaagtattttacgtggttttacagttaaatatgcatactccacgagtctatcttataaagatatttctgagtatttgacacaatattatagttagtgatctttttctctaaaagattttctatccccttttttgtaaaatctgtccctatttataggaatataggttgacaattatttacatttaaatttgaattatataactgtttcatgaaacgttggctttgaacacgtttcatttaaacacgtgtagataacaatcgataaccgcacaaccacttatcattcttatcttcaaggcggttgacgctgacgtgagtagaagcatatcgctttgcatatagatgaccaataataacttggtttaatcatatgccttccagcaatggcatgagccccagtgtactcagcaaacttaagaactgctctttgaccataaggcctcacagattggacaatcatgtcctgcatgtttctaagttgttacacttagttattataatgtggaaaagacgctaagtgtttcaagagctgattcgtctcgtcaatatttccttatatgtagagaggaggatgtctcaccatacattgcccatagtttcctcgggattgtgccttctggggtaagatggtctctcgttaatacatgaattgatagtttgtatatccttgtctttccttagactatacaattagcgagttatgaatatactctattaattctatatttaatgagttattccattttgcattaaatgatataattgttattatctttggtggttcatattccacttgattgacacgtgtcactctctgaagtacaaccaaatttcgggtataacaggaagaataaaaaaaatcgatgtcaaaaaggaaaaaagaaaaaaaaaagtatttttctaccttgggatgaagaatatttgaaggcttgatgaatgtgagattctgaaaatctctctgaaaagtaataggcatgtgggagataaagaggaagtgtggaaatttgattgtcaactcgcttatttatagttgagtttaatctcctaatcctaaagctaatgcgttttataaatttaaagcttttaaggaagaggtgaatgacaagtaaaagatatagttatctaatttcccttctcctttaagtggaattcgaaattcctataataataggaataggattttccaaatataaaatgtaacaaaaattcttaacactattaagattaaggaaaaattagaaaattaaaagaagataaatgataagtaaaatgccaaaagtattttcacttcttcttttctctttacaaataggattaggatccttatccaattaatcctattgccataataaaaaataagaaaattataaattttcaaagaaaaaggtaaaagataagtttttcatctttttctttgttaattaatttttgaattcccaagggctaagaaaaagtgttcaaagtcctaattcaattgggaattcttgaagaacaaatacaagtgtctaagaatttcaaaattaatgcccatctagtagttttaagtgaaacgggctcggttcatgtcatcaagtcaactccaaacaagtgtaaagttgacttggggataaatgttaacccgaaaattttccctggtgatgtggacatcaatgtttaacatgtagcatgagggatggcttcacagagttaagtagacccgagtcatagtagtcgacctgggaagggaccctagccctgcgcccaagttgacttcaggatctctgggataagttcaaactcaataacttgaatccaactcacaatcttcaagtattatgtactattaatacatggagcaatctaatccaagctctgggagctaaaattatacgaacctacaatccggaagccaacttgggcacctagggtttcactcggtggccaagttgacatcctcaactaggatttcaattttcatgactgtcttagttaaaaagggtcaaacttgcattgggacataaactagacataccattgacatatttgaggtattagaatcaaaattagagcaagtttatttttgagcactcggggccccaagcacccagtgccaaagttgacaatctgttaatctgggcaccttccaagtattagatcggagattcgacttttgcatcttcttcatcttcatcaaataaggggaaataggtcctttcagagaagaaacaacaattcttgggtgacaaaatagggcctattgcccaagttgacatttggggctagccttgcgcccaagttgacattttgtcaatctgggccattttaaatggagtttttcgggaattatttcaagcatcttctttgttttcaaaaaatattaagattcaactatttttgaggaccaaacgaaatttccaaagggccaaaactaggatccagtgcccaggttgacacttggggttgggcccagcgcccaggttgacatattgtcagcctatgctttttcagatcaagtttagcaaaaagtgttttaggaatttttttcgtcattagaaatgatgaagattcaagtaaactcaaggagaaaactaaagacctgagcctctgggaatagggcccaatgcctaggttaacctagtgttgagcctagcacccaggttgacaatcaacctgggacactaccttacattccgcaaatgccaaatttgatacgatcattgaatttagaatggttaaaaacatggtagaagacttcgtcctcaagttcataagccttaaaagtataaaagacgagatcacaggagctcaggagtatgtacccaacgcccaagttgacaaatgacctgctgcgctgggttttgcttatccgaatctaatgttgttttgacaatttgtctagtttttaaaaataacaaagatccatgaagtcaaagaagtcgaattcacaactttgcatttttcatttccagctcacccagaaatgaagagtttcgagtctctcatttctacaaaataataacatcttcgagaactggtgatcagcttcgccaaaatacataaactaactaagtaatgtcaaaatatcacttaggaatcttaaagtacatcccttggacgtttttacacttagaatccaagatggcgtcatatgtcaacatgcgcgctgagatgtcaatgttggaatttattttaccnnnnnnnnngatctactcacaagtatgtttatgaacatcctaaataaattaaacacatataaagt

SEQ ID NO: 120086 - DNA, 2052 bp, Cannabis sativa
ttaacccgcccaaaccggccaatttttttttttggtttcaaagtcaaagtcaataaaaattaaaaagataaattaaaaatatcagattccactaaagcacaacacaatttatatgagtttgaaactaacaattaagtatatatagcttaatattattatatatttaatcatttatgttatatataataaaaattaaaaattaaaaaaaaatcagagtcaggttggtcgggtcatttagttaaattgggtgggctagacctattttcaacccgctcaattaacagatggggcgattttgtaatttttttcgggttattttggtttgtaatttttatcaatttttttggtttagtttgggcgggttattcggtttgtacagccttagattatgttgacctccttttggtcaatgacactggctccttaaagcgacaagaaataaataagatttaggaaagatataaatagtgacgagtaaaactaagaacacgatatgttataaaggttcagccctattgctctggtaatggcctattcctcttgttattgaatttaacttatgaatagagaagcaaaaatggattgatctctctcgatagcttttataaaaaaaaaaatgagtagcgtatgggctctctcaaacaaatgattttggatcttcttacagtagaattgctccactatttattggggatatccaaaacagaatttggtttccttaagctgttaacccaccaattcaagaaataaatcggtcttcttaaaatactggaaatataaatggaattctcctttgacttggtctcaattacatattaaacaagaaacttcattagatgtatttctgtcaggcattttccccttggtcggatagtatgcagttcgtaccacttccttccgaccaggtttgtttgtgctaatcttgtgcggctagttacaattagtataactattatttctactaaccttgaatacatcttggggtcgatctatgagactcttttatctacccacgcctcgagatgaagatacatttcacctaaagagacctgccacatcaaccgaccaaaatttggaataacatttgtcccctaagtctaagtaggaatcttctggttggtgcgaggacttgcttggctcatgtaatattccaataagcctaatgatgagtaattaagatttataattatattatgggttaatcatgcaataagtgggattatggtcctactgatctattttaacataaatttaaattcgctataagttagtaaataagtgtaatttataaattatggagatttatgtagcatgtgtgaatgtaatatgagctatatgttgaataaagtatttttaagtttggcaaccttggagattcgattgggggccagaaatatcataacaagtttaattgatagaattgttgggaatattgtgataagttgatggaattagaagtatgtgaaatttgacttagcgccctcaaagtataaatttcttagtggctaagacataataagataattatgaataataataaagtttttataaatattaaattattattattgatcttaacatttattagtatattatatataatatattacaagtttataattagtaaacgaaactctccttctccttcgataaaaatcctctcctcttatatccattttttttttaatttttaacctgaaacctagtgatctaagctccactattagcggaacaataatttttggtgagaggaaagcttaaggtaaggattaattccgttttaagcttaaaccaattggttttatataggggttttgtgaattagaatagttatgaaagttctgaccttataggattattctcgggtagtcatgggactagtttcgatattttcttgctgaaattgagatgattttggattaaaaattgtgtttggaactttttataacttatgtccgaacactagtggaattttttaattaagggctcgattttagattctattacataagtatggtagtgtgtatggtatatattgttgggttttatgcc

SEQ ID NO: 120087 - DNA, 993 bp, Cannabis sativa
aaaaaaaaatataatatctagccacattcaaagtctgaaataaactatacaataaaaagtgccctgagaggaaataaaaaaaaaattgaatgaaattaaaaatataaagattgtagatctttacttcttttcaaagtgaatctactgtagatatatagaagataagtagatgtatggaagaattaccacataccctacactaataaataagtggtaattaagatcttacaattaatatatgagtacactacataaaataccctctttaatgaggacaaatttcgttggttaaagttggttttttgtcagtaatgattatcaatgatgatatgtcgttagtaaaaagttgttgatgatacttcatcgatgataagtagtattattgacgatatttaaagtcgttggtaaaaatcagcatcaccaataatgattttttcgttggtgatagtatggtttttttttctccgttagcacatcaatgacgacaaatctcatttttttttaaaagaaaaaattataaatttaattgttttttatataaaaattaatttttattgaatatttttttaactaattaatatttttaatttttaactaatttattttatgttattaattattggaaaaataaattaaagagactctttgttaatttatcaaaaaatatttagagaggaaaaaaaaaatcaatttggggaggtaattatttttgtctaaagtttatatgggatcctaaaatattaaatgagacatttatttctatcagaatttattataaaataaaatgaaatacgaaaaattaaaaagggtacatatagaaaatgataaaatcctaataggaaagccttaatggcatgtttactaataagtaatgggaatcagtggtaaagtaatcatttccttaagtttgtttacttacattattaaaattaggaaatggagaaattgattaaataaaggagaaaagaaaaggagaacttcccccaccaattt

SEQ ID NO: 120088 - DNA, 1273 bp, Cannabis sativa
ctcaaggattcaaagttttaggattcttattcttgtcttcaagcttccaaaattggtgtgtgttcggataaaaaaggtaggttcttcttgatttttttttcttttttgtaaagttctttgaatgtctgcatgtatgttgggtatttttcttagtataaagacatgaacattaggcttcactctaggcatttaaacgtatgaccttatatagaccgaatatgtattcttttgaaaaagaatccaccttatttatgtttgtgtgttgaataattgcatctttattttatgcctcactgaatagtcacaatattacaattagaacatcttgaataatcgagaaaaatgaagaataccttgaatgctcgcacatacatgtaggttttcacttagaactgtttaaatggtcttgtatttacccagaagctatattgaaaaacttgccacatttagtgacatcgcacgggtgaggatactcctttaaattttacgcacaacacactgaaaatatcttctatctttcagatgagtgatctcttggacagctaggagtatcaatctcaagggggtgcattcgacgatgagcccaataatagtggcaactttcttctcggaatcgccttttgaggaggttgctcatgaaaacccagcctcaatgtccatggatgccatttctcccaagtttagggaattacaagggcccgtggtggttgaaatgcgaggaagtgaatcaactatatatgtgcaaggaagttatattaatgtggttgttctctttaacaacgatgttaaggaattggatcatgagattgagctacgtgcttgggagagaaacaacatggacattggggtagaaatcaacgaagaagcaaagtctttaagtgatgaagatgtacctttagaaaaaccaatttcccatgaggatctcctttctaaaacaagaaaacctgacttagtaaccttcaagaagttacaacttattttaactggttgcatgaagctatttacaaatcaacgaccctattgtccttttactaaccatgagatcatcaacacagacgttgtggttgtctcaattcgatcctccagtgcatagttactattccattccaccacttcgtaaagccatcctgaaccactatgacattgcaccttttcaaattacctcgagcaactatagaatcatcgtgggattctttgcattatacaaaaagaatggctatgcagatcctatagttgaggattttagctatttttatgacataaaaaatattgg

SEQ ID NO: 120089 - DNA, 1841 bp, Cannabis sativa
  modified_base (1814)..(1815): a, c, t, g, unknown or other
tacacttagaatggatgaagggaaagacttgagaaatcacttagatgaattcaacaaaatcactctttatctcagcaacatttaagtgaaattagaagaagaagatctagccattattctactgagttctttaccaagatcctatgagcactttgttgacacaatgctcgatggcgaagaaactcttacaatgtttgaagtcaaggttgctttgaattcaaaggaaattcagaagaaaacagaggacaatcaaagtgacaattgtgaaggcttgtttgctagaggaaagacacaaaagaaagattccaagagccagaaaggaagctacaagggaaaccagaaatcaaactcaaaagatgactcaaggggaatcacagacaagaagtgtttttactgtgaaaatgaaggccattttcgagatgaatgtttggctctgaaagctaaacttaagagagacaataggtaaaatagggagatgggagaagctggtgatatagcagatggccatgaatctgcagatgttttagtggccacaaatgcagattctagtcatgaatgggttcttgatttaggatgctctttttatatgtgtctaatcaaagaactgttcaatgatcttgaaaaaagaaaaggaggaacaatacttctaggtgacaataaggcctgtcaaatccatagaattggttcaattatgctcaaaatgcaagatggattcaagaggaagattcaaaatgtaagctatgtaccagaccttaaaagaaatttattatccattggtgtactaactgaaagaggttgtaaagttgaaattgatgataagtctcttaaggttttaaaggattccaaaatggttattaaatgggaatttacaaatggtctctatatcatgattggtgaagttgttactggttgtgtcaatactatttcatcaagtcaagattctaataaaactaaagtatggcacctaagacttggtcatgtaagccaaaggggcctgttggagttagaaaaacaagaaattcttaaaggaaaacttagtggtaagcttgacttctgtgaagaatgtgtttatggaaaatgctgcagatagaaattcagcactggcaaacacaccaccaaagagccacttgggtacatacattcagatctttggggtcctttaaaggtgtcaagtttaggaggatctaattactttttgagtattgtagatgattactcaagaaaggtatgggtgcacttgctcaaaaccaaaaatgaagcttttaaaaccttcaaggattgaaaaactctgatggagaatcactctggaaagaaggttaagaaactaaggacagacaatggtttggaattttgttctacacaattttcaaactattgcagagaatttgggattgagagacacaaatcagcaccaaggactccacaacaaaatggcttagctgagaggatgaacataactcttattgaaaaggttagatgtatgctgaagggtgctggtttagaaagaaggttttgggaagaagctgttaaaatagcttgctacttagtgaatagaagtccatctgatgcaattggattcaaaactccacaagagatgtggacatgtcaagctccaagtctagaaaatctgaggatgtttgaatgcattgcatatgctcatgtcaaacaagacaaattgcagcctaaagtaatcaattagtgtatgtttctagggtatcttgatggagttaaaggatacaagctatggtgcttagaagaagggttcaaaaaattcatagtgagcagagatgtaatctgttgggttttatgccctnnataaaactctttacaatctgattagt

SEQ ID NO: 120090 - DNA, 1227 bp, Cannabis sativa
taaattatgagaatcaatataaacataaatatttttatatacacttaagtggattctgaacccttaataatattcccaaagataactgaaaatgtctgttactgtcattttcaccgtttaaatattttattaccaaaaaccttaccatttttggaactaggttagagttgtaatagcttagattaaataagtattttcttcgatctcacgcaactcccatgggttcgacctcgttcttcacaatctccatactacaataaagattcgtgcgcttgcgagttgataaatgtaaaacgtaccacatttcggtacacaacaatatacagttacaggtccttggacttggttagttcttataaatatttttctcttccaattttactcttctcaccatgctttcagtattgtacttactgatggtataaattgggttagaatgtagatttttttatatatatcattgtcttattgtttattctttctgaagcattttgattcaacataaatagatgtgtgtctcttttgcttttactgttttcaaacaccattttctatgatttcctaatagcggcacttaagaaacagtgatggtgttaacagtgatggagtaacttcacttggataatctgcatagtcattagtcattacctaacttacaaagaatcaccatttaatgagtctagtctgattcgcaataggtacagtatctttcaacaattaaaatgaatgtgatgttttcatagttttgaagttgattgaaaggtttagattgttgttccttgtacttgtatgtaacttacactgttgggtgttgtttgaatagtaaaacaataaacattatttatgatatttaaattggatgttaaaatttgattgtaagttatgttttttttttttgttttgtttttgaacaaataagttattatgatattcaaataagttatttatcatattgaaattggattggccatttgctcattttcgataatactatcctctggtacttgataatatttcaacctttacttgtttcatcaaaaaaagataatactatcctctggtacttgattgtaagttatgtgtgtgttgtttttaaaggaggatcatcttcaaaaagtgaagtattatagacaaagcactaagtatcatacgtttagggcaagttccatttttaaagttgtgacacatatggaatggaagatatataacatagattaccttaaattg

SEQ ID NO: 120091 - DNA, 1151 bp, Cannabis sativa
attcaagcgtttatatattacatcatgttttacctgggactcgaacccaggacctccaacactcacacacccacctatggccacttgagctagccccaagtggttttcttataggaaagttaatttaataattttatacctattgtaattataaaatattttctcctttcttaattcccattttggagagaaaagaaattattagaatccactcaaaatatttcttaccaaacatcttatttctacttttcttctaccaaacatacggggaaggtaaggtctctatgatctctgtaacactgaacctagactctcatagaatttttagtccttttgtatttgaaaactctcactcaatgcatttcttccaaagaatcttcttattgctcattttttcccactttattattaattttgttcgataaaagtaacactaaaataattgaatgtgctaacctatcgattattaaaacaagtatttcaactcataaaacacgaaaaatggttactaaaatgacctaattagatctagtatatagggtagttgaagggtgtgaatagccaatggtttgaaaaatttaaagtgcctaatagacactatatagtggtacttaacaccacgtaagggatcatattaatattggtgtaattaattaagaatatgcatcacacaatttaaattaataacaagtatgaaatattactaactatttgcaaaataccacaaatgccaatagcaatggtcatctattagttatgcagtttgaaaatttttcaaaggtggctttatagctcaatatgcagtttccctgatgccctaaccagaactttattaaccaaactttttttttaacgaacattatttatttattaatttgaaaggaaaagaaacttaattaattaactaacttttcagacataaattatcatagtactacgttaccaaactctcaaggtaatagtatactaataatacattatatatagaacaaagtatcattggtgatttcacaaactataataattaagctcttattcaagccctatcatcatgactctctacatggagttccaacaaatagtaccctctttcgaagtccttctcttttcagtttttatgtttattgtggtgagcatactcttgaagagag

SEQ ID NO: 120092 - DNA, 3022 bp, Cannabis sativa
acacgggggagcccgttccaaagcttgaataaggcaagcagatttggtagaaaatccaccattcgtttctttagtccagatccacctatcaccctcctgaccactaggcttgccacctttgatgatgttgcttatagtttcctggtcaaaaagcctgacaagtttctggaggtcccagtccccattaggaaggagtaagtccgccacgagcctaaggttatccggaggccaagtaatgggtttcggggtgaagtctctaccatggatgacccaggggtcctcccaaatcttagtgtccttcccatttgaaataagtttgcaagcccctttcttgagaatatccttggtacgaacaacatttttccagaaccacgagtctgagtccttacaagagctctcaaagaattttttccctcgaaggtactttgccctcagaacttgacaacacaaagactggtcctcgatcagcatggcccaaccccacttagctagtaaagctttattcatttcccccgtcttgcggaaccccagacctcctcgagacttgggtaagcacaagttgtcccaagcttttaagcagatgccccggttcccttgttcgcagccccaccagaaatctctgaccatcccatcaatcttagaggcgaggcttttggagagtttcgttgtctgcatggtatacacaggcaacgctagtcccacagatttgattaaagtagctcgtcctgccttggacagggatttcaacttccagccatgaagttttgaaacaaggttatccagaatgaaatggaaatccgcatccttctgacgggacctaaaaactgggagccccaggtaattgatgttccccaccggaatattgagcccaatatccctcatgatgcctctcctcatactctcagtcgtgttattactaaaaaagatcgaagtttttagcttgtttaccctctgtcccgaccaggtacaaaatttctccaaacagtcccaaaaaccccgggcttcctcaatattagctctccccactaaaattaggtcatccgcaaagaacaggtgtgagagtctagggccacctctactcaactgaatgccacgaatggtcccgcactgaagagccttctcaagaatacgggacagtatatcagccgcccagataaataggtaaggggagagagggtccccctggcggagtccacactcgggagtaaagttgctcatcttgctaccgttaaggaaaaggttgagagaggtagtagagatgcactgccgaacccagttacagaacctgggaggggccttaaagctgcagaggacatggtcaataaattgccagcttagtttatcataagctttgaccagatcaattttgatagcaaaaaagccttccttccctttcttgcgtttaaacgagtggactatttcttggattaaaacattgttatcttggatgctcctacccgggacaaaggccgcctgagtaggacaaatcaaacgcggaaggataggccttattctgttagcaattatcttcgagataaccttgtagaccacattgcatagagagataggtctaaactgggagactcttttcgggcagggaaccttcggaataagggtcacatttgtagcattgaaacctctatgcataaccccagtttgaaaaaaatcaactacagcctcacagaagtccttttccaccgagttccagtaatgcttaaagaaaagtactgacataccatccggcccaggggctttcatactacccatcgagaaaagagttcttctgatttcctcagggctagggatgtattccatttcagtctgctcaatagaggttaaatgatcattgatgagatggtctacgttttccaacggccctagtgtcggattagtgaaaatgtcctttaaaaaccccgtgaactctctaccaatctctgctttattcgtaatccacatcccattcttgtttaagattctctccacagagttgcgcctgttacggatagtggcagacaggaaaaagaatttggagcacttgtccccctccttgatccaagaaacacgggaccgttgctgccaatataaagctttccgccttaaagcctcattaagagactttctcaattcgacttcctcagcccagattctcgacccaaccggccgcccttggatctcacggagttggtgttccaaattggagataaaggtatcaagcttgccaaattgctccctgttccatttactcaaggcaagacgggtagctcccaatttcttgaacactctagccggtgcccaggaatgggataaagacgcccaagccgagtccactattaaagagctacgaggatccctggtccaccaagcctcaaagcgaaactgcctcttggatctaggatcaagatttgccgtactcacacaaataggtcggtgatcagagttacaagagtgaagcgactgaaccacagccttagggaataagcttaaccacccttcattgaccagagccctatccagggccgatttgatgtggtactccccgtctctatggttatcccaagtcaggttatcccctttcataggcaaatcaaacagagcatggcaattaatcaggtcagaaataaaggggaggaactgatcctttcctttagatcccacccgctcagagcccctcaaaataaagttaacatcacccagaatcaaccacggcccaccaaacctcttaccataatccatcaagttcaaccagaatttctttttctcatgaaaataaggaggcccatagacacaagataacaaccaggggttatgatcagggtcagaatacactatccccgtaatctgattcttagaaatgtaaatattctcaaaactaaaaccttctttccaggccaagataagcccccccgcactccccacagcaggaacaacaatattatgataaaagtgtaatcttttaagagaacgtaccagagaagtggcatccacttttaattcggatatgaaaatgaaatcaggattgcac

SEQ ID NO: 120093 - DNA, 2558 bp, Cannabis sativa
atccgcattttgcggattattgaattggattggatgattggattggatcgtgcgattggatcgtgcggattatcgtgcggattagatttgcggattagattggaggattagattggatcggattagattggatcggatactttgtgaacacccctaattactaggtaagagagcaacaacctcagagaataatataaagaaggaacatgagtaatagataggtaaataaaaaatttaaaactgtgaaaaaatacataaaaagtatatatttatgaaaaaaactaataaaaatattaaaatttaatctacgtagttattattttaggatttcttgacattttgatatagatggcaatagatcatctggtgctgaaattgtgccttcttcagttaaaatgatatcgtttatactcttattcaatttcttcgtttcattctcagttggaggttgtccttgtagctttttttgtttggccattttattaaaatatttttgagcatgagtagctatttggatcggagttcttgtaccaccaaataaagtagatatttctgcccaattaccagaaccgaacttattcaacccatttagaaaaattctgcaaaaataataaaaccattcatatgtaaacattattattattattattattagtagcaatcaaacaaataatataatctcaataataaataaataaaaagttaaaagtatgttataataatatggtattttatatgtattattacttacatgtgttcatctaaagtccaacgaccatttttagaagaagttgatttttggttgagagcttctgaagaagaaggaacttcttgttcttgatctgctgtagtcgaaataggagcggaattgagaatgggaattaatgtatgggtgttcatttcaatttgtgcttcttgattgttaatactttcgtcccaactactcccactattataattcaaataataatgttgggcaacttcagatactggttgaaatgtatagaaattatggtagacgtttgtgtttgtaactgatgatgatgatgatgatgtactctcatttaaaattaacatgggccacatgttttttaaatgattaatgttcatttgatcacccaaagaagtaccactcaccaaattatgatgatcaggatcctgatcagtttcaatgaattgatcaggaatatgatctagtattctgttattattatcttgaataattgttgaagttaatgatatttgagtctcttcacctagtaaattaagttgttcttgttgttgttgttcttcttcttcttgttttttcttctctaagtagttattcaattcattccaatcaatatcatcatttgaatttggatcaaatgtgatctcatcaaaagggattacattatcatccattgctttaataaaatatataggatctctcttctacgtagctaaaaactcagttgtgttttagtcttggcatgtattatgtatttataggtatagataaatcctatttctattcatattagaatcaattactcttttaacatagttttctaatcctatttctattcatattagaattaatcttttaagatagtttttaatcctaattctattcttattataattactctttattaactaatgaaagggcatttgtttcacccagtaatcccggccgatatcaaataccttttcaactagaaaaaaaaagttctagggcaacggtgatcaaaatggaggttccctccattacctcagattcaaaataacagaggatggtgtttgagggagttggagcaggtggacgcagtgatcatgactccagttcggtcattgattcgggggagtcggagctaaccaagatggacctcaaatccattggggacaagtctttgcccgatccttcagttctttggaactcttctcataatattgtttgaatcctagagtgataactgtgattggaggtgttgttccatcacgtactttatgaagagtatcaatatatgagtcatgatgaggaacttgcaatgcatggcagcttcaacaccaatttgatttgatttggaagactctgatgtaggaagcggttttccaaatgcggaggctgaagatataaaaatgagcatgttcagttcagctacagaaaagatgacaactggggtggtgggatggatggagcatcaaggcaatagaagaaggggtagactttcttcctctcctttctgatattataatttcttttattgtctgaggtaatttgatgttaattaagcatgggtaaattgttgcaacaaatccctcaaattttgtatctgtaaaatttgcttcactgttgcatttcgcccctaatttctggcgcggaatgtgtttgttgttgtatctgtaaaatgatgcgtttttattaaataattgtgtagacgtgacatgactttaattggtttttttttttttttgaaatgacataactttatttgttcaaaaaaataatcatacttaaatattaaataattgactctttctcaaaaaaaaaaaaaaaaaaaaaaaattagattttt

SEQ ID NO: 120094 - DNA, 1725 bp, Cannabis sativa
aaaaaatgggattgggattaggagagcaagaaatggatacaccaaacaatacatgctataaataaagtttggcattgatgaaaatgaaataggggtgaagaaagtgaagtcaaatgaatcgagcagggtcaacttaggcactttcacatttatggtgtgaacctaatctacacttttattttccttttctaacctttttagctattcttcacttgttgcccaagaaacacccaatttcattgcattttcttcaatttaacaccctcatctcacaacttacactgttacacactatatgattgctatagaaaaagggaactttttttttttaacttaaacaattttgagaaccaccttattatttttgtcatttcttatcattatattttaaaatagaattataattttaacaattaaatttttctacatccttttcattttacttccaaagagcatatcttttggtgcaccattttattaaatttgggtaaaatttttagcatattttactttaatagtacgtcaaattatgtatcaaattgatgtatactattaatggtgttggattttaaatttacaccaattcaatttaaaactattttcttgcattctaacccataatttaatttattattaaaaataatttacattttactcttcaaattaaaatttattacaaaaattataagtaaaatttattttaactaaaaatttgttgtaatattaaatttgcaaatatgctaacaaatagcatgaagatcgaccgggacaaaccccccactaaaccgacaacgtgaaaaagaacaagcaggacgaaccaaataatcggtcgccttgttcgcaaatcgcttaacaaatacaatgtattattttaaaaagaaagtagacaattataatcacaaataatcaacctaaacagagatttcaaatactaacatacagaaaaatacaaaataacaataacaaaactattaatattaaataaaataaaaataacataataatatgttataaaactaaaaataacatcattattaaagtaaattattaattgatcatacgtgagaacaccataataatttaaaaaatgtgcgagcttagcccgcctatgcctaagatcagccctgttaatgtgtgtctattttttcataaaatctaaattaccacgcacatttcaaaatcacttccccaaaaatctctctgtttctctctttttccctctcgctctctcttcatctttatgtggttctcaccaaactttatctctaaaaccaccatcgaacttcatcttcatgccttgggccaagtatcaattcccctcaccccatgctcaaaccatccaaccacttgactcaaattctttttaaatggtaggggtgttcatataattcgcaatttgtgattccaaactccaaccaatccggtccaaactatttgagaccagaccaagtgaatccggagtgaatgatttgatcaatctggatcgttttaattctttggttcggccacgattttagaaatctcgatagcagtccaaaccaagtcaatctgtatacttattatatatttacttaatatttcttttttggacgaaatattaatatttggaaaaggctttaggtagaatattgatattgactttatattgttacgataataattttttattgttatttatgtattataaacttattaaaagctaaaaaatactaaaaaaatgaacaa

SEQ ID NO: 120095 - DNA, 1142 bp, Cannabis sativa
  modified_base (923)..(924): a, c, t, g, unknown or other
tttttttatcaattgtagaaaaattttgaattcaaaactactcaaacattcctacatatacaaataaacgtataaaaatgaagattgattagaaatatatcataatttataactagtttttatttgagaagtgttaaaaggcactcatggtgtctagcacccttgtgaagtataatattgttattggtgtaattcaatattaagtcttacttatttatatatttttttttggatgaataatgatctttttattgcccaacaaacaaattaaaactcaagagcaaaagctttagctaatatgttcaaaccaaatacaatcactatgactagttttctctttcttaaaaggagaaaatccattacaaatgctaatttttaaacaatatatagtatcaatatacacaaatttattctacaaataattatttatagcttctcaaatattatatacaacactattaataattgaaagtgtgtaccaaaatttttaaaaactgaaatattcaagagctaaaaaaataatgaatagtagaaaataagagaggaagatttttgacgtgattcagttgttaacgaactttagtccacgagtcaatctattagcctcgttggacagtgttgatgaatttataatgttacgtaggaaaccctacatcttttttctttatttcttttttaaaaagaagaagaagatcaaggatgatttttgttgagtttttgctacgtgcttggttggcttgtcccctttgcatgaaaatgaagggggtatttatagccttggtgatttgtatggatcgctccatgacccgcgtagggtatctactcaaatctcactactaggtaaaatacatgaaatgtagagctgattggttgatcacgtgggtagtacgttttacatttatcaactcgcaagcgcacgaatnnttattgtagtatggagattgtgaagaatgagatcgaacccatgggaattgcgtgagatcgaagaaaatacttatttaatctaagttattacaactctaacctagttctgaaactggagagatttttggtaataaaataaaataaagtattttaacggtacaaatgacagtaacatatatttttagtaatatttgggaatattattaagggttcagaat

SEQ ID NO: 120096 - DNA, 808 bp, Cannabis sativa
attttagtaatttgccattaagtgatttggtggctgccttaggttgtgacacctagctgctattttcagccaaattaacaaagttaatcttagtttacttgaagaaaaagaattaaagaacaaaaataaaggaaataccaaaactagaaacattctctcttctcttttctctctctcttcgaaccagctgagaatcaaggagtttgattgctcgattttgtgtttttagcaaggttaggagcaggatttaatcaaggtaaaccctagacactctttagctatatgtttctgaatgtttgagtttgtttcaagtaatggtttgtatgaattagggctgttagggtttgattaggttttcgttcaactcttatgttcattttaggttgtttccaagttcttgcagctggtattagtgtataatgttagatttgttgacctcgcttttagccaacgacaatgagtcttatttagtaagcgataagtgatttatagcgatacatatatagtaaagcaatgtaaagacacaagaattttatagatgttcagccccgaacagttcgctaatagcttaatcctcattatttgtattgactcaagaataaggagaaaggttccttttcttataggtcttatagcggtatctctgtatatgaattcttaaataatatttctctaccagaatattttggaccctttgcccagtcactattcatcactatttatagggctatgagcttggggaagaagtgtttcccttctcgttacaatggatataagcagaaagattacataataaatacaaaataca

SEQ ID NO: 120097 - DNA, 589 bp, Cannabis sativa
aaaacacagggtccaatctgtaacttttgcaaaacacagagtccaaaatggtatttacccatttaataatttcgaaattctatcatattgtattaagtaattttattttttatatatttggattcaatccaatctgcataataatttaaatctaatccaatccgtaaaagtgcatattaaatcggttattttggattggtcactttttaatattgaattacttaaaaaatttaattcttttttcacataacttacaaaaaaataaaataaatttatgttgttttatgtctttattatacccttttcaagcaataatatggtgttgacacgtataaagaaactagctcatgttataaatcaattttcctcaaaaaatacatgtggtagaaatattcaaacttatcattttgaaaaaaaagggcgagctatgaataataactaccgattgataaaatttgtgagatgaacgatcaacttagagggttcatctcgagaaatatagaatacacaacagaatgacaataattggaaatggtagataatgaattatgaaattccgtattttaatattcccagtttgattatttaa

SEQ ID NO: 120098 - DNA, 1667 bp, Cannabis sativa
aagtttttcttcctctcggctgctgttaaaggtagaagaaatgctattgaaagcatcttgaataaggataatgtctggattactggccgaggggctattgggtgtgaattcatcgagtactttaaaggtatttttggggggcctctcaatgatgttcagtacaattgctctcagttattcccagaaagaatttctcctgaagattcgacgaacctagtttgctgtcctagccctgacgaaataaagagagttctttttgccatgaatagccataaggccccgggtcctgatgggatgtctgttctgttctataaacactattgggaatcggttggatctgacttctgtgatgcggtgctagatttctttgagacaggtaatatgcatagaggaataaacgccacaaatgttgtgcttatccctaaggtccagaatccgactcgtaccaaccaatttagacctatttctctgtgcaatgtgatctacaaagttatctccaaaattctggcaaacaggataaagcctctgcttccgtcgctcatctgtccgactcaagctgcctttgtcccgggaaggaacatccatgataataatgttattgtccaggaaattattcattctttcaatcgaaagaagggtaaagagggattatttgctataaaaattgatctggtcaaagcatatgataaactgagttggaagttcatagaccatgtgttggagtgccatgggatcccccagaaattccgtttgtggatttcgcaatgtatcgctaccacttcacttaacatctgtctcaatgggggtcgggtgggaagtttaactcctgcttgtgggcttcggcaaggtgaccccctctcaccttatctgtttatctgggccgcagaagttttgtctagactatttcatgttgctcttaatcagggctctattcggggagtcaatctaagccgaggtgggccgactctctcccatattttctttgcggatgatctaatactggtcggtcgagccaatttaacagaggtgaatagatactggaattgtctagagaatttctgctcttggtcgggccaacaggtcaacaagctcaaaacttctattttctttagcagaaataccccgattaaccttcgaggtgtaatcaaagaagccttgggaattgattcccctgaaggatgtatcaagtacttggggttaccccttttccggtctaggcagaaagatgcggactttaattttatcctggataatctcacgtccaagcttcagggttggaaggctaaaactttatcgaaagcagggcgagctactcttatcaaatctgtgggattggctatgccaatgtatgctatgcaaacaaccaaactttcttctcgaatggttaacaagattgatggcttggtcagagacttttggtggggttttgagaaaggaaaccatgggattcatctcagggcctgggataaactgtgccttcctaagtctcttggggggttaggtttccgaaaaactaaggaaatgaatcaggcctttctggccaagtgggggtggaatatcctcaccggaagtcaatccctatgttgcagagttttaagagccaagtacttaaaagggaaagacttccttaattgcagatataaagattctgactcttggttctggaa

SEQ ID NO: 120099 - DNA, 1448 bp, Cannabis sativa
ataaatactctcataaataacaaagactcgtggattaaggctcattaatgccccaaccacgtaaaaatctcgtgtattaacttcttacagctcttttaaatattattatattggttgtcgaaaatctcggtcaacaagtgtaaaagggcaaaatggtcattttgctaagttaggttttgtctttttgttgtttttagttaaaacctattaatttaattttagttattttttttttttttgataaatcagaatttcatttcaccacaaaacaaatctttacaaactaaaagcacctaactagtaggccttaactttttctatacaatttacttataacaaatcaaaccaatctctatctttttgtttaatcattttaggccatatagacactactctactctttacacaccactttacttgttaaatcacatcagctgcacccgatattttcccttcccactgctgctcatttcaggtcttccaaagcatgtatacaagggctgctaaaccagcagccaatactctctttttgaatctggaacaacttgcttttcttacccttctcataatgttctgaagtgaactatcacttgtattccacccaaaccaggccttcatctattcaatacattctgcaggaaaaacacatccaaaaaatatattggccaagattaatgttagtaaaaccaatttctaattcattttattcaaaaaaaaaaaagaaaagattcaagaaatactttttctctctctctttccttcctctctctttcgaaacccctagaccaactagggtttgtggtgtttctccttcaatccaagcttgttgcagcaaggttttggtgtgtttgagttctaggtaagcttcttgtaactttcctttactttcttgattttaaagaaaaggaatcatgcatgtttttgtgaatttggttgttgttcttgttgctggtgttgagttatgttttcagtagctaaattatgtttatatagattgatttaagcaggttttggtaggtagtttgttggttgagcaagctttgagtttttgaactcaagcctggcttattaatggtaaaattcgattctgagtatgggtaattgttttattacttggaaaatgtttattggggtgtattatgtaggtcgggaaagtttggttgggtttggaaacgtttttgttagggtttggagttttgtaggttttctgggtgaaaccagttacccggattttgcagcagggaaaacccgaaatttcagcttatcgtttcgtgtcagtttcaggtttctagttagttgattccctgctagtttagggtacagccattttaagttgctgttgataagtttttggcttaaaacctaagtcccggttgtgatttagcgagtcacttatgcgtgttgttatcgatatgatttaggagcctataattcgccgagcagttgtt

SEQ ID NO: 120100 - DNA, 1621 bp, Cannabis sativa
agagagagagagaagagagaatatggcttttagacttagaactatttggaggctaggtgacttataggcaacatagtgaactgagatttctatgctagggttaaggcctttatatcgagcgagtgcattggccattgcgttttctttgaggacatgccttttagtacatcctctgagctaacttaacaagtattaaaattagctcaaataggccatcatcttattgaattgagctacgtattcatctaggacatgacctacgactagttgagagtcgtagtgtatgtctaggtattcagcccacacttcgtctgctagcttgaggccaccaatctgagcttcatattcagcctcattgttagaagctttgaaactaacctttattgcctcatgtggccatttcccccaggtgccttaagggccatgcctacactgggcaggttgtcaatgcacctttttggttgagttctcttgctgttgctctcagttcttctctggctctctcttttctcccaaatcttgagagatttggggagacattcttgtacatttagccatgaagttggcagagcttagccttctatggccatgctaggttgacaggtggccttatatttcctgagcttgacggcctaggtgcttcaggttttggtgacacctgttgccatggctggctggcatgcattgatttgggagttttggtaggaaagtgaagcatgctcacttcccctccttctcccttagaattcacggcataaggaaattgttaaatttcccttttttgccattattttggctagaggcatcattgttgcacttgcctccaatattccccttattagggaattggcagatattgtctgcactagctggcaagtcaaacaacacttgggccgtatgattccctgtgtttgttcaacattaacctcccctcttttatgggattgtcggacaacttcttccaactttatgaagccatcaactcgctcaaggaactcatttatgttgctcgttaagatccttttagtatctttccagaattactcaatcgcaagatgcctctgggtaagtgtcgtatatcaactttcttgtgtcaggcctttgatcttggtggtctcagacatgaacctttgaatgtagtctttcaaaggctcgtcttgtctttgctttatttttaaaagatcctccagtcgtgaaggtacttgtcctgaggtagagaattgaatatcgaactctcgagagaattcttcccaagaattaaatcttcctggggtttgcttaaaatacaactgctgggctatgtcagctagggttgtaggaaagattcggcatcacacatatctagatacttgttggagatctatttgcatctgaaagtattttaggtatactatgggaacttcttgccccatttacatcttccaagtttgcatcttcaaattgggcaagggcaaggcattgatgtatatcaagaaaggtgagccccttgacctagccagctcaaggtcttatggtttcaggccagccaagtgttaggctatttttagcctacgttttgggtcactttttatagttgttttccttcttcattattatatttagaatagaattacgcttgttt

SEQ ID NO: 120101 - DNA, 970 bp, Cannabis sativa
ttgaactttcacttgcctccaagaaatctgtcgaatcatatccattagaaaccacactagtttctcttctttcttgactttatctcgcgtttacttgttctttaagtagtagcatttagacttgtaatgcccttctcttttacaataattgcaaaacttccctagtttgaatttagactttggtttatggctgttgtgacccttggttccattgtttcttttattatgtctttgatctctatgattagttttacctcaaaaaatcagaagtagtccttcacctcctagatcaaatatctcttttgatcttttctaaatttttttcaagctcaaggttgcttttacttctgccattggaagagtatcttttcctacaagatcgtgtctacaaagtgttcataaaatgtaggcaaagaactgagtaggattatgccatggtcctcttcttcaagctttactcctatgttgtgtaattccaagattttgttaaaatcatcaagatgctttttgagttctttagcatcatccattcgtagagtatacatctttatcttcaaatataatttgtttgccaagaattcttcaagtagattgcagcacacttttccccactactaaaaaaaggagtttaggcgaccgctattaatagttgaatattgtataattgtcaattcataagatcgacacctatgctaccattgcaaaacctgatggaatagacatcaattccaaagagaaataagcaaccattttaaaaggtctctaaggaatgctactattttaaacagtcgctacacctttattttttggttttaaatcgacacacccagaaaaaaataacagtaacagatctggttcccttgctgcaacaccaaaaaatgacaacaatcaaacaacccatacaaatctcgtcctctctcaccatatacattagatctacaatatacataacagagagagagagagagag

SEQ ID NO: 120102 - DNA, 1353 bp, Cannabis sativa
tacggagactttaaagaactttataggactgttgtagttctggatttgacataactataatctatttacaaagtaattataaaaaagacagtgtagaacatacaatatttatcaatgattcaatgtaccttatttttaaataattcaagtataatttatttctatcataataagtaacaatataattagaatttattgttattattattttgttaagatattactatatacccaataaattagtctgtaacatgataaattagaataattttattttattctgtatttattgcttaataatattttttgattttttttttaaaattttttttgactacttgttagtgtacatatataattttaaacatgcatcaattatcatatataattttaatatatacttaataacatcttttacttgttaatattttatcatttccaatttataccaattagtttatataatttcaaacatatacttgctatctgcgttttcgaattcacaacacgtgtatttccaaagttcaaacttagccaacacgagtccattcttgggcctactcaaattaatagattagcccatagccaaattgagttacggttttgaatccagatgcaagcctaacttacaagtatgataaagtcgaatcaccatcaggatgtatccagatactctcttgggataatttaaacgggcaattgaagagacatccggtagcatttggaaaccatcctacgtggcattttccaaatacaatgtcccactaagttagtgttggttttatagtactaaatcaggtacgcagcagaagagttttatattatctgattatcatcgtactatagccccatcatcttcatatgtgtacattaaatcaaaacaataagtttaaagtatacctcttgaagcctatcaaggtattctcgaatcttctcgtatgttgtattctttaatccagttgatgaggaatttgcaattcggactcacaccagtgtctttcaaatcgatgcaccacacacaagaaatagtgtggactattaggataaagtgtataaccttgttcttgttgagttctcaacacatgagcaagaacaatagagagaaaaactattttccttttctctctgtagattttgaaattttctctataaagtgatcatctgatttttcaaatcagctcctatttatagttgttaagtctctttaattaaattattttttaattgtttaaacaaataaaaatatttataactaaatttggttactgatatttatgagagaatctctcaattacttgagagaatatctcaacaaccttgaaatatctttaacaactttttaaattagatatt

SEQ ID NO: 120103 - DNA, 823 bp, Cannabis sativa
ttgcagcgctagttgcaataggggtttttatgtaaaatttcgtaaaaatacaaagaaaattgttttgaagtgtaaaaattaaaaaactcctacttttttttagaaatttatcgaaattactctaaaagaaagcttatatagaatacaatataattacttttttaagacatttattggaattgcttgataaaataatcttacgtagaatattgtctagtaaatgataaaatactttttagtaatttataaaattagttagtacattcaattttatttaagtttaaagatgcttatcctcgctgttgccttttattgcaattttcgaacttagtattttaatatactcatgagtatgtgggtcaatgagctacaagctcttaaagaactcattgcctaccctttctaatgatacaactttgaactgttacatttgagaccaatgtataatgcgaaacagatatggatcattattcactaccttcttgaggcaattcatttattagcaattttttcatgatgactattagattgatatgacaggtgtcatgtccatatttaatgctcaaaatataggccatatttagtgctcgaaatatgggcataacacttacctattacttactaattgcctcacagaagttaaggccatactttcaaacccatgccatctaagtactcacgaatcaccctctccaccaagcgttacagaagccagagtcctgcgaaaggttattgaaatgggtcataaagcttagccaatttgatattcattacctgttgggttttatgccctaaataagactcatttcaatataatcagatt

SEQ ID NO: 120104 - DNA, 1438 bp, Cannabis sativa
gtggaaagtggctaaagccactttgggctgaaggtgctcagaccgagagaagggccactcacgcagctggcgagtagagaaaacaaaaggcccaggaggggttgtgcgcgccactcgcgcgtgaggcttgtgaggggaggaagggagctcctgctcctggttttgtttctaccgagcgaatagaagcccgccacgttgtgaggctgtcccctggaggaagaaactgggtcggttgggccttgtcttttgtgctctcttttgggctttaaaatatcaatttacatgtgtttgggccacatttttatcacttttatttcttctcttttatttttacaaatgttattttctcaatcaaacacaaataaaattcaatccaaacaaaatattttcaacataaaatttatcacaataattttgatgaaaaatatttatttaaaatcttaattaatttgtaattcttttaataaaaacaaagcatttttttaactttttatttctttttctccatatgtcataaatactaattattatttataaacaaagacaaaattaattaactttgtatttttatattatgaaatatgtaatattttggcatttaacagtcacacacctaggaattttttcaaattttcaaaaaaaaaaaaaagcaaagaattcctaaaagtgttcatccactggaattcttttattcaaattctaaaatacctcaatctgaactacaggtggcttaatcattcacaaagaagttatgtaggcagcttagttaaccaaaattactgagttcagctgcaattctaaatttaccccaatttgtccaaaattatttcaaattatttaatatcatcgtaattggaatcaaaaggtatttcctttaaaaaaatgattctaattaagagattattcttataatctttgatgggtcgaacttaaattaataaactcttgtgctataaatttggtataggtaaaattgtgttttgcatttatttttaatattctaaatgtgaaattttcgcttaacaaagatgtatcgaaattcaagcaatattcccactcaagactaaatgtgaaaacaaatttgaatatgcaatagacttcaagcgatacttccttctaagaaggggggttgaagacatattaaaattcaacgatattctcgaccaatagtttaaaatttagaaaataaaatacaagtaagaaatgaaatgcgactaaagattagtacaagcaataagtaggcactgtatgtttttgagggtaaatagctaagtatattacccccaagtgagctaggaagtttggacgtctccaaattcttggtcacttgtgtgaaacatagcttgtgcaggaaacataaatgtgaatttttgtgtaaatttcttctatttttatttcattgtacccaaaggtttacattaagagagagaatttacaa

SEQ ID NO: 120105 - DNA, 659 bp, Cannabis sativa
  modified_base (628)..(631): a, c, t, g, unknown or other
ataaaaattgaatatctcatctcaaaaaaaaaaaaaaaaaaaaaaattgaatatcttttttaaccctcctatcatgtaagagaaagaaaccaattttagttccaactcaaaaaatatatatatacatatatattgatgtcatcatatgtaagattacacaattattgaagttttggtcgttactctttcccttggttcattatgatccaattaaagaaaattcctatatactcctaaaattgttgtattattttgactgatcaaatcaaaattgtattatgtatatattaaagtgccttgatgataatgtgtcaccaaaacttgagatacccacaaatgattttttttttgtaagaacataataataaaatataatatgtttttgttttgttgataattaatatttgtggcctgatttttggtcctaacagcattaattaacatacctcttggatcagaatgtgacttctttttcccctctttaataaataagaatgggacttttaacccattacgttaaggcactgtccaagttaagaactagcaagtcagcaacttctaaaattaatgctatagtagtatgttaatgtcacattacaaaaaactgttacttttagtgataattttnnnntcacaacataaattttttgtgactgaat

SEQ ID NO: 120106 - DNA, 1903 bp, Cannabis sativa
  modified_base (1836)..(1837): a, c, t, g, unknown or other
ttatgggttggacacattttaactttatataacccaaaccaacccatttcttgaaagatgtttcaaatttaagacaacttatattttatattcacaaaatatatattttacattttcatgcgtaaataaattatattgggataaccttagaacgtgaattaaccaaaacacataactaacatgtagtctatagttactctactacttctaccaacaagcttaatgtgagaatcaatcactattattaactttgctacccacacaatgataccactacaatcttagttttttttaaaagcactatattacacacacacacatataaatatgtatcgttttcttttttatgtatgcactaggttgaataattttatcctgtttgtaacataaatataaagtttataatattcatctcaacccaatgaacccaacccaacccaccccctatattattgtactaagtagggttgggttgtacaataaaaaaaattgaatggtttataccttatccaaaccgcaatcattgggttggcctattaaaatacctctaacccagccaacctagcccatgtgcacccctacctattttacttctctattttctttctttactaccaaatattttcaagttctaaaaaactttaaaaaataaaatataataaataatgattttatgaaaaattcaatgtgagccaaaactttttttatatattttaatgggtaaataacgcataagtactcaaagtttaatgtttgtaagcggcataaactcaatatttatttttagttacataagtacctaatatttgcaaaactataatttttctctaatttcgtcagtacagactctgttattctcttaaacagggcatatacaaggcctaaattttttatcattaggtctagataaaaatatgcagtatcggttacttctaaatgttcttttaataaatttaaaacagagtttttgtactcacgaaataaaaaaaataaataaaattttataaatattagatacttataccgctaaaaaaacgttgtatttatgtggtttacaaacataaaattttgggtcccttatttttaaagattatgagaatatgttggatccggacctaacataagcagattcttagctggcaccgctaacggctaattgggaaggcgacctcccaacggttactactcaccagtcaccacctcccttgatccaacccaactcacatacttcaatatttcaaatctcacctttcttatttaattatttatgatttattaattattaatatttacataaataaaacttaagttcgtgaatccacgcgcatacattttctgttggcttttttgttcttacctaaaataaaatttgtttaaaagcaatctaaaagcatttaaaagtactttatttatttatatttaaaaataaaatttttctatggaacaatattagaaaaggaatgggaataagtgacactacatacactcatttatttatttaaatttaaatatgttcaattaaatcatcgcgtcttatcatgaaatgcaagtgtcaaaaagaataataattcaatgaagaggacgaaaagtaaattaaaataatagtattttttaaaaaaaacctgaacatttagataaaatgctatttttttaaaaaaaaacgttatattagatttgtttatatctatactatttctatctattttttttacaggttttttatttatcaaaattttcataaagttttttctttccttatatgtctgtctttttttttccttctcttaaattagtgttagctaactaagttttttttttgggaaaaaaacagaaaannacaaaaaaggaaaaaaaattataaaaatactttgagccggcccattaaacatttatacagtccaca

SEQ ID NO: 120107 - DNA, 872 bp, Cannabis sativa
tatgtatgcttaatttaattgcttaagacaatataattaataaataatagtaataatgtgtgtatattttctgaattaaaagataataattaataagttaagttgaagcctgctttggttggttgtactctagtctagtggtggtgggtgcttcaatttatgtgtaattaagcttttgtttttcgtttctggtgctccttaaagaccatcaataataatagaccaaagaaaagaaaacagagagaaagagagatgttgggttggggtgggtaccttttattctgttgtcttggacattgttccctccaaatttatgaaacaaagaaaaaaaaaaagaaagtgtttttgagacacctttcaaaatttcagtactagctatcatatcacacgtgtgaacccacatagctactagctagtgtgaagaaaattcaatcttatttattatggtgatgatgatacatgatgtacataatatatatatagatatgatatgtggtgtgcatcatgtatgagaatgaaattgatgagtatgtatagattccagactattactattaggcttgggccaaaatagaagtttatattgttcatactctacaaggtgtttcttttattggctaagttgagttctaaaaggttttctgaccaatggggtagtaagagagagatgggaaattgagtttaagatgaaagaatgaggtgaagttgacctgttgagcgtgtggaaaaagataatgaagtgaaaggtatatgcttttttgaccaacatcttattattttccactttcaacaatactgctaaaaagggtacatacaattttcttatttggtttccattttcatgtatgtgattcattgtgaagtgtagagtt

SEQ ID NO: 120108 - DNA, 966 bp, Cannabis sativa
accccatgattctcaacatggtattagagtcatttcccttgcgggcaagtgatcctatccgatccgcacctatacagatagtgactatattcactctgatacggttcaagattggtaagcgaaaaataaccaccatcttaagagtgaatattgtcccacatagaataaatagtagagaattgagtcatatataaaaacatggactactccactcattaccaattggttttgagataaaatcctataattcagacgtcctccacaagcctacacctagtatatatatatttcaaaatgtgttattagtagtacacaactaaaaaggtcctatatttattagttttttttttattatcataaatatgattttttttcctctatgaactatgtttttttatagagttttgtctctaaaaaattttttttattgtaaaaaatctccataaactatataaattattgcaaatatctatattcaattacattatgctacttttctaaaacaattcatttatatggtaataagttatagatatatataaagagtatttatttaataatttaacctattcaaatataatttattaacattaaacatataaatatcaactctaaaaatatatatatttattctcataattcattcttctatcaaaaaattgtttaaaaaaataaataaaatgtaaccgaatgagatatttacaacaatttttataattcaaaagaattttgcaataaaaaaattagtagacaaaactttataaaagtctttgggacaaatcttaattattcttttttataataaaaagagggtttattaaaaaggagtggataattgtttttttttttttgctaataagtaatttttccaactgaactttgacatgtactaaatcgtgtcccctgaacttttttagctgttaaaaattaccctgaactattaagattgttaaatttaaggacttt

SEQ ID NO: 120109 - DNA, 530 bp, Cannabis sativa
  modified_base (26)..(35): a, c, t, g, unknown or other
ttaaataacatacttgttagtaaatnnnnnnnnnnggtaaaataattccaacactaccactgttggtggtgagctatgggatgacctgtagggtcgcccattgaataacatcagcgagttcaatgaaagagctcaagtggttgttcgaaaagaggaagcaagaaaagagatgaagttattaaagactggctcaggaagaaaattcaacactgtctcgacaaagaccgtctcgaccaaggctgacaatccaggggcctctagttcaaaaaagaaaaataactctaaggagtgagccaaggacaagaaaaaacttgggaaaacatctatgtcgcacatgagcacaaattcaaacaaaaatatagaaaacaaaacccataaatctagaataatataataaaaaaaacaataaaaataatatcttgaaaaatgtaagatttagagagggtttcgtgaggagagaactttttttttataaaaattttgatgagagaacttgaatattgttcattctcaattgaataacagtacaa

SEQ ID NO: 120110 - DNA, 1462 bp, Cannabis sativa
  modified_base (303)..(307): a, c, t, g, unknown or other
gggcacaaaacccaacaggaggaaaatacaagcgatggaaacccctaaaaaactttatgcatgtaattgtttatattgtgaataaaatgcaagcaaacatttacaatttaaagtattataaagcaaagttggccatccaaccttgcaaatatgtccttacaaaaaaaaatgccgctaagggcaaaccactgtctcagccaaagggccattttctaaaagtgaaaggggagataaattaaaaccaattctacaagctaggagacttggacagatctttttcttcctcgacctcgccatcttctnnnnncatcttggtcttctcgcaaagagccaaagttttctcttcctgctcctccaagaagtcggtaaccatattagggttccaaagccaggcccgatatacagtgcaaaaaccaaccttatcgcaccgttctacagtctcagcttctttctcaacaagttttccagtaagcttctcctcaaactcattggcttgggatttgatggtcttctcgacctcttcattggccttctcagcctcctccttcgccttctcagatccctcttatgccttctcggcttcctccttcgttttctcgatttcttgcttgaggcgggtattttactattgggagtcgtccctgtgcttactcacaaccttgcattgtgatagtaacttgtggaccttgccatccaagtactcaagttgctcaaagagtaatcagttggaagcaaaagaagtgaaacaagcctgtagaattgcaaacagatggatatgaaagaggtataaaaaagaataatataattataataacaaagccaacgtaccatgaattggcagtccaagctccttgaaagcatcttttttggactcctaagattgagaaaatccaaattagggggaagaagattttgaagtttgcgccaagaggcgactccatatgtctgggcaaattcagacccagcttcccctgctgcgaccgacagggtctcaatggtctggctcgaagaagcagtagcgggggttgcctcgggacgaggagcattggcgtcggggacaactggaggaggaacttgctcttgaatatcaacgtccaaaacctcgagattgataggctcgaccagtgatttcttcttatgggcagtggttttcctttgcctcttgggagaagccacttcgacagcagaagggactccagggttggatgtccttttcttccccttatggtccatgatctcttcataacccatgtctgcaaaacaagacaaggcattacaataattataaaggtcaattaaaaaggggaggactataattttctacctaaggcatttaccagaatcactagaaggcgagctatcactaaatgaaggtgtagaaagattgtaatatttgctaaaatccctacagcttgtaattttgaatatatcaaaaggctcgattggttctaaatctcagctc

SEQ ID NO: 120111 - DNA, 2585 bp, Cannabis sativa
tttatgtcttctccaacaatttatcattaggcagcattagaacaaattatatgttacttgaaaggagcaccaatcatggacatacccaaattgagtgtttctctgatgtagattggacaagcttcaagatagatagacgatccacttcaggatattgtgtatttgttggggcagtctgatctcttggaaaagtaagaaactaaatgttgtgtttagatccagtattgaatcagaatatagagctatgacacagtttgtgtgtgagataatatggatttaaccgcttttgattgaattcaggtttaagacttttatttcagcaaaattgaggtgttataatcaagttgctcttcatattgcctgaaatcctatgttccacgaacgaacttagcgtaatgagattgattatcattttgttcgtgagaaaattcaacaagacatgatctacataggatatgtgaagaccggagaacaattaggagatatttttacaaaggctttctttagagtgcggattgattatctttgtaacaagctagtcatgattaacatttatgctccaacttgaagggagtgttagaatattagttgtataataattgtaaaagttaaagtaaattgtattttgtaattttctatttgtattagtagtttcctatttagtctttctaaactttttatataaatatatgctattctatgtatacaatccattcacattttatgataacatagttacaatattgtatatgatttctttatattgttcatataattcagttgatcagctttccattgagtaacgacaaactacttatcaatgctggaaagagattgtgaaatttatttttagtaaaactgatccttgttagcgtttgtgtgcctgtctatataaacaaatgagtttttatatttcaaatgaatttttaagtatgaaatgttttgcaattacatcaaaattgaatcaactttatcaagtaaggttgttttatgcttcgaaggagaggcacaatctaataccagaacctttagaatcttaatattggacaactaatgggcgggctgttgagtgtttgctattcatgttcatttgtaattggcactcatatcaatgcttatcaatccgatttttattacaggcagttgagaatatcagaatggaattggcagataaggctgttggagccttgttatcgttaatcagtctctctatattcacttattacacattttgggtcatcatcctggtcagtttttctttgatgtacatgtatcattaacttgctcttgacttgagtcttgactattgcctatgtgttttatactgcagccatttgtagacagtgaccattttatacaacagtacttcttacctcaagaatatgccatattgtttcctgtgtttgctggtgtagtgctcctctgcttcttatccatattcattggattagtgatactcaaatccaaaaagaagaaagcatgatatgaccatttttctcatctttcttctttctgatactggatctacagtacatataggtttttttttttgatatttgaagtacatttaaacatgtttgactgttttctgatcattgttttaggtcagactattgctattgtgagtctgtgatttggttgcagcctattttcttactgatataatatggctttttgttaaaaagatgtaatctgattttgtttctgtactcaatgatatgttagagcattaaattatagcttatcctgtaaaatacttgcaccaatattgtgctaaaagttctaaatttaaattacaatatggtcaatgcaaaatttacatcaatgcattattttttatatttacttttatgctatttttgttagagaaattttatttacaccccacaaaatgataagtatattctaatattttttaaaaaattaagtttaaaataatttttaaaaatgactcttaatataatttttttaaaaaaattcacattattttgtgttaatttcaatacttattttaattttattttgaataaatattatttttgattctgtatttcgcaaaagctataaattggattttcgttttattaaatgacaaaattaactgtatttattaaaattgtacaaataggactctgagcgtaatttttgacaatttttttttttaatataaccaatttgaagacaattcctagtacgaacatatgtagaaaatttaaccagctttgtcatcccacattcaggttggattattattaaatttaattttgacaaaattagtttagggttctatttataccattttgaaaaatacagagtttattttgtcatttaacaaaatagagaatctaatctgtaacttttgtaaaacacggggtccaaaataatatttacccttttatttatatatatatttttaaatcatgtatgatttttttattaaaatttcatatatattttttttattatactaattaaaatataatttatctttgtttaatacgtatatttttaagaatatgaattagaagaaaaaaaattaaaaaaaaaatctagtatagatatatttattttagggatattggcgg

SEQ ID NO: 120112 - DNA, 1008 bp, Cannabis sativa
  modified_base (488)..(504): a, c, t, g, unknown or other
tttcataataagtgaagaataattcattttcattccaaaagtatgcagtttaggttactgaataaaatacatttcaaaaaaaaaaaaaaacatagaataaaatagagtttctttcaatcttctttcttacaaaattaatattctttaatggttgatctatggttggctttgcaatagaccttttaactatcatttaacaaaaagaaacaacgagcataattattatataataaatgagacttaaaaataggacaaaaaggaaattaaataaataaaaacaatgaaaaagataatatgcagagttgattgtgactgcttcataaggagggacaaagtgtgaaaagaaataaaggagaaatcaatccaagacacaacaccaaacaaaccatgagtcgatataattaaaaataattatttgttgatagagtgttagtcacattttatttatttatttgtttttaatagaatttattattattattattatnnnnnnnnnnnnnnnnnttattattattatttttaaatgtatttataagaagtggatgaaaatgataatgcattattattagtgagctaggtgagcgttttgttgtattttctaatgcaagcaattcaccaactaattgcattcgttagctaagcaacttcaagcttggaaggaatgaattattggaacatttagattactataaaagaatcggccaatatcatcatcatgcattatttgaccactattcaagagacccattttatctcaagtatcacctacccttccccgacagatttatttgtttgaatatgtgttttctcagtattgcttatattggtttctctattaatagtacaatctttttttgttagaatattaatggtacaattcaaggttgtacacgggtcgaaatttgaggattacgggcatacggggaaatactgtaagtttgaccgattcacaaatttcaggtccaacaagatatgggtcacaaattttgtttgggaaacttacaaaaa

SEQ ID NO: 120113 - DNA, 924 bp, Cannabis sativa
tttcatcattattgatcttgttattatcttttaggagcataatgtaatttttgcgacagaagtgttgagtctccattttggatctatataattgaaacaattataataaaaacatgccttaatagctcagctatatataaatatataaatatatatttataaattagaagcatataataattttatatagattacatgtgtgaaactcatgaataaaaaactaaaagcttacctgattgattcagaactttaccacccaacttggaaataaaaagtaaataaactactccaaaagcttaattttgatttgtatatatatagagaagagagagtatactaatttttcttttattttaatttggcttgagttatttcttttactcagatttatttgtagtccatttgtaattttgtattatcttttataggtgagaaaaagagaataaattctttccttgctacaataatttatgatttgtaacaatttatcttctatgataattttttgagattagtataacttaataaaatgaatgatagatatgtattaatattaattcaatcaaattaaaaattggtttcatttttttagtattaataaagaaaactcttttgaagattatattatagtaagatatatttgtttatttcttttcagacgtattaatgtagatgttaatggttatttggaaaaaagactaagaaagtgaaatatatataaatatataaattattatttccttggaatatagattttaaaataaaaaatacattaataatattaaaatgaagttatctctttaggttttttcatttttttttaaaaacaaacaaccaaaaaaaaccttcccttttcctagccaaaaatacatacaatatatttgaaaacccgtgtttttgcaaatgtcagttgtatataagaaa

SEQ ID NO: 120114 - DNA, 880 bp, Cannabis sativa
tgacgtggctgcatgcatggaattgatgtgtaagtggtataattgtaataaaagaaagaggaaaggtaaaaatgatgatgtaagcgtgtaggggtttgtttgtaataaattgagtaaattcgatttttgatgtaaaaatttcataaatttatatgtatgtatatattaaaaaaatttatataaaaaatataagttaatactttatttataaaaatacatctacaaggtgtaggtaataattgtctcaaatgagtttttatttaccaaaaataccacttacacatattcaatcatgtcagctcaaaccaccttccagccattatcctttcaaaacccacgaaaaccacctctaagccataacctttgccttctttttcttccaactgcctcctttattagtattttttatatttctttcatttcgtaattgatataatggctattacttctgcttctccatctccattgccaacaaaaacttcaaaaataggtcgtaaatcagttgcagacaatgcgaaagggaaacgcccagtcatcgatgatgatgactctgatttcgctccccccgtggctaaagtgtttgtcattcaatgaagaagaattgaaagtgtctttacctgaaaaaaaaaaattcaacttcgacggctagaagggaaagaagaagtcatcttttagacaattgtgatgaaactgtaatgcaacagttatatctgttgcgagccaactaacataaaactacaaaactaatatttccacaaatttaatacaaattattgacttcaaaaagagattaactgacagcggggtcgtatagatctgatgcttgccacgtgtttgcacaaataaagattaaaaataataaacacacagatttgttata

SEQ ID NO: 120115 - DNA, 1556 bp, Cannabis sativa
atatatatatctaaatcactaaatataaactgactaatgaatttactaataacaccaaaatgaggaggagccgtacgaagactgttggtggtgatgctgagattagtgttagcccaaattgaccatagcaaaacaagggcttccatctttatctctgaaaaaccaaacctgaacaatctgacccatcttcagtctatttttttgaacaacacctctgtaccaatttttgttcaacacataacaaagactgttctcgcctttatatttccacctcgtgagagttaagtcattttcttcttcaaggttgggttgaatgaaccgaaccttaattccttccttctggttgatcttgttcttctcatcatcattgagaaaatcatcagaacttatctgtttcaaaggcatttgaagacgattcaagttgggttgagtatcactttgaaaaagtttcctctgaataaccaatctgagaggagattgttgtggatgatcagggagagtcatagtacggataatttgggaaagttcttcagatattggcggtggagggtctggtccatcaattacgccacctttacacggctcgtgttgtatttgtcgtcgaaacttaacaatgcgatgtcgtttcggggtgctgcttttcaagatgatgttggtttcttcttcaggcaatggcaatggcaatggtggtggtagttgatggtgacgataggaccggatagcaatacgagtagtccggcgtctctttggaatagggagagagagaaagagagctttcctctttctttctttagattccaattctttgattaggtcaatatttctccgcttttctttaatgaaagaagccaaatgatgatgatcataatgatgatcagtaccataatactcgtcataagacagtacctcagagcacacccaagcaagcaattcaatctttttctcattcgtcattttcttcttcatttaagccatttgagtttctttgcaaaccagaaaactaaaaaccctcagaaagtaccctctgcgctataactactgaaagagactagtgaaccctactttgtatcagccctaatatataatctataccaaattcccattttacccttcacgtacaacgttattcttttaggaataggaaatatagaaactaggaaataaataatataattaacaaaaaaggaaataatctagttaccacttcattaattaataatggtttctaacacataaatgtcattataacagagaagatttagaatcaagataccctgtccaaaatttactatcccaaggtgtgtctaaccagtaaaattatgccatatcatttaattgttttttatttaagtttgaacaataaaattaacaggtcatcaaaatctccaggtaaaaagtggtgtctcatattatgttaaatcaattaaaatttaacatgttaattaattttttatttataaaaaaaattaaggggaattatccatgtactatttttttaacttttttttttcaaatttacggtttggatttcaatagtggttgcagcgctagttgca

SEQ ID NO: 120116 - DNA, 1342 bp, Cannabis sativa
ttttatgaatgtgtatatataatatgtaaatgcatcaaactataataaaataaaacaatgaataattgagactttaaataaaaaatatataagtaaaactagtaattgataaaattgtatattaaatatgtacaaaaataatatatattatatataatatatatgttcggtcggttctcggtttaatcggtcggtttgtcattgacactaaaaccgaccatgttaaggtggttttaacctaaggtggttttttcaatgtcagttttttcggtgttcggacggtcggtatattcggtttggttggttttttggattctttgctcactcctaattatatcaatatttcgagctgcaatagaagctgacacgtataataaagttgaaatataaaccatatcaaattatgcatccaaaaatgcatacagataactcgcctcgagaaatacagttagtagaaatactcgaactcgctgttacataagcaactatgagacatgagtaataactactgattgatgagatcagcgaggtgaacaagtctatcttgggataaacataatacataatggcattgtctggaacgggtaacccatatagtcgtgagtatgttagaagaataaagacaacaactttaacattcttcatctcgctcttgacgcgttgaagtaagcgtctcgcctatacttcactcaacatttaaggaaaaatgcgagatgtattacaactacacacttagatatttttccacggagatgtttaaaaaaagagttaattgaatgacgagaataacgaatcacaatcatcataactgtctacaaataaagataaagagcagtgaggcggttatttataatgatctcatgtggatgaaatgaaacgtggggaatgtccacgttccatgagcagttacaaatgatcagatcctaaagaaataactgtcatcctagacttctataactagggacagaactcagggaacaagggacgactaatctttgaaaaaatagataatattgtatttattgttcatttctgaaaaaaaaaacagtttattgtattctgtatataatctttcaactctcaataaaatggattcgtagattataaagatttaatttcaaaactatgtaaaaaaatcctcttgtcatttattgttatccttattataataataatataatttattctgaagatcatttattaccaaaaaaacttataatttagttaacaaaaattcgtattaacaataatatttcatgtaatttttttttatatgtatgtataaggaataattacataatgcattattttttgtaaaaattttatatttttatgtttaaag

SEQ ID NO: 120117 - DNA, 2468 bp, Cannabis sativa
tttaggacataaaacccaacatagacttcatggcgtaagggaattattgaatttcccttttttgttgttatgttggttagagctgtcatggttgcgcttgcctctaatattctcattgttggagaattggtggagatcgtctgtattggccggcacgtcggataacagttggggaaatatgatgtcatgtatctattcaacattgttctgccctcttgtttgggcttgccggacatcttcttccaactttatgaagccattagctcgcttaaggaactccttcatgttgctcgttaagatccttctgatatctttctagaattcactcagcggcaagatacctctgagtatgaccatatattttccttcttctgtcaagcatttaaccttggttgcctcagccatgaacctttgaatacagtctttcaaaggctcatcttgtctatgctttatttcagcaagatcctttaatcgtgaaggtatttgtcttgaagcaaagaactggatatagaactcttgggagaattcttcccaagaattaaatttccctaaggccagcttaaaataccattattggggaatttcagcttgagttgccgaaaagattcaacatcgcacatctttagatacttgttggagatctgtttgtattttaaagtcttttaggtttactaggggatcttctttccccgtgtacagcttccacgttggcattttgaatttgtgcaagggcaaggcattgatgtatgccaagaaggtgagccccttgacctatctagcttaaggtctgatggtttcgggccagccaagcccttaagcatgtctggtattagatccaactgtgcttgcacagaacgatatgttgttgtaggggcctggttgattggcctttcctgattgagctgcagacgtggattggccagagcctggttggccataccatgggagagggtatgttcaaggctggccagccctgagtctggctattgtccatggtcgtccagccctgtactaggcagggcctgccgcccactttttcttgactggctggtggagcctatgtgttgacatggggtagatcacactaatagctagagtttggtggatctaactgtctgaagtgattctattcacttctcaagttgttgttgtcttgggtgtttccacccattcttaggcctcgcgggttaaagattagccttcgggttactcgaacttggatgtcctaggataagaattcaccctattagttggccagaggtgcaccactaaggtgtaggccagcctacggttggccaacagtgggtgttattgtgccagagacccttggtcgagcccttagactaatggtttctagggtttagctgttcttgccaccaaatcttcgtggcaaggcttatcctccttcagattggggaaggtttgtcctagttccaaaagagattggttggacagtttatctgtagaccctccccgatctgtcaattagtctcccttaaagaggatctctaatgagatcctggcctcttctgaaagttctttcattgaactgccttatcaagtcgctagcttctctattacgacggtctaattccacctgataatatcagaggatgtactcttaatcatccatccatctcagaaatttaagtctttgttgtgcgaatgcatcgcagccaatagtgtgtggtttttcaatttggccgacttgacagatggcctctctaagtctggctaaattgagatcttatcccaagtctacatggggctcgctaatagtcaattctctaattcttagccttatctctacagcatgataccgacgaccgaatttggttgtggtacttgggggctgctccacgtgagtccttcctttagtgggaaggggcagcagagagtcctctctaggaggcatgggttgattgtttagacctataggaatggttgtgtcaaactagccaactatggtagccaaattcgtggtgcctgtcaaggtggtaggagtggccacatctctcgggttcatggagattccagtcgtggctagaactttaacactaggattagtcaccatcaggtcttgaggaagacctaataaggctaaagttgtagtcgtagttcttctcatgttaactaagtcatgttatcagataaattgacaactcgctctcaatgaaagtaccaaactgttgacctcaaaatttggccaactgacagcggagtcgtatttaatattgatgattgccacgtgtaacacaataagaataataaagtaaaagagacactagattttatagaggttcggcccattgagttagcgggtaatgacctactccccttttggtagtattgatattagagataatattactcagatcacaagtattgtggaatctgtagtagctctcttaagattacaatgtctgaatcagtaggtaaatctctaatgtgagagagagagagagaga

SEQ ID NO: 120118 - DNA, 1023 bp, Cannabis sativa
tttttcatgtcatgcttctaaatgatatatgtatttgggtttttattatatgcaaccttttatcctatatatttgtatccatccacatatataatctaaataggaaacaattactttaattagcactaaaatagttaataatgataatagtagagtatgtaatatcatgttaattcctcggaggtgtgataatgagtgcagattattatatatgagtggtgataaggtgatttgttctcaaagctacataaattaaacaaagtttttcttatcatcttaattgattttaattttagctttatatatatttaagtttatttagtcctatcaacaaccaaatctccaactaaagctaaaagtaataatagtttataagttcttttcaacatttctatgatcttattctctctttatgattaattatttgattttggttttgtcttggactttttcttttttttggtggaggaatatcgctttcattgtattgagtaaaattacagatatatataataaatattattattattattagtttcatatactaagtgtgtatgattctcttttctttttttctaaaccacataaacattttgtaattataagtgttcatgacacaaatactaattataatgatgattatatttatattattatgaaattagctttaaattacatggttctgttcaccttctcttctccaccactacagatcttacatttcactttagaattggctttttgcattagtcaaaatcagataaagaatgatgctctctatctcactgcaaagcttggttctatttttgctattattatatgtaaatatttaagcctaatttcaattaaacaactctttttttttgaaagttaacaaatttattttcaacaagataaaatttcactaacttaatgcacgtttgatatcataactaaaataatactttttgtttttaaaaacagaaaaaacaatttggcttgtttggccttgttttttgaaaacagttttcagaaaacaaagtt

SEQ ID NO: 120119 - DNA, 647 bp, Cannabis sativa
tctctctctctctctctccttacaaatgaacaaaagatattctttaaaattttcctaatacaagacctacttgattattgttttctaaaaattgcttttaattaaaattttctttacaataaaaaaattactttaatactccacacctcaacatgatccctaccccctcccaaaaccttggccccaaacctcgaataacaattgggtacctatgaaccaacccgaacacggcacaagccctgagtatagcctttgacccgggtcccgactccatccccaaacttaagacctagtctcagatcttggacctagacctagacctgtgacagtcagaaaatgatgagaagaaaatatgtagaaagtttaaaaaagaaaataacaaaaaacaaacatttgttttgttgtttaaaaattttcttttttaaccttgttttgtgaaaattgcatgttttgtgaaaacaatatcaaacatagttctcaaagaatagttttctaattaaaaaaaaaaaaacattttttctaattataatgccaaataactacaggcccgtttggcatagcttttagaaaagctaaaagctgctttttgaaaaagctatgataaaaatgtgtttggcaaacagtcaaaaaacagttttttgaagaat

SEQ ID NO: 120120 - DNA, 2006 bp, Cannabis sativa
ttttgatagtttaaccagatgaacattttcattaattccgtaataataatttttttttaattattgttacaaaatatagtagtaatttttgtgtctttatttaagtcactattacgctttcaaatttccataattatcacgacattgaatattattaattgtaaaattataatattaacaaaaactaaaaattaaaataaaattaacatacgtgacttggtacgtaacatcaatctagtacatatgaatatgtatatagtgtgtgttagtatatgagcaagattatggtaagacctagtaaaagttccctaccagtagggaactttttttcaccattgattttagatcatgtagttattatgatgtaaggtgtatactcttacgatagggctgcttgtatacaattaaaactttctacatattataataatatttaatgatatttattttttcaagaaaataaaataatattactaattaaaaattttattaatttttattttgaattattattatttttgtaaagttaatttgaattatttttatatttgtatttattttcaaaatataattgcttctcctaaacttaattgtgttggcttctcattttttggctttccataatttaatgttgttcttttttttttttaatgtttacatctagtattttctttgttttgcttttaggttgtgcgtagttttggtgttattgactgttttgtttagtgttctagtttttatcttgttgttgtttggctgcacttttaagatgccacttataaaaaaaaataattaagtgggttagatattaatttccttgccaaaaaaattagtttaggagaagtaacttagtacggtaccaattaaagatcatctaaaatcattcaagtgatcctacattagaaaattttttgaaaataaatatctatataaaaatttacattaattttagaaaataatagtaataattaaaataaaaactattaaatttttaaaatattaatattattttattttttaaaaataaatatattattatatatatgaatataagtttgtgtgtgtatatatatttaaataagataactttatatgcatttgtatatacaagtagatgttcttttgctgactttgttttttttttttcaaattcgttcttttactgcatcggatcgctgctgcccactagaatttctataataatctttttgcaattcaaaggtttgtaattatttttatatttcttatattagaaaacacatagtagtttaatatatgtatcatcatatagaagagtttgaatatcttaaatatttatctgtagtacgatgggtggattatttttttatgcacatattattttgcactgatttcttaatgtttctgtaggttataaaattttgggtttatgattttttaagctgttatgctgttgaaattttgataaaaataatacaataagaaattaagtgaaactaatttttttataaatagagtaataacatttatatttttttaaaaaataaaaatataaaaaaatttaaagttagaaattgaaatgaaaaaataatttaaaaaattaataattgaatattttaattaattaattaaaatgtttttttataaattaaataaataatctatgtaataagtgtttaatttttaaagtagaatagtaaaatttatatttttaaaaattaaataattattaaatatattgttagactaattaatcaatcaaaaaataatgaagtatacaatgtgaaatattttgttttctaacgcttttcataataatattttcgtaatacgtacattcaaattttattttttaaaaataagacaataaaattaactatgttgatattttaacatagatgacaatcgataagagttgggtatttttacgggatcgcactgatcctgcttactagagaggtatcttagccttttcagaagtggctgaacaacacaagggctctgtgcttgtaacaccctaactacct

SEQ ID NO: 120121 - DNA, 2247 bp, Cannabis sativa
attataacaatggataattgagagcgttctatatgactgagagtgcagttaagttctatggtggatgcaataagaaattattcttatcgcataacacgtggcaagcatcagcatcaaatacgactctgctgtcagttagccaaaatttgaggtcaacaacttaaattaaatttttgaaaaatgtatttaattttaaatacattagattttcaaaaattattaatatatttttttaaaaaaattgagttgaaaattaatttttaattaattttatactaacttaaattaaataatttttttaatgtttatttaaaatatatatatattaaggatgaaagataaattatttatttcaaatcaatctaagtgaatattttaataaaaattaaattaaaacttatatttaattaatttaaatttgtaattttaataaaacaagtgtataaatattataaataatagactaaaataaaaatacacatttttctttcaaaataatgcattaatatgagacaatctctattgttggtcttacatggttattgattttaatgagatcttgcggcgctaggtgtcccactaatggagatgggtatcgaatgatgaggatcaacttgcagagatagacgatgggttccaaagaaaaagcttggaggaagcttgggtgttggacttgtattgagattgtaaagaaatgaactaatcacaaaagcatcaacatcttagactcaagcctaaattgacataaacatactctctttaaccaacacacacaagaaactcgaaactcaacaaggaagccaccaagccaggatccaccactgcggaccatcccacaagagacccaccaaaaaaatcgataaaacaccagacttgagatgattcgaggtagaagaaaaagccctcacccaacgactcacgtcagatgcagtacccaagtaatttcacacaagaaaatcgacaaaaacccactattcagaagccaacacaaaccaatcaaagaaaatttcaaatccatcaagaccaacccaagatcgaagaagacaagcttgataaccaccaccataaaaatcattcccacagtgtaaatcatcactccctcgaccatggccgcaaccaggcccaggaaaggactggtgaccttggccgaatagggagaaaaaatcgtgtggcagcagtaaggaaaaaacctaaagaggaaaccctaagagagaaaaagatttgttttttttttttggcttttgtaatatatggatatttcacagtctaaatctttttttttttaactaacttcccaattttgtggcattattttttcctttgctacttttagaaattctattaattttcctcatatatttgcaaaatagtttttttttagggagaagttgaaaaatatcttttttttatatacgttaatcaaatttacctccagataaaatttaattcaaagatacctctttttatgagtattgtacctaaattatcctcacacactcacctaattaagacataattccaaaaataatagatttgtgtgctttgtagatagatgtgtagatttgtgggaaagttgtggcaaaattttgactaaagaagaatgaaaactatcgtgaagtgatagaggtaaaattggtagaatagttaaaaaaacaggtaaatataatagattttaaaaaagagggtgaaaattaaaggcatcaagttaaacgaggtatgtaatataattttctcattattttatgtgtttggcccaaatttctcatattcacgtctatttttccgtagagaaattatagtaaatgaccttaaatcataggattatcttaataaatgcccctatttcaaaatttgtagcaaaatgtctatttttttagattatttattatttatattgtcttttgtcacataagaaaatgaataattttttttttcatattttgtttttagaattagaaagaaattacttaaagattatggtatatctatattagttttgttaaaatcttttttatttgaaagttatgttaattttttttaattttttatgagttgttgtgggttgttggtatataaattttgttatacagtatatttttattttattgtatattataatattattcttagataatatttatttttattttgctataaataatagtggtatataattttgttagcataatataaatattttaatatatgtatataattttattgacatgctacatatatttaattatt

SEQ ID NO: 120122 - DNA, 2447 bp, Cannabis sativa
actgtagcgtgccttagcattagggtgttacaatggcatactttaccccatcctttcccgttggtaaggacccgatgagatctatcccccaaatcgcgaagggccaggggctagtcatcaaggtaatttcattaggtggggctcttggtatgtttgcgaacctttggcatgaatcacactttaggacatagtctacacaatctttcttcatcgttggccaaaaatatccttgtctcaatattttctttaagagactcagacctccagtgtggtctccacagaacccctcatggacctcccgcatgatccgtctaacttcagggtctgacacacaccttaagtatggcatgctgatccctctctgataaaggacattatccatcatcacgtatcgatgagcttgatactgtaacttcctggatgcagccctttcttgaggcaattctccttgtgttatgtacctaatgacgggatccatccaacttagctcttgctcattagcagctaccgtctctttgattttcatgcttggtttcgtaagatgctcaacaagtactaccccagtctttttattttgctgtccgaagctagcttagccaagcagtctacctaagcattcttctctcgtggaattctttctactttgtattctttaaattcgtggagcagttctttgacattcgctacataagcgaccattttctcctcgcatttggtactctcccaatacttggttgatcaccaattgagaatcactgaagacttctactctctcagcccttacgactttggccagcctcagccttgcaattaaagcttcgtgttggcttcattgtttgtggccgagaatgagaagcatagggcggcctggagctggagtccatctggtgatatcattgctattctggcaccagatccactttcatttgatgccccgtcgacgtacactttccacgccggcatcttctgggatggcatactggtgttggcctttgcttcgttacattttacgatgaagtctaccagtgcctgaccctttatggagatgcgcaaaacatactgtatatcgaactggcttaactccatggcccatttgaggagtctccctgaggcctcaggtttctgcaagacctgtcggagtgggtgctttgtaagtactttgatggaatgggcctggaagtatggccttagctttcttaaggctaacaagaggcaaaaagctatctttacaatcaagggataccgagtttcatcccctatcatgaatttgctaacatagtatactgggtgttgaactttttcttcttcccggaccaaggccgcactgacagcgttctcgaagatggccaaatacaaaaacaagtcttctttgtgaaccggctttgatagtattggtggcttggccatgcgttctttcaattttctgaatgcctcctcacattcttcagtccattcaaatttttgacatttcttcaaaatattgaagaaagggatgcatttgtcggtcgatcaggagatgaatcgacttagggcgggaactttcccagtcaagctctatacatccttgtgttttttctgggaaggcatgttcaacaaggcctgtattttctagggttttgcctctattctgcgttgactaactataaatcctagaaatttccccaatttgatgttgaaggtgcattttttgggattaagtttcatcccatatctccagaccacttcgaagcactccgtgaaggtcatctgcatgggccatgcacattttggatttaactagcatgtcgtctacgtatacctccatgtttctttccaggaggcctttaaacatccgttgataggttgcttcggcattttttaatccaaaaggcatgactaggtagcagtatacccccttgtcagtcctgaagctagtacattcctgatctgcaacatgcattttaatttggttgtacccggagtaggcatctatgaaggatagcaacttaaatcctgaggtggcatccaccatttgatcaattcgaggcaagaggaagtagtccttcgggcaggccttgttaaggtcagtgaaggatatgtagactcaccacattctgtgtagtttgggcatcaacaccggattggctagccactttgggtaatacacatcccggatgaggccattggtcatcaacttatccacctcttgctctaaggcgttggcctttattgggtcgaaacgacgtctttttttttttgtatcaaagggatatctgggttgacattcaggacatgggtgagcacgtgggggcttattctggttatatccccttgataccacgtaaagacatccgtggttgcctttaacgtatcaatgatcttgcttctttcctctggttctaggttttttcctagacggataattttagtggagtcgaggtcgcatgtaacaccctaattagcatagg

SEQ ID NO: 120123 - DNA, 1173 bp, Cannabis sativa
cgacgattccatttttttctgtagtgctaatgctaaaaatgcgggtaccctgctgaattgtcttcacaaatattaaagttggttgggacaaagagttagtaaagcaaagagtggagtggtgtttttccctaatactagccgtgtttgtagagaggaaaacaaagggattttgggtatcaataacctgaatcccaaagagaaataccttggaaaccccttcttcttcactgctaaaaggagggacaactatcttttcttgaaggacaaaattctgggaaagttggaaggatgaaaagctaagcaactatctcaagcagggagaacaactttggtaagttggattcttcaaagtatacccaattattttatgtctacagtgcaagttcctagtaccttgtgtgaggagttggatcgggtggtggctaagttttggtgggttggtagtgtggaaaaaaagcactattgtgcgttgagaagttggagcgaattatgtcaatcgaagagatgtggggggctcgggtttagaagatttaaggacatgaatgtggcccttttggctaaactttgttggatgattttggaagagaaggataaggtttgggtgaaactctttagagataagtattgtaaaaacaatgatgtgtggactatggagaaaaatggaagtgactcgagatgttggaaagcagatatgcatccacggttgaagcatttctgctggaggatgtttggcgatatactccccaccagaagcaatctcagattcctgcattcaaattaccaaatatgtgtcttttgccactctgaagtggagactgctttccacctattttgccagtgtcattgtactcgggcaatttggtttaggactgacatcagaatttaggagggccattggggcaatttgattgagtttggccaatggtggtgtaatctgaatgatacagatatgcaggtgacgattgcgatgttgtgtgattcaatttggaattggcgcaatgattgtgtctttaataggcaaacagatgatttggaggagatgtacaaaaaattcactcttcggacaagggatttcgttttcaaagagaatttggtttgagcaatgtgaagagaaacgcatagataaactattggaaattattttaccaggatcttagatctacttacaagtat

SEQ ID NO: 120124 - DNA, 1944 bp, Cannabis sativa
  modified_base (1627)..(1637): a, c, t, g, unknown or other
atcagattgtaaagagttttatgtagggcataaaacccaacatgtacttcttttacttttgtgggcgagttcatgtccaaaagggcttggatcttatctgattttctttgattcctcaggcatttactatgaagccaaggaacttgcttgagcctacttcaaaagaacacttaagtggattgagttttttgatgttgtactctcgaaggatcttgaatcatttatttaagtcttctatatgccccagcctttttggacttaacaaacatgtcattcacatatacctccatgttatggccgattaggtccttgaacattttgtttataatcctttgataagtagcacttgcgtttcaatccaaaaggcataactttgtagcagtataagcctacatctatcaagaaacttgtattttcttggcctggtggatgcattttgatttgattataacctgaataagcgtccattgagcttacgatctcatgaccagctgcagcatctactagctcattgatccttagaaaatgagaaatagtcatatggacaagaattattcaagtcagtaaaatctatgcatactctcacttgttgtttggtttaggcaccaagacagatagaatgcttcaatgatgaagccattggcttttagcttttcaacttcttcttttagagcttgtgcttcctctttatccagctacctcttttttttcatagtcatattctaaactatgagtatcaataaatagaaatcaaataaagttcaataaaaaaaaatacacattcagaaattattaagcacttagaaagtaggaatgacaagtgaaaatacaaaaacaaacaatcctaaataattttcaaggtttccaataaactgatacagtgtcccatctaggcgagaatcaaagatatcattcattgaatagagcagtcagctcatctaaaatggaaactattctagtaaccttatatttgatcaagatgagaatctagcgttgtcccgtttaggcgagagtcaagaccattctatcttaagagcttctaccattgtttcatactttgtaagtcttactcttagcagccactatttggatagacgttactaagaataaaatactgacaataatacttatctttcgagattctacaacgttgaattactaattaacgtccatctattggggatgaatctcactaaaacaaaaactatgtagaaccaacaatggagatcgaatatcctcttaataaagctcattatttaaagtgtatttttatctaatatttattttaatctatttatattaatatatattatctaattaaaattaccaatttagaaaaaaaaaaactctaaatataaattttaattgaatatttaccaaattatacttagatcaatttaaaaaaaattattttccatcttagtaataattctcaataaatattacgaaattacttgatttaagttggtcccaaattaattaaaattaatttccaactcaaatttaattttctataaatatataaggcaaaatttgaaatctaatgtatttaaaaaaaaatacatttttgaaatttacatcaaataaaataaaataaattctaaaaaaaattattctaatttatgtnnnnnnnnnnntaattaaaaaaattaattttaaacataaatataatttttttttatttaattaaacttctaagaaaaatatcaaatgtttaagcatcttgaataatatcaacttaaatattaattttctatttatttaaatataactagaaaaataccacaagtatacagaaaataactatctagatattttattaactaattagttaatttttaattataataaaatatattttagtctatttattttaataaatcattaatgaaaaatttacttgatttaagttggtctaaaattaattaaaattcattttcaact

SEQ ID NO: 120125 - DNA, 848 bp, Cannabis sativa
agataaatcaataatggaagccggacccgccgggatagacctatttactaaaaagctataatacattaaaaaaaaaacaaaaaagaggctacctacttgcaccacgtgaatctcattcgatgatttgatttgattagtaattaattatttatacctaatattgttggatgtgctcatcattcatacctaaaacaaagcttaatacataattgcccaatccatcgaatattttgtggaaatacatgaatgattagtcttgtatagacttcatttgataattatcaatttataaattttttagaaaatgttaaataatttataatattaaaaataaaatttatgtattttatcacatgcgtgattatatatatttttttaaatatataactgttaaaattacatgcgagtaaaggtcgattatatgtgatcagtaactagttttatcttcaacttgtatcaatattaagttttggttatttttttaatataacctactcaaaaataatttttatttgtactattttaaaaaacaaaacatttatttttattatttatatataaatatatgtattaacatatatttatatataaatatataatcactattttagcggtggatgtcaatggtacattttaattattttcatcaagggtatttttcaattagaatgtattaactcatataaaaaaaaaaaacaattttaaagcatataaaaattacaataaatattgttttagaccttgtgttttataaaaattattgattgaaccttctattatgttaaataataaaatagaccctatattttttaaaatagtacaagtaagatcttgaactgtttttttgt

SEQ ID NO: 120126 - DNA, 585 bp, Cannabis sativa
aaaaaaaaaaaaaaaaacaagtggtttaaatttgcctattacaccgaacataagaatatatgtgtaaaagtcatgtcaattactgagttcgaggcaaaaacatcaaatttagtaactcttcttcaaatcttagtagcatatgtgaagttatgatttctgtatttcttgtatttttatgatcatagagtatctatgaacttgatgagcacccttaaactaatggaagagctgctttcattattatttataatgctttatatttacaacttatatgattttatttattatttaacatttacactagttttttattactaaagtattaccaaccaaataaatatgaatttgtacaaagtattcattatactagttttataagatatattatacattaattttaaaaactataataatatatatttatataaaattaaatggaatcgaaaaaagaaatctagcatctcttccaattgcctaagcattacttattcctgtttcatctactgacctttctctataaaaacttccttacctttatttggtttcatattacttgcccccaatctatagttgtagctgatgtct

SEQ ID NO: 120127 - DNA, 594 bp, Cannabis sativa
aaaaaaaagataatttatgcacactcctagttaagtaagtccttagcacttctctgaatccgggtcccaacactataatttcctccttaggtgatactataaaccatacaatatacactcaaattatttacgtaattacatttaagtagactcttaatcttagtaatcattttccaaagagtccatccgctcgtattaaaatatggagtcattttaaaaggttggtgtaattttccattatctgtcactcgaccttttcactctactttcccagaaattgtcatcttcaaagaacactaattattaccctttatgttatttcggaaaaaccgctagttgttctttttccaaaaattttatctcaattttctcatgtccattaattaaatgggcccacagcccactaaatatttatgttaaaattcactactacagtactactataggaatttaacttaaagcccaaaattgcaaaaatcccttaaggtgcctatttaccacttcacacaaaattatgagaaaattaaactctataatctttttatattgtcctcttttatttttaccctatttttcaaagtctatcatttttac

SEQ ID NO: 120128 - DNA, 1574 bp, Cannabis sativa
  modified_base (1479)..(1479): a, c, t, g, unknown or other
aatagacaaggcaatggaaagaaaatcaagttcaatggcaactccaaacaacttcctatggagaatgtctcaaaattcactactttcttagtcctaaaagaaaacataaaaacaatctacgcaactacccaatctatggtgtcatataagaaacccaatcccatgaataaggacataagcaaaagagacacaaccaagctctgtcattttcatgcggactaaaaccatgatacaaatgaatgtaataatttgaagcaggagatcaatttcctaattagaaaaaataacctgcacttacaaaagtatatcaaggctgactaagaataaagggtcgcccaggcagataataaccaaaactagctaatgcctccaccagtggatggacatcttcaggttatcattgggggccctcatctcgctggagacttgagcaaagctagagaaaagtatatctgagccttgcaatatgaataaaatgatgcagtccttgctgtggaagagagaaagcccaaattaccacgttttggagaaccaatcataacattgactgaatctaattctagccacgtcatttttctgcacaacaaccctttggttgttgaggtgcagattgcaaacaaaatggtggcatgcactatggtggacaacgaagcttcctcaaatattttattcaagaccacatatgaataaatggggctccagcttaaagatttggttccttacactcatctagtctacgggttctctagccagagcatagcctcgcttggatagattcgcctaccacttacaatgggacaagctctgacaagcataacggtaatggcacaattcttaatgatgatgtcctttcaacttttaacatcatgttaggctgaccagccctatatgacttataagctatcacatcaatatttcacttgtgcgttaagttcccaactaaaagtggagtgggttgtctaaagggaaattcaaggattgcataagaatattataaccttgctctatctaaggtcaaaaagtaaaattcttccgattagagtttagagaaggggaaaagcattgcccaataggaattttcccaaggcagggacgaagatatggatctccgacttggtgaaaaaaatgcaaatgttatgctagtagaagaattagaagaagtaaacattaatccagccatcccaaccacgaagcttaaaattagtaaaggcttattgcttgaaataaaattagccttactaaaatttctaagagcaaacctagagtttttttgcctggtcacatgagaatatggtaagaactgactccactgtcatgtctcatgctctaaatattgatctagatttcagtcccgtccagtaaaaaatgaggttgttggacaaagagcatgatcaagcactgaaagaaaaggatggacatgaaatcgtaagctttataggtgcctattcagggtattattggaattattttaccaagatntagatttactaccatgtatgttgcattaacatcctaatataaatttctaaaacaatgaaataaacacataaaagttattagaaaccttacagtgg

SEQ ID NO: 120129 - DNA, 1089 bp, Cannabis sativa
  modified_base (958)..(972): a, c, t, g, unknown or other
agagaagaaatacttcttgtgctctcctccgggagacatctccctgagatactttcctttcgcctaggacttagtcgattttttgtgtgttgatcctcacagatccacgtgtcagccttatccaggtccacgtatttaaggagaaaataagggcaacagtggtaatataggttagatatatcttttgaagaaaaaagaaaaaatatttatatacatacttatattaaaattctataatttttaataaaaagttgtattttgttttgctaaaagttgttagttgtgatatcacacctttttcatatgcagtagtaaagattagagaagtactttttgactaataattcaacttggtaattttttattccaaaagctaatatgcacaaatatagcattttcttgattttattatattactataaacaatagcttggtatagcaaggctctgtcattgttagctagaagacactaattttattgccaaaaacgatctacaagcacgtgacttgagcatatttaattaaatccaattatttgcctaatcaagtgtactcattacttatgaatcaaaataatttaaaatttgtacattccattatttcttttgtaatttattaaactcggcctttccataagaatcaaacaaaatatttctaatcaaatatttatttattttagaataatccaaatattgtgctatgggtaataatatgtgcatacaaaataaatactactgaagttttttcttaatccatcaattacatctaattaagacataactcacactttaaaagagtattctcaccttattgaatgtagtattataatacatattttatattttatggcacatataattactattttattattaacttcattctactatattaccattttaattttattctaccaaacaaaacctaatttagaggatttattattattattattatnnnnnnnnnnnnnnntattattattattatttgaaatggttattcttttttgtttattgtgtacaggttaaacatgtgagtaggggtgggcaatatctaatctaatccaattgaattcaaccgatccaatcc

SEQ ID NO: 120130 - DNA, 2048 bp, Cannabis sativa
aaataattttcataaataatcatgattaattgctaatttccaaattaaactaagcagtctttatacacacctaactatactaacaattaatacctatctaaattagtgaagatgccgactagtattcacaataatacaacacgggatcatggtttcactattacatttgtgattttattttctttattccaatcaaaatatttgtgaattctttattaataacctttgaaacaaaactcaacatttttgtaacaatcaagtacaacaaatcattacattaatttcatgattttgatatagaagaatgctcataaatagtaggaatcaaatacaaatcatcttttctcctcattgtaagaccaaataattctgtcatatccaaattttcatggttcattccattgggaagtttccaatcaaaatggtataacaaatatgctagtgaaagctcaatattaataacaccaaataacatgcctggacatattctccttccaccaccaaatggaatgtactcaaaattgttgcccttaaaatcaatagagctttccataaacctctctggcataaaattctcaggttcaatccaatactttggatctcttccaattgcccaagcatttactattactcttgttttcttaggtatctcataaccatcaatgtcacatttttctgtactttcccttggaagtaacaaaggagctggaggatgcaaccttagagtttctttaacaactaattttaagtatttcatctcattgattaatgattcattcactgacccttttgtaccaataatttttctcacctcttcttgagcctttttcatcacttttggatttctcatcatttctaccatagcccaatctacagataaagatgttgtttcacttccagccacaaagatatcctgaaataaagttaatatttctcacttcattattttccaataaaaacatatagatcatatttaactttagaaaatgagtgattactagaatttgatcatttttacaattgtgttctaatgcagaaaatataattcaattcataatttcagcatagttattaattaattcttttttggaaacatatataaaaaaatgtgtgatttattatgttgtaaaaaatttggcctatttcatataatttatgtcatattttgtataattttgaataccctattacacctaattaattaaagaaattattaaaaaaaattctaagaactcacatataatttttgttaactgttgaatacaaataatatttatgatacttacccctagactaaacatgtaagtttttcttttacaaaggtgtcaaataactatattgagaataaaaaaaaatttacagttattattttattatatattttttttcttaataatgaaattttaataaaaaaaataaattaaaatattattattactaattaaataagattagattgaatgataaaaatacttcctttaaccattatatatgataagaaaaaagttaatatcgttttgaatattatattttacaaaattacagattagaccttctattttattaaattacattttgaaccctatattttttaaaataaaacaaaatagaccctaaacttaatttttcgttatttttttttaatataacaacatgaaacttttttttagcacgaacaaatgcaaaaaaaattgtaattattcttgtcataataccttcaagacaggttattattaagttttaatttgacaaaaattaagctcacgatctattttgtacaattttgaagaacacaaggtttgaattgtcatttaacaaaacagatggtccaattgaaaaaatttacaaaacacaagcccaaaataatatttaccctaaaaaaactaattttgtcataattaataaaagtgatatgaataaacttatttatacaatatagaacaatatataaaatgattcctaagagtgcgtttggaaagccacaatgtaattggatttgtgtgtaattacacaatttggcatgtttgtctgaccatgtaattacactg

SEQ ID NO: 120131 - DNA, 954 bp, Cannabis sativa
  modified_base (859)..(871): a, c, t, g, unknown or other
  modified_base (899)..(899): a, c, t, g, unknown or other
agggcataaaacccaacatagagcccagccgtggaatgaggtaaacgattctaaatctggctcttcatcctcacaaagtcgcactcctagtgtttacaccaggttatgttcagtagagacaccgcaaggaggaaggtaccaagttcgcaggggtgatcttcgtgatcaccttaacgcagtatttagggcgcggtcctagatgccccgaaatcacgaggagccccgtgatccccagttggacgatcagggcataaataatattactaacccgcctaatgcaccagctgcgaccactgaagtagttatcccagcaaatatagttgcagtaacaactgcacctacgacgactcagaacaacgccatcctgccagggggtgttgatcagaatattctattacaagcacgaaaaataatcgagtagtagagaaagcccatttacaagttgcatggaacttctctctttaccacagaagaatgacaagcccggttgcctaaaggatttagattatctgaatcattgaagtataaaggtaccactaatcccatagactacttagaaaaatttaacacgattctggaagtggatcaggtacctcagcttgcgaaatgtcgcatccttgcggcaaccttggaggataatgcccacgattggtttagccaattgcctgaagcgtctatatcgacatgggaaaccttcgttgacctcttcctcacacatttccaaaccacgatgacgtataggttgccttatactactttggctaacatcaagcaagaggtcggtgagtcgttgcaagattattttaaacgttttaacgctgaagtaactaaggtagagaatgttgggttttgtgccctnnnnnnnnnnnnnttcaatataatcaaatttactagttaanaaagatcagaaataatattttatgttgcatggttcacatgagttatttcatgatt

SEQ ID NO: 120132 - DNA, 1694 bp, Cannabis sativa
ctcccaaccaaacgcctcctaagatcaactaggtgatatggacttagaaatatataacggtatgtgtaggatatctttaccaagttcaatattggtccaatcaagtgtatactccatacatctgatactatcatactttaccaataccctagaaaggacataacacttgtccaatgtaagtaaactttatcgttgattatcacatcagtataaatcctgtgcactgatgaatcatgggacatacgctttgaaatataatcacaataccttctactgtgatgacatcactgtaattgtgaataacaatatgttcttgatttatcaaaaattttatattaaaccataatcatgaaaataacatgttaacttaaatgaattataatcttttattgataacaaataagactatattgaaataggttttatttagggcataaaatctcaacaaccttggccctagggcaactcaaagccttgcctaaaggccctccaactagatctttgagcttcgaagccatatttgtaaaaataaagtaacaaagttacaaatattcaatacaagaaaaaagtaggtgcaaaaaactatcaactaccatcatcctcagaagaggagtcatctgaatcattagcggctgccttgcccttgcatttaaatgtaggcgaggggagagtgagcctaatagatttctagctctaggcttgattagtagtgttgcgtccccaacggtgcctccacgagctaggtgttagctggccagcttccatgagaagaccccatggctgaccaggtcttgaacaagacccctatggccgacaaaggtgtgttatagatcaaatgtgtgttttccaagaactcaaacatggtcttcgtgttcttcgtgaatcaaagagtcaagaatcacaacgaaggtcaaaatcaaatctttttcatcaagaaatcacacatgatacatcctaaaactatcatgcagatcaaaatactaaaaagattacaatctaacgtgggaattagaaaattttcaaagagaataaaagcttcaaaaaaaaccatggcaaaattaaacaaacaagtgaagaacatgatttgaaagcttacccactactagaaaatgttgatgaagaagatgggaagttggaatcgtcaaaatgacgcgaaaatcctgagagacagagctctatggggcatcagtctctagagagaaggaggaactttcaaaagttgctttttgtagagagagattgaaatgttgaaaatgagaagtgagttcaccccatgagcttatatagcttctatgggaccccttctcacttgccatgcagcatgtaactaaaaacatgtagaagagtaatgttgttaacatactgctaaggaatgtgatcagacagtcaagaacaagtattccaaaggctaaatatattgcaagatctatccgattaaggctacatcagacccgattaagctgaaaagtccctatctgcacaaacgtccacacagggacaagggaaaaatattatcccaatttttcccacctaacgtgacatgtccacgtggccaaatcaataccacgtgagaaggttaagccatctactcagcacttcaaccaatgaggggttcgagtactaaggagggatgatgaaatgacaaaccagccacctcaagggggctagctagctacccctggccgaccctatgg

SEQ ID NO: 120133 - DNA, 1935 bp, Cannabis sativa
ataaactgcttctgatttagagatctagggaggaagacttagttgatagtatttcactatcgaattgaagtaattgttgtggatcgaattgagaaaatcgctatggatcaatcaggtaggcatacctaattattatatattattattgtgttctatgttatatacagattgatcttggatttattattaatttatctaacatcttctactaatgaagatattagtgaggaagttggaagtacaatacatttaaataagatagtagaaaaaactaaattaggtatgtattttgattcatttgaagacatgtatatatactacaaaaaatatagaagataagaaggttttggtgtgaaaatgaaaacaagtcgcaattcattatctagtaaagtgaagtttgtttgtatttcatgttctcgagctagaaaaccacaacacatgaaacaaaattttcttacccctaatctacagacaaaaacggattgcaaagcaaaaattaatactactttgtatgaagatagaaaatacgtgataaattctgtcatgctcgaacataatcatggtttaagtcccataaatcacgatcctatacatgcaacagagaaatatgtataggagctcaaagaaagttaaagttaaatgattgtgctggggttagtgtggcaaatttttatcaaacatttgtagtttaagctggaggtcatgataacgttctattcttagaaaaagattgcagaaattttgttgataaagctaaacgtttacgattgggggtaggagatgctaaagcaatccatgattattttatgagtatgcaagctaagaattctggcttcttttaaatgatgaatttagataatgatgggtaaataaaaaatatattttgggcaaatactaggagtagaggattatatgaagagtttggtgatgtagttacgtttgacacaacatacttgacaaataaatatgatttgccatttgcaccatttgtaggagttaaccatcataaacattctattttattagggtgtgggttgttatcaaatgaggatactagtacatttatttggttgttcaaaatatggtttatatgtatgaatgaatgtgcaccaaaggctataatcacagatcaagccaaagcaattgaaaatgctatagaagttgtgttttccaagactcggcatcgttggtgtttatggtatataatgaagaagatacctgaaaagttggggggatacaaaacatatgaacatataacgaatatcttgaaaaatgtggtctatgattccttaacaatagaagagtttgaagaaaaatagaggcattttctcaatgaatttaatgtttcaaagaatgagtggttaagtgatttatataagaagaagatgatgaatttatagagagaaatttatatgaaaaaaatgagaagatgttaccactacatatataagaatattcaatttatgtatagaataaatttgttttgaatatcttttctgtctcttcgataggtagtttggatcaacatttaaagttgttttgaatatccaagggtctccttttctgtctcttcgctgggtagtttggattaacatttaaatgatggcagattatattagggtcgatccctatcatatctccatggctccaggcgaattgatcttggtttgccttcaaaaaacttattagctgctatttgagctgctcgtccaggttcttcccgatgtatacacaccttgtgggatttcccgagtcgagaataacctcttctaattcctcaattggtttcataggtttctctcatcatgaactcgggggtcaagatcttcgtatgctgcacctcaatgcgatagcaatcgcgagctacatctggtcgccacgtaccactcccacgccttcttgtgtttggaatttcaaggataggtgcttgatcga

SEQ ID NO: 120134 - DNA, 608 bp, Cannabis sativa
ttttttaactaatagtaatagagttaatattagtactattaaattgggtccctaacaccttaaaacatcacttttaaattttctagttccttatataaaatatttataaaaattaaaacttatcatattttctagttcccacctatcttagtctggctccgcccctgcttacgtggcatgttttcgtgctaagaaatttgtattttcgtgtcgtgctcaagcctatatttttcatgtcgtttctgggttcatatttattcggtactgggttaaagtccatattttttcgtgtcgtattgtacttacctgtgctcataccaattttgtgtcgtgccaaaaaatccaatctgaatgtacatctttatacatagcatagcaaatactataaaataatttaaaaacgaaaaaaaggccataaaaaatgaccaaatttaaaaccattaataagtaaaccatttttaaatgtaaattcttaatttcattttcaccccactaattgttatatatataccacatatactgtttttttattttttttttttaatttacggtttgggtttctaaagtggttgcagtgctagttgtaataggggtttctatacgatttt

SEQ ID NO: 120135 - DNA, 587 bp, Cannabis sativa
aacccttaacctttagggggggggggaacatatatactataaaatagggattgtgatacagagaattttacatttatacagtcttaagttaatttttcttttatactgtgtctaggccaaaacgagagaaaccttatcattatcagtagtcacggttggaaacaccgatgaaccacataacagttagaaaacaaccattattctagttggaacgtaagtgtttaagactccaattctaaaacaataacataaaagttaactaaaataactataaaataacagtaaaactataaaaataattcagaacaacaaaaaaatatccgttaaaaatataaaaatcaagtatatataatactaaacatcgaataacacatacagaacaacaaaacatataaaatttaacaaaatcagagagcgatgaataaaattctaaattgatatctgacacgaaacatgcacaaacaaaaatcctaaaataataataaaacaacaaaaaatcctaaactgcataataagattaaaaacaaaaacacaacaaaaaacataaacaacaataaaatgattaaaaccccacaccttctcccccc

SEQ ID NO: 120136 - DNA, 1376 bp, Cannabis sativa
aatttgcacccaccgaattaatctagaagaagaagctatcccacgaagggaccctcaaagaagactgaacccaccaatgaaagaagtggtgaaaaatgaagtgttaaaacgtgatctgtatgtgccattgaattggttaactatcagttgggaatctaacgtgatctcaagagctttgatattcatctctttggcgtggtcaagcccagcaaagagcgctccgtactcaatttcattattcgttgccttgaaatcacacttgattgctcattgaatgacatctccttggggtgaggtgagaatattgcctaagccacatcctctgctattgcttgagacatctaatgacaacctccacttagagttagattactctttcaagcacaacaactctttttctggttgtacctgcatgtcattggaaaagtcaacaataaagtcagctaatacctaagatttgatcgttgcccttggttggaatgtgatttcatattcactaagttctactgcccacttggtgagtcttcttgaaagctctggcttgtgtaggatgctacgaagtgcatattgtgtcaacacaataatagcgtggcattgaaaatatggtctgagtttgtgtcctgctgtgataagtgctagtgccaatttctcaagttggttgtatcttgtttctgcatctagaagagtctttgaaagatattagacgggttgttgccttcattcctattctttgataaacacagtgctgactactatttcagagactgctaggtatatgtagagtgcttctccattcctaggttttgctaagagcagaggtgaggcaagatattccttaagttgtctaagtgcatcttcacattcctctgtccacttaagtccttcatttttctaagtgttgagaagaataagtgacaacgttcagaagatttcgaaataaaatggttaagtgttgctatcctcccagtaaggcgttgaacttccttgattgattttagggattgaatgttttgtatggagcgtatttgatcagggtttgcttcgactcctcgctttgtcaccaagtaccctagaaatttacctaaggaaacatcaatagaacacggcagggttgagtttcatattatatttttcaagtacctggaaggactgttcgagatgattaaggttgtctgctgctgctagcaatttggcgagcatgtcatcgatatatacttccattgacttccctagcatgtctacgaacatctgatttaccaatatttgatatgttgcaccgacattctttagtctaaacggcatgaccttgtaacagaaggtccctcgttctgtgatgaatgatgtcttctcttgatcatctgggtgcataaggatct

SEQ ID NO: 120137 - DNA, 563 bp, Cannabis sativa
aactggtacatgcttcaaactaagttaatacatcgttgggagacactaagtacaaacacgccatataaaatcctttacttttgagtaattttaagttgccacaaattacgccaaaacccaaaattaggatcaacatccccacgccccttaagttgttgcgacaactcttcaccgaatagaaccctgaaacctccttactctaataaaaacaatcatccatggcctcctccaacagatcactaatcacctcctcatcccacggctgaaacccaacttgaagcataaaatgtaatatatttttattttagagagaactttttttttaaaaaaaaatgtatttacttattcacatgtatttacttattcacaaacttataacctaaataaagaaaaaagattgtaattttatattacatcattatggtatatttcttatgtttttgaaacaaagattgtaactttcataaaagcaaatcacctaataaaataacttccaaaccagaagggacagaccccttactggaaatacgatcaggacatgaaccagaagaacgagctaacca

SEQ ID NO: 120138 - DNA, 3117 bp, Cannabis sativa
  modified_base (176)..(183): a, c, t, g, unknown or other
tgttatacccaaaattcggctgacacttcagaaaaggacacgtgtcaatttgggagaatacgaatcaacaaatataatgataattatataagaagatattaaaatggaataactcactagatgcggagctgatagagtacatttacaacttgttgactgtaaagtcttaagcgagnnnnnnnnatacaaactattgtctcgcgcgttcacaagaaaccatttaacgtcagaagtacaaagcgaggtatcaacctcatttcatatgaagagaagtaaaagaagcatgttgactgttaaaagacttagcgtataatatacattatacaaactaagcataacaactaaacgaattcgaacaacgaatagcgaggcatccatctcgctataggaaggcatactcttggtaccttcactaatcagcttcagacatcttttgatgagattcactgctctatcgagtcagctctctcagatagaagctcacattcaaatgatgttgactgttgaagttcatcttgtcaccaagaactgcgattgtcagatgtagcgttatgacttcaatcacaggagcaataagatttacattatcaacattagaaagacatgggaaaagctacagctcgctgccagggttatggttgctatgttcctagtgagatgtccctgcacgatgtactttgcaacatctttaatacacgtatgcattgacctggtaaaagcagaccaatcacacctttgtgattttcaaataataaccgtatttattttacgtgagacgtgatcaatcccataattttaggggattattgttgtaggatatcagtctaatttgtaattaactgccctcctatgtaattatatattggagcaagatacactgataaaagggacgaaaaatcctttagagaaaaagccctattattttatcaaaaatatctaataagatggactcgtgaactatgcacaattttaactgcaaaaccacgtaaaatagctttgtgttctttatttttcccttactgctattttttttttgtgcaaatccatcacgatttagggtttaatatagttaacgaaaatctgcgttaacaatctttactcacatgacatgcaagataattttttttttcacaatgctaaattaaaaatttagattgatttttattcactatttcttcttcaaaaaattatgtacttaaaagtttcacattatattaaatgtattctccattttcatcaataagaagaaaaaaaatgtatacttaaaaatttcgcattgtattaaatttattaaatacaaaataaatatatataaatattttgactctacaatttgaaacgtggttactaaagaatataagagaataaatgatatataagataatagaattatagagtttttggtctttgttaatacatgttatatacatgctattagtttaacttgtatagaagaggtttgaaataaacttatatgcggtatctttcaataaaattaaagtccatcttaatttttttcttaacatatataattttcatccacatgtacaattgagtctagagttttttctattaaaaatgaaatgaaacttcaaaattttttattattataattaataaatttattaatccttcatttgttctcagttaaaaattttaaattatttatttatcaataataattgtttttagtattcattccctttcttttacactttttaatttgtatatttatttttaatggttaatttatatatttaaaccaaaataaatttgctaatagaaatatagaaaaaaaaagcataaaatttgttaagatatgatttttattattatcagtttaattccttatcatataataattattttaatgactaatttacaagttttaaattatatatcaagaaaacttaaattataaagagataacaaattgatttaaagattaatttattgtatttagcagagttcttcaagcataaatattttttcaaaatataatattgatataatgaattatcaataaaatatattaatgtaataaattttcgagatgcccaaaatgtaatattaagtaaatattattttgaattttgcattttaaaaattaccgactggactatttattttgttaaataatatatatttttaaaatagaatataataatactctgagcccaattttagtcaaaatagaatataatagtaccatatacatgacttgaaggtgttaagaccaaatttactacattttttgtacctctttgtaatagattctgactttaagtttgttataccttagttctattaaaaaaaaaagttggactaaaattagatggaatagtataatgttttatttttaaaaatataaggtctaaattaatttttaataaaataaaaggcttaatcagtaaatttttatatattatagattattattatggaaaaataattataaattggtagtataagatttgaaaaaatatataatttaaataatgtttaatttattgaactttttttttttttttttttttacattaggggaggaagaattgaatttaagacttcttttttatgagaaaaaatgtgaaaccactaaactatatctataactactttaattattaattaatttttgttattattttcactatttttttttttaatattatactaatttaagggatgcacgtacctaaaaattagtaaaaataaaaggacatgataagggatgaaatgcttgtggtccattgagagagactaaaattcttcactaaaaatgaaaaaagaaaaaaagaagtaaattcttcgtacgtgttgtagtgtcatatacagattgtcgttgattgcttcgcacatgctaacacaatggcgtgactttctcaacggtcacaaaaacggctaagtttccttatggcccacttcattttggacgtttatgcttttttctaggttagtaaaatagttaggccaacaaataactagaaaatgccagaactttatagttacaaactcattgttaaagggaaatttcattaattgaccctaataatacaacttatatcaaaaattggacccttttattttttgtacaaattgataccactaattcaa

SEQ ID NO: 120139 - DNA, 722 bp, Cannabis sativa
aaaatgtatggtttgatgtaataagttttcaaaatatataagtttttaaaataattttttttgtacattttttgtaattatgttgtttttgttgtacatttatgaaaaaagctcttagttttttaatatgataataaacaattcttcatgtggttacacccaattctcgaatctctatatcataggcagtggctattgtattcttgaattttcactaatatattttttcctttttactttagttatttgatttcatcgaatatagtttgaactctagcattgtgtaagaataaattttgaccagaaccaagtatgctattgttttttttttattattttgatatgagttgctttgcaattttttgtgtttattgattttagtggtctcgattttttttttcttttcttctaattgttgttttcaaaggaatttttaatggttgggtttgaaattgttgaaggaggcgaagaagttgccatgggaggttcatctctttcataagaacatgaaggttccaaattaagctaatatcgacttggccacttccaggtaatctcttttaattttctaaaaagaaaaaactatgcttagcaacaatctattaacgttttatatatattgtgctgcagtataaagaaatagttgaataattattattgatattccgtattttaatattctcactttaattatttaattaagtgattaattaaatgcggaa

SEQ ID NO: 120140 - DNA, 1238 bp, Cannabis sativa
ccaatagtggcccaatcaataattggtttatgagaaacctagatttcatatactcattaattagaatatattataatagtatatatatacacgaaaccttaaccttgaatctacaactcaaatcataaaatgctataccttaattagcttccaatgagatctagttgagcactaaaacttgaatataaaaatagtgatggtaaagtcgatgaaagatatatatatatatatgagagaaatataatagtgtatggtgaggatttgatctagagagaacaaataattaatggttttgaaatgatgtgactatatatgtagttggtgctagacagagaggtttaagaagaaaactaagaatatgtagcgcagtatgaacaagagagggatataatgaggcctagtgctagttttacctttttgagtgaaagagtgaaagtatgttgatgactctatttataagctcagacacatatagcataccactcataattaatttacctacgacacactatctaactagagttaaagttttcaaatttaaatggattagttatggaacaacacttggcatcctaccattttcttgatactacttcggttgaggaaaagttcaaagtcttaaacttctcttattatgcatgtatctagactatattcttaagctatttctaactaattatttttttttcaaacttaaatcatctccactcaaatctccttggaaaatgcacatacattcaagacttagtaatattgttgagagatttatgttctctcttgctctacgtgtagaccatttataaatttgaattcttcccatatgtccatgcataatttcaaaaatatattatttcctactagtgtaccacctttttctcaattaatgccacacaaataacctcaattcatgcacacgttcactgcatgtttctacttctaataatactctttctatacatatatattcccttattagattatttatatatatgctataacttcttaaacttaaccataattatttaagcctctatttatatgctactgttactactacttttatttaaaataattaataattaaacttatatatagcttcagaataatactaaaatcctctacttactaagtccaaaactaaaatggactcaaacactaagccccataattcctaataactatagaatcttacataattcccataattaatcttgaaagaataacactttctaataatt

SEQ ID NO: 120141 - DNA, 2017 bp, Cannabis sativa
  modified_base (37)..(45): a, c, t, g, unknown or other
attcatattaggttgttaatgaaacatacttggtagnnnnnnnnnatcctggtaaaatattttcaacagctatgtctctgaaataggggtgcaaaggcagcaccgcctcctactggatgtggtgctccgaccatgccatccaactgaaggtcagtcggtgtgctctctgatcccttgagggaacctcacaattgatgcctctagtccactcgttaatatcctatcgaaatcctcgacattgataacaaatggaggaaagacccatcggtctccctatgacccgacattaagaacctgaggctttgaagactgtacaaagacatggtccgaacctatcacggagggctgaccaagtctgttcaatggttttatgtcaacatcatataagctcagagggcagtgagaagacagcataagtcttgtacatcctcctcctagcaggcacagcctcctccacttcgaacttggtgtccgggctctcagcgcactggtcaaccacaggcacctctgcctggccagcctctggatctctatcatcaaggggttgtgcagcctcctctaatatgccaactctgcccatcgttgccaccctagcaacatgaggattagatggtggtgcactatgatatgaccgcttagttctggccatagtgtatcactattagtccagagatcactcagaaggtggcaagaggatagattggatgctatctctcaaaattaagactgattggacctatgacaaagcagttgtcaccttcccagatcaacactcaaaatcacatgcatagaatagacaaggggaggtgagcaacctgacaaagctacaagatacagacaaagttctggtcaaacgtacctaagggtactcgccagataaatgacattgtacaaggctgggtatcagcgaagtaccgtctcaagtatgcctacttagacaaatggtgagtcctaagttgtaaatttaactataatagattcactaccaaatctcatataaagtttccaagggaaccatgtataagatcacagttgtatatgccttcaaatttgtcacgagacccttttcgaggtcaaaaaaggacaaatccttggccgtccgcttggaaccttggccttggccggccaggattcccaagctgagagaggactagccaggtcccatgatccagccaagggatggctagggaccctacgcccaagcatgggccgattagattttggagtacccccaatggccgaccaaaccccatgatgaagacccatggctggccaggtcttgaacaagacccctatgaccggccagggtgcatgtcgaatctaaacgtgtgttttttaagaactccaacatgttttttgtgttcttcgtgactcaaagagctaagaataacaatgaaggtaaaaatctgatttttttcgtcaataaatcacacattatacatcctaagagtatcatgctgatcaaaataccaaaaaaattacaatctaacgtgagaatcagaaaatattcaaagcaaagaaaaccttgtgcaaccatggaaaaatcaactaaatcaagtaaatagcgcgaataaaaagcttacccagtacaagaaaaatttggtgaagggaatggggagcttggatcgtcgaaatggcgcaaaaatcttgggagttgaagcaatgtggggcgtcaacctctagtgaaaaggaggagctttcaaaagttgctttttctagagagagaatgaaatgtggaaagtgaagagtggattcccctcataagcttatatagcttccatgagacttcctttatacttgccatgcagtgttcaactaaaaagcatgcaaaagagcaatccaattaacttactacagcaagtgagatcagccagtcaagagcaattatttcaaaggctatatatgctacaagatttacccagttaagactgttggaattttatgccctaaataaaatccatttcaatctgatctgatttgttatcaataaaatattagaagtcatttatgtttacat

SEQ ID NO: 120142 - DNA, 2152 bp, Cannabis sativa
aggttgttcatgattcatggctggtggaacccctgcatttcttggattctgcagtgcgggatccactaccggtggattttctgaattgatcacgcctctacgagtttgtacgaccatcgtgtttatgattaaatttgaggacaagagcgaatttatgattcaatctctcaatgaaagtaccaaaatgttgacctcgcttttagccaacgacaatgtgtcttaattgtaagtgataattgatatatatatcatatgataagaaacggtaaataaagaacacagagtttttaaagaggtttgaccctgagcagttcggtaataggctactccccttgatttgtattgacttaagaacaaagaatacagttattcttctcttagagctcttacaatgatatctctgagtatactctcttagataaattctctccaccccctgcccagtgagaatagatcactatttatagggctatgagcttgagggacagtttcccttttgtttacagtgtctataattggtaagattacacattaaatatagaatacactgattgagggatttggatagcttgccatatctctgtgatatgatcccagagttatagggattgcctctatgattcacgatacaagtgttgaagttgctaagtgttggtatgttgttcgaattgtccactgctcggctaggaggacttcgtccgtgcaggtatgtgtggtgttctattcggaacatctttttcttgggcagattatggggattcgattccacgtgtcaccatcctgtgatgccacgatagagtgccaaaattgggataacaaagtcatatagggctggtcggcttaacatgatgttaaaagctgaagggacatctatcaccaagaactgagccattaccattatcctcttcagaggttgtccaactgtaagtggtaggaaaatttgtccaagtggtgctacactctggccgtagaatccatagaccaattgggtaaaaggaattaagtgtttaagctgaagccccattttttcatatgttgtcttgaatgaaatatttaaggaagctctgttgtccaccatagtccgtgccaccattttgttcgcaattcgcacctcaacgaccaagggtcgttatgtggaaaaaggacatcgatggcatctacttcggtgaatgttatcactagttctcctacacatggtgctttgagttttctctcctccacatcaaggatgacatattttattcatacagcaaggctcatgcatacttttctttagctttgcccaagtctccaacaaggtgcgggcccctaatgattacctaaagatgctcgtccactggtggaggcattagttagttttggttattatctatgtgggtggccctttgttcttggtcgaccttgataaatttttgtaagtgcgggttactttttctgatcaaaaactcaatctctcgctttcaaattgttacattcatttatgtcatggttgtagtctgcatgaaaacaacagaacttagttgtatgtcttttgctcatgtcctttttcatgggagtgggtttcttgtatggcatcatagactacgagtcacatagattgtttctatatcatctgttaggactgagaaagcagtaaattttgaaacattctcccagggatgttgttcggagttaccattgaacttgcttttcttccaattaccctgtctattaccgttgtttgacctctttccattttgatttgaacttctaggatgttgtgagttctagatggatgcagcgactatagttgtaacgccctaactattaggaacgctacccaaaacacttaagaaaccctaatcccctatacgggattactaataaaattagcgcggaaattaaactttaattacaaatggaaggaaagtaaacttataataagttaaactttataaacttttcatgtatcgggatcccaaaaatgttttacaaaatattattacaagttcattttcacaagcggacctaggcagcaaaacagagtcacaaaaatacatcgctcgtagacccccaacctgcttggtctagtgtggcccgaacatgtacatgcgccgtccagctcccatactcatggctgatcaaaaatagctttaccctttcctgcacagta

SEQ ID NO: 120143 - DNA, 1337 bp, Cannabis sativa
  modified_base (943)..(945): a, c, t, g, unknown or other
ctctctctctctctctctaactttacacaatgacgatttctctcaagctgtcaaatgatctgatacgcatagattacaaaggtgatatctatatataggtttgaattgttgctaaaattagctcagctgatatcattgctaattaatgctgctttaaagtctccaagtcagctccagcaacacattttatgtcagctctaataacacgctttctgtatgaactatccagacgagttgattcgaatctgatgatccggatgggatcagacttttcgggtgagcgacttactacaagctatttggaagtatgtctcagattgatgacaacctatctggaaagacgatcctttcggatgataagctatctggaaggaccactcggactggtcatagatttatgaacaagctatacggaaggtcgccaagcttcctataacttcttttcggattaacaactagcttttcgaaagatgaaactcataaccataaccaacaatctccaccttggttgcaagttgaagtttcttgacaaattgttgttagatgttgttgttccctagctccttccaggctcaaatgactcctatcccaatcagcttcagaaaatgctcaaatttactactccacacaaccttagttttcatatctgaaagattatcttcaatcggtactttgtattttcacatgtctttgttacttgctaaatgtgtgatgatttctgaatatgtatgaatttatattgaaacatatttttttgttgttaattgtagttataaattttgagtcttcattgttggtctaacttagtttgttgttttaatgggaaaaatccaaaaggattgtcattcgttagacaaacataatagtgttagatctcgagagataagtatttgtaaatgcaacttctagttatacatcaaaagatgacaacttagactagtgnnnacaatatgaaacaatgaagagattaataaaataagaataactttgactctcgcctaccgcgacatcgttggattcttattttaatcgaaattattcttaaatttttcctctgagctttttcatttagaatttgctttgatagtatatcattggataaatagtttataaatcatctgcttatgatgtcatttttttcttctatgaaattgaatggcgcatatgactatattcctgacattctatcccgaaataatataaatcatcgatctcaaaaaatctcctacttgtatatgtttactttagaaaaattagacttagagttagattagtagtggtggttcaagagagaataatcactcattatatatttgttctatcatcttattcgacat

SEQ ID NO: 120144 - DNA, 1059 bp, Cannabis sativa
agagagagagagagagagggtcgtgcgagatagagagagatagtgaatttttaatttcaatttcgttctcttttcctattatgtcgctttatctattctcacaccatatatatattattttaaatattataatatatatcttatatattataatatttaaaatatttttttaattctatcaaataaaaagattatactatattaattttaaattcaaaataaatatcataaaattgaaaaacagaatttagttataccttttttttattttacttttttatcttttaaattaaatatattatcctacaatatatttaatgtaaataattaaaagataattatcatttaatttgatttatcttattaaataaaataatcaaaaaataaattaattgggcttttatatgccacccaacacctgtggggcttagcccacacgtgtgggccatattttaaagttcaaattaatttttcaattttgccacaaataaaatttattatttattttgcaacaaataataattgatgaattcttattaatctcgtatttcactagcattaaaataaatattattttacactaaaatatttttttatctctgttttatattatttaagaataatattatatttcactaattaatatagtttcatcaaataaaactaaatagctaaatatcactttaaatattcaattcataacttatataattattcaaaataaaaatttatataaaattactatttttcccataaaaatattttcttatagaaattaattctttctcaatttatttatcaaatcaaatcttcccctatacagtgttgtatagaggtgatctgaggaccattgacttatatttcgaagctccaataaatatttgattattattaaactcttcaatagaatagaatactctagtttattaattatatattactccactgtaattagggaattgtagcctttgataatataattatgtttacataattcttacttgtagtccattgatataatcaatataagtagtttgccctccaattattagttcataa

SEQ ID NO: 120145 - DNA, 909 bp, Cannabis sativa
ttttttgttgggcttgggtaccagtacggggttagctacccaagccgggtagaaagcttcgatgatcaactcatttttatgcaatctttctacctcctctttcaatgcttgtgcctgttccttgtccagtagtcttcttttttgttgaacgggatggaagtttgggtcaatgtttagggcgtgagacattatagaagggtcaataccgaccatatcctcatgtgaccaggtaaaaacatctaggtttgccaattttgagtttcctggtcgacatatttgggtcgatttctacctcttccaattcttccactggccctacatttgtgtttggttccccaagttggggatccatgtcctcgtccctgccttgggcgacttcctattgggcaatactttttcccttgcctgaactctggccggaggtactttccttttcgactatagttagggcaaggttatagcattcctgtgctattctttggttccctctcaggcaccctaccctattctttctttgggaacttgacgcatagatggaaaactaacgtgatagcttttaattcatatagggccggtcgagctaacatgacattgaaagctgatgggacatcaattatcgaaaattgtgccatcataattatgctctttggagcttgtccactgttttgttcgcaatctgtacttccattacaaagggatcgtttttgggaagtggatatgattaacatttacttgttgaaagttattgtgggttcccctacccgtggtacttttggctttctctcctctatgtccaaaactgttttcttttgttcatactgcaaggctcaggtatacttttctctagctttgcccgagtctccagcaggatgtgaacccccaataataacttgtaaatgcccgtccact

SEQ ID NO: 120146 - DNA, 2288 bp, Cannabis sativa
  modified_base (298)..(303): a, c, t, g, unknown or other
aacttaagctccttgagttctgctggagccatcctatgcggagctttagaaacaggttcggctctaggtgccaaatcaatcacaaagtcaatttcttattgtggcggcaatcccagtaactcctcgggaaatacgttgagaaagtctttaacaactctgactacctcaggcccaaatgtttctggtctgctggagttaatcacaaccgctaaaaatcctacacatccactgtgtagtagatccttagcccttagtactgaaataactgggattcgagacccctgaactgatccaacannnnnnaatggatcttcaccttctagctgaaaagtcactattttccgcttgcagtctatactggccaaatacttagacagaaaatccatcccaagtatgatgtcaaactctattaattctagctctataaggtcagcactcaactccctatcttcaatcttaactggcatagacctaatacgtctattggaaataactaactccccgctaggcattaggttcccaaaccctctttcaaggaaatcataaggcctacccaaaagatcaaatacccgtgtagccacatatgagtttgtagctcccaaatcaaataagacagtataaaaggagttattaacaggaacctaacctgtcaccacagaaggactggctgcagcatcaacttgagtgatggcaaacacccgagcaggtgcaggctttacctttggcttctgcacttctttatttgcttgagggtaatcttccttgaaatgccctaccatgccgcactgaaagcatgtctttcagttgcactctctgggatgatgtttcttacaacgtgggcactcagggtaaaagtaaccctggcgtccacctctgccttggttcccacagaatagcttgctctgccacgagccaccagatgccaaggtaacttttctcttctgatcagtggtggaatcaccactatccctaccataagtaggagtaggaagactgggggtcccaccaacacttggagtcacacagggctcctggagaaactttaccgcaccctcagctcgtagagctttctcaaccatctctgtatatgatgttgcctcattagtagtgatcaccaaatcatgtctaattttcatatataaaccggctagatattttactttcttattgaagtctgttggcatgatacctgacacgagcttggccagacggtcaaattttattgtataatcagtacccgacataccctctgtttgcactaactcaatgaattttttccacttagcactgcggactgcttcattataatacttggcattgaataactctcagaactcttcccaggtcattaccgtgagggacaccaactcccaccacaccagggcatcttcctggaactgaaatgtggcgcaggtcacttgatcatttccaaccacccccatgaaattcaaaattcgctcaatcacagtgagccactgctcaaccttcatcacatctgaacctgccaaaatattggaggtgcttgcttacggaatctctcgtataatgacgctccatacggttgccagcaacaggctgttcagctagcatcgctggagctacaaccacctgagcttattgtggaggcacgacagaagtaccttgctgccttaatcttagaatttcttcttcttgttggtggattcgatcttgcatctccgcaaacctctgctcccaatccgtaggagcttgtggtggatttacaggatgaccaccttgaattctgccacggcctcgaccgcgaccacggggatttcggagaatttgatttattgaccgccttcggtctctaccatattaccctgacttcttgtatttcgctgggcatccatttaataggacttagcctacgaacccataagccaggcaggttagacggtgatcataaaacttaataccgctcttatggattatacatgtcttggcgagcttcggtagacaaacctggcgggcttgataccaaaattgtaatgccataatgctaaggaacgctataatgatttttcaattacaatgctatgtttgctaatcaaagaacttgctcaaaaatcgtgtgaaataaaaacttttatactaaatattaaactttataactttacaaaatcatttacaagcactgggatcctgattttaaaatcttatacaaaaaaacacaaaatacataaccaagtcgcataacgactacaaaataataatcccaaatgtcccgagaccgaacactctaagtcgcaccgccatgacatgtacaa

SEQ ID NO: 120147 - DNA, 2497 bp, Cannabis sativa
tattatgtgttgtatgcttttcttacggagtctgtcgactcacagatattgtttgcatgtgtaagtaaagaaaaggctaaggctgagcaacagtgattccagagcttgaaaatgattgtacatgtcaagatgatttgacctggagagttcggtctcgagatgacttgggctttattttttagttactgtgtgacatgtttgtaaagtgtattttgattatgattatcagttttaaaagtgggatcgagaccttttatttggatatatatatgtatagttataaaagtttaaaattttaataaagtttaaatttgataagttttttgagaaaccctttgattagcaaaggtgagcacagtaattagaaagtcactgtagcgtgtttaaatagtaaggcgttatacaaacttttatactctcataaaaaatatgcaatttcattcctcatattttacaacggacagtttgatgaaagaatgaattatgcaaattatgaagctagtgggtaattcatctcaattgattgcaaaatatgaagaactaatacaaaagctgaaataaatggtggaatgcaactgaaataccaaatgaaagagagataccaactgttaaggataaatgacaatccaaacctattcttcaacatataactaaaattgaaagaacatgacttcacaagatattcattgtgtgtgatccagaagaccaagaaaaagaagatttctaggtgcatggaatacaaaaaaaaaaaaaaatagaatggtgcagcaaatgtggcacgaaagatcacaaccggaagacataccataaccaagcaattagatattgagaaaatattaatttgaattatttaaaaaatttctgtgaacttttataggtaaaaatgttactttaatacattgttattatttataatacattattagtttttaaaaagttgcataatagttgttttgtaattgaatgtcaaatccaacatattatcataaatataaagcattagcaacaccagttatgaaacattaattaaaagttcaaaaaacttttctttttacgttgacaagaatgttggttattcaacagttgccaaaccattgaatgatagttgtatagcaggtgttatacataacacattaatttaaaagattcaagtgatttcttaaactattttcctagatataataattagacatgttaaataaaagttgctccacaattgaattaaatattttatatatcggcataaacgaaaaattcgcacaaaaatatatgcattataacctaaaataatacattgtccaaaaaaagaataacaatctgatatccaattcttaaacagaaagaagaacaacaatagaactataacatcgataaccaagtcttaacatctagcattaaaataataaacaattaaaataaataataacattcaacatgctacaaaaattagtctccaatcaccaatcactagactcttgttcttcccttgaacattcttcatatacttctaaggcttctcatactcactattaatgttttcttcatttttccttttaccatatgcgaacaaaaacatagaaagcctgatgcaataagctttgatatcaaaatccagtggaacatattttccatgtataaagaactcaacaaatacaacaacaaaagcaccacagttcatgtgtaataaaacagtaattaaaatagttaaaaataactataccgaaacacatcaacaactaaaatgcaacgacataaaaaaaattcacttattttcctgaccaagcagagaaacaatctccactaatcttaatggagctttcacatcagaaccaaaatctacaacaattattaaatatcatcacgaacatcaacaaaaaaaaaataatgaatcataaacaaaacctaagaaatttatgaaaccaataaaaataacaaatcacactacaataagcattcaacatacataaattcagaactataaaaatcataatcaacaacaagtaccataaaccattaaaaagagaaacatagttccaaagttgagaaacaggaaaaaaaaaaactaaaaccaactaatacgaaatacgaatgaaactcaataacagacctaaaacaaactaggaaataatatttatcaaagcacaggaaccatacctaaaagcaataaaatctaaaatatggcaaaactcaataaaatgcaatacaaacctcaaacattaaatgaggagcttgattcttcccctttttacaaacaacaataggactctccttgattttctctcctttaattattttagatttcttcttggaaggaactcaacaaaatcgtcatctaactttcttcttcctttcccttttttggaaatagatttcaaccccatttttgaaatttgagggtgtgtaactgtaacttttttcataaagggagatggtgtaatgaccgctctagtaatttggattagtaagggcaattaacactaatttttattattttatt

SEQ ID NO: 120148 - DNA, 2785 bp, Cannabis sativa
  modified_base (96)..(129): a, c, t, g, unknown or other
tttattttctatttttaaaattgaaaaacaaaagtggttatagaacgcatttttgtttttcaaaaataaatgttttaaaaacaaaaattttacttnnnnnnnnnnnnnnnnnnnnnnnnnnnnnnnnnngttaccaaacggcacctatattaaaaatacatcggtacggtaacactaatatacgaattatgctcatataaaataagtatattttattattagatgcatataaatgtaacatattactaaatcaaatatttaaatatagtaaaaataaacataaaaataaattaaacattatttattttgttaaacaatttcataatgaataaacataactagtacaactaacaaatttataacgaaaatatttatattttaaaaaattactaaaaataagcataaaagtttacatttacatcatcaaataatgaaaatctgtcttttttttaatggaaaataatgaaaatctgtctttgttatgtattggaaccaattaaaatacaacatatatacatgtaaatatacatataaaattattaattttttttgttacaatttaaaacatgtagtcatccaatattgtttattgggattccaaaatgtaatttttgaatttgattgtttgaatatggtttttaagtttaataacaaggtttttttaaatttttttctttgggattagttttagcagattttagacataagttttttgtatttttattatgttagtctttttttatttctataattattcgtactgttgctcatttcttagctaaatatgtcttgtcggaaatttttagctagatttgatgacctggttatctttcttgtatccataaactcattttacatgagaagaattaatacaatcagcctcccctcaaccttttctttaagctctttgcttgaaaggtaatctttagagtttttttttttttttttaaaaaaatcatgtgagtttactttttttaatatttactttcgttttccttttagacttttatatataatatacgtgaggtatttttaatttttctttaaaaataattattttaaaacgagacatattacttattaaaataataaaactgaaatatattgaaataaatctaagaatatcaaattaggcaaaatactctaaattgtacataaaattaaaacgaatcttcacaaaaaattaagattaaaataaaaaattacgataacttaattttatttttatatgttaaaattttaactatatgtataaagtactgcaagaaaaatacatgaatatttcatctgattattaattaaaaaaatcaaattacaaaatatattaatttaaaaatatcagtgcatttatcacttataaatggattttttaaaaaataagatgaagaaagaaaacacatataattaatgaactttgaatatacattgaattctaccaatatttcaaaaaaaaaaaaaagacaatagtttaaattttatatgtaaaagtttaaactatattacaaaatgctgtaagaaaaatataaaaattagttcattaaatttttaatttaaaaaaaaaaatcaaaattacaaaataataattcaaaaatatcaatactattcatcacttatcaaatatatgtatacctctataaaaaatggaactctaatctatgcctattgtcattttttatataattaaattatatttgaaaaattataattattttttatataatagtaattaacaaaaaaaatcagtaacttttttgtaatttactttgaaaaagctcaaaacacattctctcttttatagagttatagatatattttaaaaattaatttattttcttataacaaaatataaattaaatgataactatattaattgatttttttttattttttttttatattgaagagagattaaaaaaaaggtgactataaatgttggtcatattttttattattatttttatatttataatctatatgaatcaatttttttgtttgaaaagatagaataataattaatgctatattttcttataaaaacaaaacccttcaagaaattaacatattatttaataagttataatcttatatagttttttttgatgatgaaatatatatttattaaacaatttgaatttatagtctactaatactccaaagggcctaaatatcaaacattttatttatcatttataaactcataatctattctctaactattagggacaacctttttagtgtgtgagtatgtattctacttctaacctcaaactcattacatttgttctaggaacactttgatgccaaaaagctaaatttctgctactccaaatatggtatatagttgctactgtaacaatggcataaacttgttttttgcctcttaaaaatttacctttccttatacatttcagcaaccgatgtatggtttgtgctgaagttcttcaataaagccaatttttaagccccttaaagcaagtgttgttgttggtggcgttatggtgggggtggtgcgataagaatgcatgtttgtttggtggtgctcaatcaaggttgggtgtttcggttcctcttgcccaaaatgctttgaatgaatataagggctgccgggatagggggttgggtagtggtgttgatggtggtggttggggtggtaagtggagcgggattttgggtggtggctgttagaatattttatgtggactgacataattaagtgttgctcactcagtgtcgtattagcatataatgataactatatataatcggtaatgcatggtattaccat

SEQ ID NO: 120149 - DNA, 1015 bp, Cannabis sativa
  modified_base (26)..(27): a, c, t, g, unknown or other
ataaatcacttcaaatttcttatatnnataactaatcagattgtaaagggttttatttaaggcacaaaacccaacacaaactgcataaaatataatgaatataagcaactaattaaaatcactaaaaattatttctaatgagactaaaagtaccatacaaatgaacttatctactaaaaatgttgttctctagcaaagcatgcacatcatttgaagtcgccaaaattttaaaatttccattccaacaaccctataatttcaataacccaataattttattattctaataaccaataattaaaacactctaataaccattaaatagatagtaatatatttaattaatatctacataaaagtaatatgtgctctcaaaataaatatatctaatatgcaatctagttacaaacctatatactttccacgagaaatatctcatgtaaacaaataaccaaaagaaatacagagaaaactcaaccatttaaaagatcttgacgacgattggaataagtttacaaaagcaccaattaacctcctatttcatttgtggatgaatcatattccgcgtgttatagtgtaaattttttgtctaataatacgagtatagtttcatgaaaagctttcacttggagctaattttcacagaaaaagatgatttgctgcaagtgtacacttgtctccacccctgtactgttaattgcaaaaagtgttgtataccgtagaaagtactgcagaaagtgttgctaaacgtaaaagatattgttaactgtagaaagaagaagtgtgaacacaacaaccaacacaatcaaagagaatgattggttcacctcgcttgatgtgaacttgtgagaagatgcgaccgagaaagggtctaatcgcatactatgccccacatagtaaaaggataagcagggccgagagaagttaatactggttgtgcatatgccaattatatgcgatgaccaagtttttgggttttgtgccctaaataaaatacatttcaatataatcagat

SEQ ID NO: 120150 - DNA, 1397 bp, Cannabis sativa
aaaagaggtatgtttcaaataaatataaaattagaggcaaatttaattaattgattaataaaagaggtatttttcaacttaccccatttttaaaagtaccctttttctaaatatagtttttattacaaaaagtatggtctttcaagagtatacttcacatctacccaatatcaacaaaaaaatatacggtctttatataaatattttaaactcgtatccaaaaaaataaaagcactatttttgaagctttaatcggaaggaggaaaaaaaataagaataatgtaaagaagaatgagaatcataacataatttgtataaagttcacacaattgtttatttagtattttaatctcaaagttattgttgggatactttgttcttgaatttatgttctatcattgtaatttggctattgcatgatatctcctcttttaaaaccattgaatgaaagttcatttccctttaataagaagaaaaatattgcgtgtcttcttgtgaatgtaggtcatcttagagttctcatacattcctttgaattgttataagagtaaattgcacattttataggtttgtatacaatgtatgtaaacatatggtatttttaaaaaaagctattttattgaaaaaattcaaaaattcaaaaaatatatatgtacatgaaaagataattaagagtaactagttaccttatactattttctctataattttttaggaaataaaactccggtaaaatatatatatctatatatatatatattttgaacttttttcagttttaactaaaaaaaacaatattacaaaaatacttctagctggccaaaaaaataaatatatagccaaaataaaagaaattacataaataccactgacacacaccatcaacccaaaattcatgcttcatgggcaactatcgcgcaaccacgcacaacccaacgcaaccgaaacgaaaattcaaccagaaagagaactaccattaattccggcgacttcacctgagaaaacgaccagaatcaatcaaaacagtggctgttttgaattcataaaaaaagtgtagaaaaactactatgaaactaaaattcaaccggaaatctagtttaatttgtataaaattaatgtcccgacttcaatttttagatccatgaaaggcatatctcaaaaagttaaactgtagtttccaaacaatccaactcaagtataatccaaaaaaaaattacaaatactatagtaaaatatttatcatggtgtattttcgttgttttctaaatttctaatggtgaatttgtttttattaaatcataaatagacatatagatagagttacgtacgtggaaatactattctgatttttaatatttcataacagttgcattacagttgtataaatattttgctaa

SEQ ID NO: 120151 - DNA, 2298 bp, Cannabis sativa
ttaaataaaaaaaaaaaaaataaaaaaaaaaaaaaaaacagaaactcaactaaacagaattatattatataaactattattattaggtatcactacaaaagtggtgtcttgtaaataatttgccatattttataataattattaatttaaattatgtaaaaattaatatttaattatattaataagtatggatatgttattttgaaggggtaatatattatagatatatccgtgggcatgcagcactttattaatatatatatatatattgtataagaggaatatgagttgatcatgtgatgcatgagtagtgatgatgagtacgtacttaggtattattattattaaatgagaatgaaaaagacaaaatagtgatatcatgatgaaatgaagaagaagaagtgcacgagtggagaagaggtaaataattaagcttttgagctggatccagagatagacacacacacacacatacatataatgtacgtacgtaggtaggtaggtatggctagattagattagattagataggctgtaactgtatctttggaatggtcaatcaaatagtcacaatcatcactctatcttatcccatctctctatatctttattaattatcatcccctaactaatgcatgctctaagacaactctaattatataaggctttaactaagtaggaacattattcactttgtgtttaagtttttaaaaatttatttttagtatattcttaaaaggtcttatactaataaatatattggctattcttatatatttataattttttttcatttttaattaatatgagactttagttgcacttttaaaaatctttccctcaaacacaagattacattgctcattaattactaggccagcttcggctgcaattagagcatgcttaactgagcatattcactgatctcatcgtcagagtacaccaaggctcattacctttgtttaacatgctgatgatttattcacataactaactttaaaattcagctctgataccacttgttgagtcgtcgaacaccatctatctccactcttaatatgatattgtcgcttgagcttaagccctcacgaatttaatcttaggagccttcttgaaaattctcataccaataaaaaaacaactaaaataagcggaaaaatctagtctaattaacaatattattatgagcagttttattaaaatttctagtaatcaaacaaattaaacaacaaagcaaaagtctaagtaaattcaagaacaaaatttttatccatccaactaggaactctccctaacataacacgatccacaagtgtaagtcaatcaaaaagataaatatataggattcactttatcaattatgacacaaagatatagaaagcatgagcaataacttgtacatgaccaagttaggctggtgggcataaaattaaaatgaagcagtctctcaaattatgtgagcagaattagatgcaacaactcgggagactgctcgcggtcgggatgaatatattttttttattactcatattattagtattgagtaataaaagttagaatattgaaagagggtaaggtggggtcattactcaaactctctgcctctttctcatatatgcattgagaaatggtcattttacagctgttgttgttgtaaatgaagccaagccaactgtgtcttagctatgtcactttggaagaagcactcttcttttggccctttcctcaagtcactctctttctttttctctatttttattctcattatacagtacataatgtcatttataatttattggctcattacttattatgatcctatctttatagctcgtttccattaatagtaccccaaataaaagtttggaaaatctgacacaaaaaaatattactaaaaaaattttgttacctcaccaacctctctccccccaatttatgctcactttgagtgtgaaacttgtgccttgaattgattgagcctcttgtacaagtgtaagagtaatgataaatgggttcaaatattcaacaaactattatccatagtcatcttgtatcatcttttaagagagtaatttttatctgaaataaatgtgattaattgacaatttcaatgatttagtgcaaatatgaagaaatactaaaaaaaatatcacagctagatgtctaatataatttttagatatcatattattatttggattcaagtaaatataaaattatacatattttaatttaataattattataaaatataattaaggttaattagtaattttttcccctgaattttaacatgta

SEQ ID NO: 120152 - DNA, 1416 bp, Cannabis sativa
gaagaaataaaacaagctatttttcaaatgcatcctgataaagctcctggtcctgatggcatgggtcctggcttttatcaacaccattgggatgtcattggtcctgatatagtgcatcttgttacaaacttttttgagaccgaagacttgcccctagacattaatgaaaccaatcttgtgttgatttctaagaaggaaaacttttccacaatgggtgatctgcgccttattgctctatgtaatgcatcttacaagattatggctaaagtccttgcaaacagaatgagaagtatgattgaccagattatttctcccactcaaagtgctttcattgctggtaggcttatctctgataatattatggtggcgtttgaaatcatgcactatcttaagcggaaaagaagaggtcaaaaaggtttcatggccgtgaagcttgatgagtaaagcttacgacagagttgaatggggttacttgaaagcggttatgtctcgtatgggttttgctagcaaatggattaaccttatcctgaaatgtgtcacttcggtgagatactctgttatccatagcagtcatataatggatcctattactccttctcgtggtatccgacagggcgatccattgtcaacatatctgtttatcatttgtgctgaggggttttcatctttaatcagaaaatatgaagctgacaggatcattcaggggtgtcgtgtggctaatggggctccctcggtaactcatatgctttttgctgatgacaactatttattttgccaagcgactcaaaatgctgctgatagcatgaacaggctccttcactcttttgaacttgctttcaggtcatcgtgttaatgcaaccaagtcttcaatattcttcagttctaacaccaatggagcggttaaagatcaaatttgctcaactcttggaatgcctgaagctacagatggttctttctacttgtggctgccaaatatagtcggtagaaagaaaactattattcttggttttcttaagagcaagatcatcactcggataaatagttgggatggtaaatttctctctcgtgcaagcaaagagattcttttaaagactgtcattcaatctcttccaacttatgccatgagtgtgtttctgattcctctaaaaatttacaatgatattgaaaagcttatggcaagcttttggtggaaaacaaaaagtgctagtggccaaggaattatttggatgtcttgggatcagttggctgttcacaaagatttgggaggcatgggctttcgtcatcttcatgactttaaccttgcaatgcttgctaagcaagggtggtcagagtcatcccttgttagtcaagtttttaaagctaaatattacccccgttcagactgttgggttttgtgccctaaataaaacccattac

SEQ ID NO: 120153 - DNA, 1266 bp, Cannabis sativa
ctggtaaaataaaaatatccaacaaaaagcttgcttgctcaaaccatgagcggcttggttagcatctctatgaacatgagaaacacaaatattaaggagatgggtaattgattcctaacatcaaaaattaaatcctgaaaagataaacatgttgatgttaaaccattgagagaattgacaagaaacaaagaatctgtttcaaccaaatccattttaacattcaattatcttgcccactgtagtctatgaaacaaaggttttgcttccatttcttgtggacgaaagtttcctaaaattggtttttaaagtgcagccaacacttgcccttgacaaccaaatccattttaacattcaattatcttgcccattgtagtctatgaaacaaaggttttgcttccatttcttgtggacgaaagtttcctaaaattggtttttaaagtgcagccaacacttgcccttagagtcccgaataacagttcccaacccaattttgtttcatgaagagtcaatagatgcatcaatgttcagtttaaatcaaccttgatgatgaggctaccatggcacacgatttgctaccgaagaacacacataaggagcagagttagtgcaatggttctactaaaaattacagagatatcccattgatttagcatctatttcaataggtttcgggggagatttgttatggataatattattcctgtcagaccaaatggaccacattgtgcatataacctttttcaaatcaaatttggtatgtgcagttgacaaatgaataagaaaatcactctcctgcatcctactcgctgcttgaaaatcaaaggtgtagtctgatgaacgccaaacagatttagcatgtttacaactaaacatagcatgtccaactgattcccacgcatttcagcataagctgcaggtagctgaattaattaattgcaaaaccacgtaaaaaaccttatgttcatatctttatttttacagcttttatcttttctttgtgaaatcactactgtgaagctcaaatttagttaacgaaaatctgcgttaacagaatggaaggactgcctgaagtctatcttattgcccgtgatgctttcaccctttgatcttttcaagtgaagttattgctctaatttttaagcaagtttagccttccttagcgaaactcaaagcttgcttcataaaaattcaacatgactctcgcatgcacgttattttttgtgcaagaaagatcattaggggtatgttgttagcccaagatatgtt

SEQ ID NO: 120154 - DNA, 2229 bp, Cannabis sativa
aacaataacaacaacattgcccatatttattgagaatgactcccaacaattttctattaatgttgataaatgctaaatgctattattatatggatattgttattggtatcagtggtgtctagcattcttaagatgtgtcactttatgattgactaacgatattccttaaaagctattatattaaattatatgggacctgatactaaattaaaccaatagcgatattaacacgtagaagggtgttttagcatttctcttactatattagaattgtaagtaagatgcacggagttttattatcgagaagagtagttcataaatcttatatatttattatttttgtatatatcaataatgtaagactttttattaattacagtgtctaatactactataagttgttatattaattatttgtaagtatgaacagtgagtttggagatcactaacacattgtataaaataaaatctaaataactaattaaatagtgaccatcaattaggagatttttgtcaataattatccaataatggactttgctttataacttaattaagttgattaattgattcattaatgtatgtagaaaatattctaacattttatgcagacattagtagtaattttctgatgaaagaatttgttagaattttgtaagtggagaaatgtagaataaaataatgagattacatggtaagacgcataaggtttcaattaaaaatgcaattcgtgtatcttatatatatgatattatttttctaaatattaacaatgtaggagtctctaacagaatccaaaattctctagatatataaggtacgtttggaaagtcattaagtaattggaattgagtgtaattataagtaaatataagatttgacgtgtttgttcaggcagataattacacagtaaccatgtaattggaggtaattgaagactctcacttacactctcaaattctcatgaccccatgagaattgggtattaccactgtgcaattactaactaaacgtgaaaataagaattcatatacaattactacttgacatccaaacacactttgcattttaaaataaaatataattgataggctagttttaggtgcattttgtgaagtattttaaaggtgtgtttcagttaattatattcattttgtgaaaaattacgcttattttatatttatttcaggcttaaattataaaatgtattgaaaattagaagaagcatgttaaattagatgaatatgatgaatttatcatgaaatttggagttttaagatataatggtgtgaaatattctaattaagttttggatgctcaacacgctccgtttatgatcaaaaatcaagtttgaatatttaagacatttttttactatgattcgtttacttttaggaaaaatgttgttaataaaagttctaaatatctccttttgctttctaaaacattttgaatcgtccaattgcaagcaatattgaaagatttatggccaaaaaatattatcggtcgtcgcaccaagaagcttactgcccaaaaaccaagttcttgagtctcagcactgaaagggccatgtcgcggcccgcctatttttaaagggttagtaggatatttttaaaccctaatttcaaaggaaaaataaggctttttgattaagaatttaaggaggacgataatagaggcagaaaacgactttggaaggctacacccattgattttcaaagagtttcttttttctatctttattttatgtttttaattattcttaatcaattgttcataattactatgagtagctaattagtgttgttaatggagattgtttgatattttattttagtttaattaacgtaatttaattttttcccaactttcaacgtgtacatatttcattcgtacttaatctcttttaattgtctgatcactaattaactgttttatgatttgaatacaaaatttagaaagtaagtattgattaattatgctatagtaaaatagatacaaatttcaatataagacgagggtacctatataatttgtgtagcatttaagatttttatgcttaatgtctcatatttgttaaacttgtacgagagtataaaatttacatataggttgagatttatgtgtcctaacctgaatataaatttttttagtaaatttactatcacatgaaaattgaaatttgggaattaaattatattaaagcatataaagtagctagattcaatc

SEQ ID NO: 120155 - DNA, 972 bp, Cannabis sativa
gggaagaagaccccgcgtagaccctcaaagctcctctggcgtgctcttccgccatagttatctttttttgtcgtagcagttctccactatacacgaacttgaagtcgacatttgcgaagggcaacacctggtttttagctgacgacaaggatggagctccaattgtttgtggccagcagcgaggatggagctttacccaattggatggaggttgaattttagcttttaattttgaaatttatatgtatatatattgtatatttaggtataaatttctagaaagtaggaagaagaagatcgaaggagttacggtggtgagtgaagaaatttttatttttggtggtttgaatattaacttgtggtggtgatgagtagtagtagtttcaatagtagtgatggtgggattcaagaagatgaagaaggtgaaaaaaaataaaccagtactagagagaaagaattgggagagaaagaatcatttttttctttttaaattttataatttttaattattttattaattttttgaacttttttatgttaaataactgtttttatttttattttatatttcaatgaatttttagataattttttaaattttaaatgatttattataattttaatagatcaatataaatgtgctatatgtataagattgtacatatcaacagtctatgttagtagttaacggtggtaaatagacaacaccttaaatttgctaacgatttagtagtttggagggttttactactaaaatttaagtttggagaattaagtgcaagtaaaataataattaggagagtttaactgaaaaaactcatataaattttggaaattttaccgcaaaaaaaaattttgaagactaattactagcaaattgaaagttttaaaatttttgcctcaatttatcatacaaaaatataattttattatgaaatattagtattatgtaatattataatttagagaaag

SEQ ID NO: 120156 - DNA, 915 bp, Cannabis sativa
taattacttaaaaaataaagtatatgtgcaatgtacgtaactttaacctagtatatatatatatataaatatatatcaggttctcaatctcattttagtgcatcccatccaaagatgtatttttttaaactctgtaactctcaatttttttttctaatcaccgtgagtcagagatcaagactctctccttctttttttttttctcaaactctctaaatttttttgctaacaataacatcaactaccttgactcactttttcatttatttgttgttttttttcttcaataaaataacaatcacgtatttctctcactttctttatttttattttttcaaaaacttataaaatttttcaactttactgtgattattagagctaagaaattatattattgcaatctatttttaaagataatcactctaatatgcgagaaacatataattttttgccatcaccatgaccggaataaaaaaaaaaacctattagtttctttttcttttcctatttaattaaccactttaatatgcaagaagtatatacatttttgattgtttttagggaagatgatgaaaaataaatgtaatttcttttttatttaattaataaaaaaaatctcccaaaaaaatacctaaaaaataatcatcctttaaattttaacaaaatttaataattaatcaataattttatgagttactaaaaattattttattatgaaaacataaacaattccaaaacttaaaatattatcataaaattatcattgtatgttatatatttaggagtagttatattacacatgtttaataatggataaaagttggatatggtccaataacaaattatccgaagaatataccaacggggttagtacttttattaacctcgcacgtagtcacttgaatgatgagaata

SEQ ID NO: 120157 - DNA, 1832 bp, Cannabis sativa
ttttttttttttttttaaacaaagcccagatcacaccatgaatgaaatattaatatattagctctgctcaaagaggaaggagatgatgatgatgaagaagaagaagaagataactagcgatgaagaagaagaagataactggtgatgaagaagaagttgaagggtaatctttagtagtcaagatcctagcatattgagctcttaaactttattgagctttcatactataaccactactgaggcttaacccaaatcccaactcaagcccagacttatctagggaagaagaattctcataagaaaaaactaaattgtcatctttagacaccgtagagattgacccacttgttaatgaagctctggaaagaccacaaccacaatcacccaaaacaacaccctgcattgaaaaagcttgtgactttctaatttttttccgaaagccgagaagagaaattatcgtaaaaaggggatttaagaaagggttaattgaaaagaaaggctatggcgtaagaattaagtatctgttcatctttatttttttaattttcttttttggttctctttctttctttctttgtctctcttttctgtagggttacagatttgaccttggttagggtctttgatcacatacgggatgtgggggacaacttgggattgagacactggtggttcagacctcatggtggccaatatggagaataaatgtggtaaaatatatagggtattttgagtttcttgaattttttttgctaaattgtttttctgcagacagttttattttgctttttggtggtcttcaatgtcgatagtagatgacgatagtgattgggaatggtggtggggtgagggtcgggctggggatggggattggtgaagaagaagaattaaaaaaaaaagaaagggaaaagacaaaataattttatgattttaaaataattttcttagtttttttttttattttaaattatttttaattaaaattataatttggaccaataaaaaattgacatgtggcgttgtataagtatctaacagatcagttagaaagaaagatcaacatacttacagaaaacgtgatcttggagattattaccaccaatttttgaagttgagaactaatctgcatcaaccctaagtttttgagaacattaaccgcaattatctttaaataaaaaacatgtataacttatatcaatataaaaatattaaaattaataaaaaactaaataaataaataaaatacaatcacttacgagtgatgactttatatttccaagaaaataaaagtttgaagattaatttacaaaaaaaaaaaaaaaaattgaggaccagcttgcaaaaacttatatagtttgaggactaatttatcaaaaaataaactttagagactaacttactaaaacctatataatttaaaaatatacggcataaataataggctaattaggatttttatcccctaaactttaacatgtaccaaatcatgccccatggacttttttactgttaaaaattccccctgaactttttcagtgattatttatgtactaaaccaaactttgatatgtactaaatcatgccccctgaactttcatccattttagaatttttttactaaaattggacaaaagtccttaaattcaacaatcgcaatagtttaggggacatttttaacgaccttaagagttcaagaggcataatttgatacatatcaaagttcggggaaaaaaatggaattattacattaaaaaatataaattgaaactttatttacaaaaatacctccttaaggtaaagacagcatttatactttttatgtgattttaatt

SEQ ID NO: 120158 - DNA, 2260 bp, Cannabis sativa
attacaggcgttttaccaagaactgacttttggaaggaactacaagctcgacgacctgagtcattggtagaatatttacaatggcggaaccacacaaaagaattgagaattctttagttgagttagaaagagggaaggaaaagcgcgagtcccttgtgccacgatcgcgttctcgaagcccaaaaggaagaaattctagaggatgaagtcccaaaagatgcagtccctagaggcgacgaagtctaaagcttgctaaatctccctccaagaaggagacatatccaaagaggaaagggggtccgccttttgtcaactatacagagttgtctgcacctcgtgaccacatttatgcgatcaatgaacagaatgaggcgttcaaaaaacctccaccaataaggggaaatcatgacaaaagacatcccaagaagttttgtaaatatcataaggatatcggtcatacaaccctagagtgttggttccttcaagacaaaattgaagaattgatcagacgagggaaatttaataaatagaaaaagaacggagaaaatcatccccaagcgtatgataacgacaacacaaatgatgcgagtgactttcgaacccctcacaacattttgactataattggaggcctgcatgttggtggagaatccagaaaagtgcaagagcactatgcaaacgaagcaaaagaaaaacccctcaccaacatgagcaatctaagtgaacgaccggagaaattattcaagaaggagtgtgacgatatcaccttcatggaaagtgatgccagatgggtacatcatccccacgcctatgcactagtgatagtcgcaaacatcagaggggacaatgtacatcgtgatttggtggacaatggaagctccatcaatcttcttaactttcaagccttcaaacaaatggggttacatgaaaaagatttacgaccagtaacttcaagtatctatggtttcaccgaagatacaattgcattaaagggaatgatcgaattacatataactttggggactacccctgttactaccaaattaatggccgattttgcggtaatcgatcatcatactgcatataatgcaattataagtcaccccatcttgaagaaaatgaagatagtcacgtcaatttatcatctactatgaaattccctacccctgcgagtgtgggatcagtgcgaggagtccagtcaaactcaagggaatgttataataccgcattgaaactcgcagaaaagaatttgtcttgctaccttcacctcctgtctcatccaccgtcttgtggtctggtaatttgaagtcctcacccatttccttaacttccatatctgggggcaagtcgtgaatgaacaagatagccttaggctgacaccgtagacttgatgttgcacacttctaaggtcactagttccgctaatttgtgaaccatcctgtctatctcattctagacaacgagcccttacgagctctgccaacaggggcctcatcctcggacatcgaggttgggataaagctatcgctcctttttgattcatccgtgaaggctccctctctagagtcgtacctctggctatcttacaggccactcatctgaaagatagaagatctttttagtgtggtgcgagtgcaattttaacaaatcaagtgctctcacccatgttataaaattcaaggcaaaaatttatagaactggttgtgtatcactagaagtggtgggtgtttctcagtatcctaagggtcgtgttgctacatgaacattaactcacgaggaaacacccaccacttcgagaatctagtagttccaacaatgaataaaatgcaagaaacaagaaaactaactgcatgtctcaagaaatggctgggcatgtcacagtatcccaaggggcatgcaacgattgcatgaacattatgttaatgtgacacccccaccattttgagaactcatagttttcatagtaaaaatacatataacctaaaagctaaaaaaggcctaagagttaaaactctagaaaacagggtcaaaaaggttagctaaatattcgaggtgttcttttaggaactagtgagtatttaagatgttcttcttcaaactcacaaatattcgaggagatcttcttgaaactcacgagtattcatctttcaggcacgtaattactagaaaaataccacattttgtctaactgcagaatctaggtgttacgaaaaattattaaatactacgcaagtgcacgcaatcaagtagtatactcacg

SEQ ID NO: 120159 - DNA, 1208 bp, Cannabis sativa
tattcgggtccgggttcggtttcatttttttgaacccgaaacccgtgaacccgaaacccgccaacccgaaacccggtaaacccgcccgatgttcagccctagcccgatcgagctgggtggctggcaaaggtatataggtcactgctagaggagacagacaatgcgggtgatatcttcggctagcgctggccattcccattccttaatgctcacagttgtagttttgcctaaaagagaaaagaaaaatgaaaaacaaagaaaaaatatgcatctttagtctttggagtcactgcttcccttccaaaaatactaaacttactcataagttggtgtaggaatgtgcctagtccgttctcgatattgcttaggagctccattagtaaaaattatgattttgctttaaaattgaagggaacactgtgagatttttcataaacaagactggtaatataaattttgctgattcttgataaagagttgggttagaaagaaagacagaatttaatttttcttttttcaaaagagacagaggtcgctcgtcttagattgacactcaatcgagtttgttgaaaagcctcacttgtggcataagaggaaaattaagatactataatataaaacaaataatatctactatcatagtagaaacaaaacccccaaaggataattctagctatacaattaacttgaaagtccaagttgatttgataattcatatatcttagaaattatgagtttagaattatcttgttcttgtaactatttagctaaaaaacatcatttgcaacttcaagcttccaacatgtgacctcttttgctatgccattaaatttgtaatttaagataatgacaggaagccagagaaattgtttgcttttaccttaaaataacttacatttgaggccttaaatttgcagagaaaattttcggagcagacatacagctgagactcgtctacctaggcatccttttcgaaacaaagtcggcttcagctgattgtcccgagacctccaaagcagattttaaatcctctaagcaagtcaactgctgatgctgaactcctttctctaccaattcatagtataaactaaaggcttccttagccttttttactttactcaggccactaagaacactattaaacaattcaatatcgacactttgatccttctgcaaactaaatttcaataccttgcaagcctctaaca

SEQ ID NO: 120160 - DNA, 3712 bp, Cannabis sativa
tattctattttattatttagaaatttttttgttttaattatttaaaatttttagttgcattacattgtaatggttgtatgtttatagagtattaagcttaattaaatggtgatatttatttttttatctatttttcttcatatatatatttttatattaatattaaaattttagtgtgtaattggatatcccattaaaagatcgatccattccaattagtatttgaattgaattatattttgaggtataattaaattggatcggatgatttttcaaattgaattactaattagattggatcaaatgagaggaaaaatgtttaattagatcgaatgtccacccatagttggaaggatttagctgttaaaaatatatgttttcataacaattatatctgtcaaattaaaaatgctgagtctgtagtcatacacaaatcaatacacactcatgtatgggagtgaaacaaaatttttttatttaataaagttataaattattaatgaatggggaatcacaatgaaaaattagacataataaaagacgcaatctcaagtagctttgcggagccgttaaatgaacagtagtatctggatagagatatgaacaatataatatattcatttccctactttaatataaatatagtaaaggtagtcatataaaataaacatatttagttttttgaattttaattaaaacaaacataatgattcgagattagccaagctgtttcatatctttgccttctatacttaaatgttatttgtcttataatatatatagtggttaggatttcttaaggaactattacgtgtacagatccagataataaacaaaagctgatccaatgtaagaatagtttaggtcaaaggatttgctttggagttatttaagtagtggtgttctattaaaatcattacatatatttgttaaaaaataatgaagaaaaccatcatcaaccatatacggatgaaacattttttaatgcatcatggatatcagaaaattgtctagctaacgttagacggaagtatggagacacagagtacatatatttttatatacaaataactaggaaatgttattcttcatcccccattttttttataacaattgacaactacactttgatataaaaggatatcatatagataaaaaaataggaaaagagatgagacagggtgaatgataaaattttatgagtgtttattttaatgaggtaatctgctatttatataaaaatatgagctataaatttaggaaactaaaaaaaatgaataatagtaattacaatcatagttaactaattagaagatttagaaatcaatatttatattttttatagcactacacagtaagacaaaactcgtccaagaaaaaaatagtacagtataaaattactctcccttattttgctattcttggaaaaatcttttaacaaatttattgaccgtaaaaactcattaaccatatttctagtcggaaaccttatgtaatgaatgacataaggaagaaagagaagtaatcttaattaaagaagcttcacgaaacttagagagcaacaatagtgaaatagagagtattgtattaatatttcatattctttagttacataaaatttccaatccttttgaatgacgggttgagtattatttataggtgacctctgatggtttatgtttcaagtggtcacatgggcacaacatagtacataaatgcctgcaaatcgaaggttgtaaagaagtgtgttgacctaaaaattaatcaaccaatattggaatcgtataaatctgatgtttgccacgtgttacacaacaaaaataataaaagaaataagataaggatttttatagaggttcggtccccttagttagcgggtaatgacctacactcttttggttgtattgatacctagagataataggatcactataaggttacgaagcatggatcaagtatgcagatcactaatgagacagaggtgtagccttagaggcgtgtgagacaagaagtgagatcaatctagctattggacgtgtacaagagagatagagaagagagattagggtttcagacttttggaggctagaattagtcttaggttttgtaggttgttgttgaggcctttatataggaaagcctaaaccctaatttacaactgaaatccttagatattgacatattaaattaattaaatacaaaatactaaattgccccttgaaagtagatattttccattagtttgttgggctgttaatggcccaattcgtaggaagcttgtaatccacgtatcagggtgtatagagaattttgccaggccaatccttgccggccatacacctgcacgatatgatctggccagccatgcaagtcctacaggttatgttctggtcgaccatgctcctactaggatcctgtaggtcattattagcttgaccaagaggaggcaagcttttggatgtggaggtcagcctatggcaaatggaggacaactttcacaccatttccttgtagaggtcaggttccttggtcaaacggaagctcccttgatctggaaatcaccttttggctggtcagcttgtgcccaaatcctggccggcctataggcttctcatggccagccaaacatgttggtacaactgcttgatggctcacttcacttctttcggttgctgcttgacaattttgccatacctttaatgtatgtatttcttatatactttgtattttgcttaaatagacatgtcatgtcaggtggacgaaatttgggatgacattcgccctctaagttcctgttcaatcatttggtcggataaggactttttaactttgtcttgtttgtagtagtctccgtcgagcagccttgtctagccaagtgttggctttttgaatggcatgcttttatatcattgatcttctctcactatatatttatcatcttgtcttctttgatacctcttctatgtaccaaccattaataagtttaaagcttttaaatcttttgcaaactttttaggtctcatattagtttgtaatatctttggtatgttgatcgttatgacagttttagaatgtacaatgtgtgactttttgatggaatagatttaattttggccttcgttgttattcttgactctttgagtcataaagaatacgaggcacatattcgaatttcaaaagaaaaacatagatttggatttaaaacttaccttggctggcttgggaggttttgcttgagacctggccaaccctagggcttaatcatgggagttggccagctttaaggttttaccatataaagctagcatgttcatgcttacgtttggtcacccgtgcaagttcttgactgggttatgggaccctagctggccctttcaaagcttgagaaccttggccagcatggggcttggttccaagtgcatagccaattttctgtcctcttttgactttggcaagaatccaactctgtaggcatatacaaccttagtctcatacgtgtggttctatgaaactttatagtgagtctattacagtcgaatgctcaacttaagactcaacatgacttggaacctgtaaggaactctaccttagtcatagcccagtacgtggcccctataggagctctacctggttcttttctggcaatacagtgttgagttttatgccctaaataaaactctatttcaatataatccagattattcaatatcaa

SEQ ID NO: 120161 - DNA, 1891 bp, Cannabis sativa
  modified_base (1126)..(1133): a, c, t, g, unknown or other
tttttttttttttaaaataataacatttataatttattttttaggttaagacaactttggtcttaattttgtattaggtttgagtttggatttcagaccaaaaattaattatatttatttaattaaaaattgaatttgaaaaaaaaaatattccacagaattttattattttaacttaattattaaaataataaaataattttattatttattaataaataattaggatagttattatttgaatttaaaattcaaataaacaactatggtatttatttggaattcaaattcaaataaatctatcaaaataatataatcatttataataaataattataagatactttatagtgtatatttacactatataatatatactatatatacattatatacactatatataatcgagtatacatatgtaggtatggttcaggtaggattagggttagccaccatggccatgccgtggccgatagctctgaggagcaactatggccacagtggccatagtttttagccatgaagacaaccagccgcaccccagttgcacgggtcaaaggactcgagacccacacgagtctgttgatctcgcacgtccaggtggagcagggatgagggatgcgagtccctcagggtgcatgagacggtggtccgaccaccatcagctcgttcgaggagcacgctggtcgaacccgcccaagacccaatcaggtctttgatcttccataaaacttgacgtgaaaacatcgttacatgcaacatgcatgcgtgcgttcgtggaggaggagggtggtccaaccaccaccaacgttgaccgtcggcgttgatctttgggatggagtccctagctttgatcatggcttccttagttgaggaagcacgatcggggtctttcaagacacaagctcacgtgcatggggctcgtcttggttggtcacggccaagattcaatttgaattcgagctccgtgatgtgagcattacattggtttataaattttacatataaataattttcttaaaattaaagttacataaaaaattcctatgccccaaattggcttacattattttctaaaaataataacagcaaaacttacacccaattataccatataattaannnnnnnncacctctcatacattcacaataaaattaccacccattcacatacatattatatatatatgcataaaacccacacaaaatttaatgtatacatattcatgaaacttctcttgataccaattgttagttttcgatggtactaaatcaaatatgcaacgaaagagtttcatattatctaattattattgtaccatattctaatggatttcaagatgtgtgtacattaaattaaaaacaatgagttttgtattagaatatgcctcttgatgactatcaggttatcctcaaaacttcttgtatgttgtatctcttaatccagataatacaatgaactcacagtagtgtctttcaaatcgttccaccagacataatgaacagtgtgggctattaggataaagtgtataatatgttcttgttgatctctcaacatatgagcaagaatacattgagagagaaaactaatttctttttgggataatttcagttttaaccaaaaaaagtaacaatattacaaaattactttcagctggctagataaacaaatatacaacccaaataaaaaaaaaattacacaaataccacttacacacacctttaatccaggatccatgcttcctgggcaactatcacgcaaccatcgcgcaactacgtagtaacccaacataaccgaaatgaaaattcaaccagaaagagaaccaccattaattctggcgacttcacctgagaagatgactagaatcaatcaaaacagaggctgttt

SEQ ID NO: 120162 - DNA, 1856 bp, Cannabis sativa
  modified_base (27)..(30): a, c, t, g, unknown or other
tttaacatagtattatataaaaatatnnnntataatctaatttaatataatataatacaatacgacttaatataacgttccaaacgaacttttaagtattattatcctcaaattttgtataggaaaaatgctaaagaattgattaatacttttatgagatgcaatatttctattcatataactaaatatctaattctacttaatttatttaaataaatattataaaaaattactaaataattatagaaccacaattctgtaatactaaacctcagttcataataatactctttttatacacattaaaatacaataaataaaattataaaaaaaaaaaaaattaatacggcaaatttctcttattgttattattattgcccacataaaaagcaaaaaaaatgcttttgtgtcgatatcgagaatcctggaagaagaaaacttccactgatgtccccttagttaaaatctaaactaataatttttttttctttatagtttaatttaaatttttttatgggaaaactaatattatttttagggactttaatcaaaatatatatatttttagagacagtatagtagcacaatgtaggattttgcacttgatttatgtctccaagtcttttcgagaaaaaaaaaatatatgagaagtaagaaatacatagctggagaaactttgcttttaaaggatttttcttctcaatatataaactggccaagtggaacagctgtgaagttcaagctactactagcttgctagtggtaggtagtactcaaactttttgtcttgtagttggacccattaacttagtggtgctcataataatattttataaaaacatatgaacatttgagagtacgtaaataaataggaaattttatataattcaaatttaaactatctacacatatactttatattttttttttatttgtccaattttattaaaataattatgaagtcaaaataaaaatttatttttattattattttttatttataaaatatcacataaaacttaacatttattacttaaattttatataaacatcacaaattactcacacacaaattttagtacacatgtatttatattacacttagtaactaacaagccttaacttatgataggattttagcaattagaacatctcaagtaggagttgttcattggagtagtcttgccacatatgcaataagttctaatttttaagactaattttatataaagtgttcttcaatataggcaatagctacatgatatatttttttcttttttcttaatttttttttcatagaaaaaaattatttttttacctaaaaagttatcagttcaatgtaatgtggaaccacggtggacaacttttagagttgtcaaccactgaagtattttttttaagagaagatgacaaatattatgagaatgtgagagaaaataatatatatatatatattaagatgtatgtattttgaaaactataggtgtttccccctattattcgtattttttagcatgcgacacgtggcatataaagaaaataattagtcctataattctcctactacaatcttgtcatagagaagcctcacagggccacgaacatgtcaaggttggggagatacatagaagtccacttggccctgtcttaacttcccagatgcggaaggtgtggtgtctctcctggacccgaaggggtctaaatatggatgatggcccagctaatacccggacgggtactcggagggcctaatggggatgcgactgcccaggagtgtcgcaaatgtctacctttgatacaagccagatcactaagtgacagttatgctttttttgacataggatcagatcttgtcc

SEQ ID NO: 120163 - DNA, 994 bp, Cannabis sativa
ctattattataattaattaaatattaattctcactgttaactatttgtaaggtgaagactatccccactcaaaaaatatatataaatatagaaaaattaaaagtacactccaaaaaaataattgtacaatatatatctatatcgtgttttcaacacataaatagttattattctattatttttataagacaatgcacactttaactatttagcttctatatatatattgataaatcaatgagttgtattgcacaaacaaaattttcttttacatcctattcgcacccacaagggccgagttctatatacatcatgttcaatttatacaatcaattacatgttattaaattataaagcaagaaaccattctcgatcactgcttttgatcttcctaggcattaagctctcaattcgaattttaatagcccattttttctctgtaacaattgtaactgggtttgccataacttcttgccatatagtagcattcctagatttccaaagattgtataccagagcagttagagcagcagctaggacgactttcttgaattttgaggttttagctctctcaatccaacgcatcaactgagggagcctactggtttgagtatgccagttcttcacttcaagtaaacaggcattcgcaattgaacaatcaaagaatagatgttgcctactttcaggttgtgcattgcagagatagcagcagcaagtaacctgcacaccaaatcggctgagtctatcctgggttttcaatctattaagcatggccaaacaagtaattacactatgcttcagaatgttaagtctggaccacacttctctgctccaattcattcggtctagggcaggtaaaaacaacttgtaccctgcagctatagtatattgttgtctctaaaacacagctggatcaattggtgttttgagttgatctttgagggctaccatcttcttccaataccaactcgatgttggtattatatttatccag

SEQ ID NO: 120164 - DNA, 4327 bp, Cannabis sativa
atgacacttgttgtggtacttaatatcttaagatatcctttagcattttttattttttcgaataaaattataattatttttttttattaacgattttacattataattataacaaatatattttagtgattttttataacatttagatgatgtcagagatgactgctagcgcaaggcgatatatagtaggattattaagaggaagtggaagaagaaagtgatggcggcgtttggatatccccgacaaaaggaggcggagacgaaattggcaacgccagtgacaaactcgcttgattaaagtaaaaaaatatacactaaaaaaataaatgtttattcttttaatttgattattatactatagaatatttaaatagcccttacaaaattaaataaattatttgaagtaaacttaaatattttttatatgacgattcagctctcacataataaaaatttcgagtccatcacaggtgacactcactgttagagaaaggtattcatttaatctaatctacactatttcgctcacagtgcattcaatctagattaagtgcgattttatattttgaatccaatagcctaaatttagtcgaaataaattcaaaaaattgtgaatgggataaattattttaaattaattattttttaatattaaatgaatgaatgaatgaatgaaaagatgtgttgttgggttggagccggcggcggatagagagagctttactcaagtggttagttacaaaagggagtaagtagatagataagacaactcactcaagtggctcccatcatattcaactatttttaattttgacaaatgtccaattctcattgggtagagactaaagtccataaattaaacttcaaacaaaataaataaataaaatccaacccatgcacgcttcaaattttatatcatcaccaaaatttggattgttattagtattatgataagatcattttaatttatttatttctattaatagtggtaatgatctattaaattaagagtgtgcataaataattcaccttcaaatatttttagataaatacttaaattttatgtcactaattaattataggacatcaacaactcatagtgtcccatagtaccaaaatttgaattgttattagtgtaaagataattttaatttatttgtatgagtggcaataatccattatatatgtctatttcgtctttacttctatgtctaaatagatataataaaaaaattattatttttttaatcaaaatggctatatttacaaaaaaaaaaaagtaagaaattaaaaaaaatacattaaaatcaataataatattaattaacttccataaaaacaatcaaattaatccctccctaatctaacattatatcctcccaatcaaaatatacaaaaccaattctcggatcccattcgggtcggaactatgattgttcgggtttcggatctttacaaacaaacgggtgacccatcaacttcgaaaccgaccaccttttactcgactccttctgcaaacaacactcaacaaagctcctaaactcatcagaaacaccttccggcagactcggcggctcaccgaaacaaatcgaacacataagagtagcccaatcgggtctctgacccggcggaagtagcggaaaatgacccatataaagctccattaaagttaaacccaaactccaaatatcagcagcataaccatcgtaatttccgccataagtttccggatcaaacctctctggactcatataagcacaagttccaacgtaagaattacacgcgtccaaagtacggcacaggattttgcttaccccaaaatcggcgatcttaacttccattttcgaattcactaacagattcgccggtttaatatcacgatgaataattttacgcgagtgaaggtagtgaagaccgttaagtactttccttgccacgtcagcaagtttggattccgagaaagttccttcggattctagaacattctccaaggttccggaatccatatactccattagtattccgaaatctccagaaggtttctggaagatctcgtggcatcgaaccacgtgaggtgagtccgtacggcggagaatctccatctcgcggtggagttggcgacggactttggaatcggaatcggaatctgtgtggattattttcagagcgtagatttcggaggtttttctgtgacggactttgtagactgttccgccattgccgcttccgagaacttgaattttttctagatcggcggcggagattgcagcggaggaagatgaccagttgaattcgacggcggcggcggcggtggtggtggatggagggagtgggagagggaagcgtggtcggcgatcggaggtttccggtaaggggagacggagattgagatgacggcgttctctaacgacggccatgaatgaggaggaggagagagagtggggttagagagagaaagttgtttggattgttttgaatgagtggggtttttgggtttatataagtgaagaaaaaaagcacgtgggataattagaataatgagtaagtagaaaagtttggaataggaaagagataggatagtagagaaaaaagttttagtacaactcatttttttttttttttttaatttgaggaaattattattttaaacaattgtggggcatggtttgtttgtttgttttaataatgaattatgtaattttattattaataatatttagttaaaataataataataattataatttaattggaatatttggaggcacaattaaaattatataatatttttaaatttttttgagagaaaattaaaaataaaataagatgaaaaaaactattgcattaaattaactttaaaaatatttatattgagttttatctatattttagaagacacaacagtagaatttgttggagtaggttcattcaatttcgtagcttgagaactcagctatagtgtaaagtaagtaattgcactagtaattaacaactcttttagttgtagagaacttgttattctcaactgccaatatcgatttgatgacaatcatcagagaataaagaagaactaacaacgaaacaaaacaaaaccaaatcatgccacacagactaaaacattcaaaaccatgtcatagagaaaagactaaaacactcaaaactatgtcatacagacaaaactaatcgcagtagcaaaaatcgaattgtaatagcaaaatacaaccccaagtaagttgcacctatgcccaggggaggctggcgggcctggccggagaaaaaagacaacctcttgtagctatatgtgaccctttttttagttctaaagtttaggaaataatttaaataagagtaatttgcgtcataaatacttaagtttaattttaaataattttaaataaataccgattataaataaatacttaagtttaatttttggcaataataaataatatttaaattgtattttggaactttcgtaagtacctgtctattaagtgtcaagttaatggccacataacagtctttgattggtccaattcattaaatttataatttttatttaaaaattaatttaaatatactaataaagaaaatgacacatgaataataatttgacacttaagtattattactattaaaaattaaacttaagtattattatttttttgaaatataacttaagtattattactattaaaaattaaacttatgtatttatttatatgcaaccgaaagttttttttttaatttaagtgtagttttttttatttaaaagtttatatgaattgagatttaaatttaattatttactctacaaattagtactatttaaacaaatatgagatccacttctttgtgttttaatttttagtaaaaaattattttaaaaaaattatggggccacttgtaattgtttccatgtatttattaattaattattactactatttgttattaatgtttattctgttaatttattatctgcatgtgttttttttatcctattttttagtatcataataaggaaaaataaaaggaaaggaatgaggagaagaagtttgtatttattatcttctgtaaaaatatttaatattttctgaaaaaaaatataaaataatattaaaatattccataataaatgatattgaaaaacagcaggacacgtagtatagttagagtaattaatggtatataattaaaattaaatgttatctataaataaaattaattatactataatatgtaatatgagtgtgaagatcgaaagaatgttttcaggttattactttatatttgtatatattgtttacttgcacattatttttat

SEQ ID NO: 120165 - DNA, 2578 bp, Cannabis sativa
aaaattaacctaaaaataatactaaaaacaacctaacaaaaagcttggaactcttgaagtagagagaaaatctttcactatgagatttcgagatttgaaatgggtaaaaaagttagagagaagtacttttgtttcctttttataagctctctgaggggtatttcaataaaatgatatttgaaatttgggttttctcccaagaaaggacaataagtactcattaaaggtacaaccgtcaaaaacacattttcccttaaccattcttacaatgctcaatatcctatttatttcttaggtaagcatgcattaaatgcccaagatactgaagagacaacccataatttgcattgtgcgggcaagtcacgtcagatcagggacgatacatggggttaggcacgtgtcactcatcctaacaacttgcaggtctaataagtccacgttcgagcagttattctcacatggacttgggggacaaatgttatttcaatttctacacaaggtgacgtgacactcaataaggtgacacgtggagatcatttcaagacatggacaatttttcccctctgaatgatccgtctagaagattctacacttgtatttaagtatccaacaagcatatagactggatctgcacgtgatgctcagagtagaacatatttaagtcagctaagcaaaatgctctgcacaaaaggatatggtgaattttagatccttaagatattattcttaaatatctcctcatttatagcatggtcaataccctatatctgtgagatcggttttgaacagccaatagattctaaaaattaatgttagtttcctttttttttatttattttaagtaacaatattcattatatctcccatataagtagcggagtgattccattttgttgatggatttgacgagggagcacttacgctaccaaaatatttgtgagctttcatctaggttgttaagaaatttacttggccaactccttgtgatcttaataatattaaaagtaatacaacaaaaagttgagtagtctcttaccataatcacaaggccaaacctctataaaatttcttgtgctctaattgctcataatcatttcctattattatcattcataaatatatctctttaaagactcagtattgttggctaaaatcaagatcaacaagtaccatttttatcaattttcttttacccctattatttgcggctggctccgtcattggtaaatgttaagtataatataaactttacaaatcatactcatgaacaatatggaatagaacacacacataatatatattggataaataattaatttaacacaatatttacttaggatgtgtatggaagcaattgtgtaattactatgtagtttagtttctaggatagtaattaccttatatttttaaatacaatgtgtgtttggatgttaattacatgtgaatttttattgtcatatttgacaagataattggtaattacacaataaattaatattgtgtaataatatttaatataataattattatcatttgaagcaaacatttaaataaatttatcttttaataaaaatatcttcataaaatactcaaatttcttaatatttttgtaacaaatatttaaaataacttttgtctataagactatctaattgttgttgcgttccatatatcttgaattattgtactactgtatggttttccagtcttaaaactttgagtatttttcatttctgtgttgatcaaaaattaataataaaacaaatttaagcatttcatcaattaaaattcatgccaaatcatgaataaatctattagatatctaatttaaaagagaactccaaaatgatgttaattttttttttaaaaaaaatcaaattatcatatatatatatatatatatattttacaaacaatacaagaaaaatgacattaaaaaaatattataaaataacttcataggacaacaaataaaattatgtatatgagaaatgaaaataataaagaaggcctaaaccatattaaataaataaaattatttttggtatgtaattacacaatatatataattacatttaatacttatgaggggtatgagatttggagagagtaattgaggcctgccaattacgtctaattatacagttattttgtaattacatggctcaataaacacgctaaattgtgtaattaactttaattatatctaatttcaatttttacatggctttctaattaactttataaacatactcatataattaccaaaattctagagttaaagcttaataattgtgttaattaagtgtaatataatattaatcctacaatatacattacacatatatatacttcattttctatattgagacttgatataataactttaattattatacattatacataaactattttaatagcatttggaatttatgcttattatataaatgtgcatataatgtagggatattgacggttaaaccacctgaattttacagtttgtaacacttaactacaaaaactgaaattttggcacctaaactacttaaatcctagttccattttgctttgcaca

SEQ ID NO: 120166 - DNA, 1001 bp, Cannabis sativa
ttttttttttttttaatgaaagtcattttattaaacgaaaatctctattactaaattaggcaataattcaactggaacattcatattggttaggtctgaattaaacgttgtacaaatctaattaaaacaatagagatgactcaaataaagacagcaagaacaatgataatgcaaagactaatccacacaaagaccaccaaatgaatactaatcacgattagcgccttataattgaatgttgctatgcaaatcccttttctctagtggctttaatcgtaattttttatatacaataaaattgttacattgtactaattttctatatagaatgattaataatccaataagtattgtttctttagcagtcaattaatgttctcaataaagcaaaaaaactctaatttactattcttggtataaaaatgaagaaatacacaaagacgtgttaagattaatcatgaaaaagagatatatatcttagggaatttttgtggtcaattcattatcacttattgacaaaaaagacttataaagataatataatatatattcttaattagcacattattaattgtttgaatgatatcatttctgagtttgaaaaagggtataccaacaaattgaatccttattactaaataaaattgcaaattcagacaaataatggcggctaatattgaatatcgatctagaaatgcaataattttaaagggaaacgtaaaaagatcgactttgaaaaaataattctttaaaagtggaataattaatatagagaagaagttgtaataattattcatacatgtatacatacaaatcgagtgcacatgcagtacagttaaaaataattgaaaaaagaataaaaattaaagataattgaataattttctatattaatttggttcaaattaggtagtgttgagtgtatattattgactttgtttctttctttctttctttctttctaattcttaaaattatcaaacaaataataataataataa

SEQ ID NO: 120167 - DNA, 1879 bp, Cannabis sativa
aggctatgtcaggacgagtatgaaccagatattggagagctccaataatacttctgtagtgtgaaggattctcaagaggaattccatcatgtatggacattggtttccctgcagtcataggtgtaggacatggcttgatgttcttcattttcagtttgtcaaggagttcagcaatgtatttcccttgtgtcaagtacatccctgttgagtctctatgaacttcaattcccaggaagtagttcagttgccccagatccttaagagagaacactttgttgagtttcgtaacaaaggactgaatttcagtggcattatttccagtgatgattatatcatcaacgtaaatgagtgtcatgataacaaagttgggattttgtaacataaacagagaactgtctgccttggattgcatgaaaccccagcttgtcaaagtttgtttgaatcgattaaaccaagctcgaggagcttgcttcaggccgtataatgatttttccaacttgcacacgtggtctggtctgtccttgtcaacaaaaccctctggttgtgtcatgtacactgcctcttcaagctttccatttaggaaagcattattaatgtcaagttgtctaacttcccaacctttagatactgcaattgttagcacaaccctgactgttggagcctttataactggactaaaggtttctccaaagtccaaacctggtctttggtgaaagcccttggctactaatcttgctttgagtctttgaaggctcccatctgcattatacttctttttgtacacccacttgtttccaacaacattataatctggtgaaggtggaaccagaacataagttttatttctgagtaaggccaggtgttcagtggacattgctttgttccagcctttatgtttcaaagcctcagcaacagagcttggttcatcatcattttcttcccattttgttttgctaagatacaccttaggcttgtaaactccagcctttgaacgagtaaccataggatgagttgatgttggttcaattgttggtctgttgtcttctggtttaggttgttgttgctgtaaagaacaacctggtgactcagtggtaggtgaatcatttgagtcaaagttcaggtccacaaataaatgaccagtcagatccatctgaggttgtgagaattgaccatgagactgatctgatggtgatgttgcaggtgaaacttcatttggttctgtatcaactgactgggtgttgtttgactctctttggggcacactgggagtgttttgttcttgataagttggtaaaggaaaccaggagttgggtgtagacacactgacagtttgttcaagttggtgtgtgttgagaaaaccagacttgaatggaaactctttctcattaaatacaacatttctggatatgtataatcttccagtggaactcaggcatttatagcctttgtgggattcactgtatcctagatttacacatctagttgagtgaaattggaacttgtagttctggtagggtctcaggcaagggtaacaggttgtgccaaaggtctttaggaaggtatagtctggttttctagagtacaggacttcacatggtgtttttccctctaagacaggtgtaggcagtctgtttataagataaacagctgtctgaaatgcatcaacccaatacttgaggggcattgaggcttgagctaagagagtcaatcccatctccacaatgtgtctgtgctttctctcagcacgaccattctgtgctgaggtgtgaggacagggatgatcaaaggctattccacattctttgacaagtgtggaaaaggcttgatactctccaccccagtcagtcctaagacctttgattttagtgtcaaattgatt

SEQ ID NO: 120168 - DNA, 1243 bp, Cannabis sativa
ttattatttgaccaagataagtgaaagagacacaagacaaaacattggcttacaaaacgacatgtcgttgcgttggaagttaatttaattctatttacacacgctgtaaatatttttgaaagaaaataaataagaaacaacaatgtcaattcaaagaaaagtcaatgatttctgttctattttcttcagccacaaacaaatgaagcctgttcaactcaatacctttcttcttcttcttcatcgttccaaattttcttttgtaaagctttaactcaacaaaatcttcgatttttctcagatgggtatttcatggagtggccgaagaagaaacaactacttccaaaacccacctccagtgccgccgccgcttcccccaccgccaccatattactcaacggagcttcatcctcctccccctcctccgatgcctccggccccggggaataattatgtcttcgccactgctacttcatcttcttaccatggtcccccgaacagtcaatacgcacccccgggcccgaacccacctcctcctgttcactcccactacttccccggcccttacggtcagtgcaatcacccgaatacgatgatgggtcggtacaattaccagccttattacgcaaatcagcccaattggtgggccccgattcgccctccaatgggtcaactaccgctcccgcctcaggctccgccgcctccctttgtggagcatcagaatgctaagaaggtcaggaacgacgtgaatgttcataaggacacgttgcgcgtcgaggtcgatgagcagaaccctgatcaccacttgctctcttttgtttttgatgccttatacgatggaaggttagcaaagtcactttctatttttcttttctttaagggtttaaattgttgattgcgtgttgttaaggttcaggccagtgatgggttttaggttgttcgtttgatttatgtaaatgtagtttgattcttaaaatcattgttgattagaggcatagaggaaataatgaccaaactagtaagctcacttaagcaaaatatgactgaattttgtttaccttggttgattagtgttggttatgtgtggttgtgctccggtagtgatgggttttgagtgttttgtttgatttataattgggtttatgaaattgtagtttgattcataaagtcattgttgattaggagcatagaggaaacaatggtccaagctagtatgctaactatagcaaagtttgaattgagtatg

SEQ ID NO: 120169 - DNA, 660 bp, Cannabis sativa
tgttttttaaaaataaattttttagaaacaaagattttactttcattttgtgattaaaaaattaaaaagcaaaagtgttaccaaacggcaccttatattattatattgtgtcttgaccaacgaagcatgacataaggggcatgataatgttgtgtagtggtgttatattataaatatatgtatatgtgagatgatgagacacatgccttatatttcaatccttacataatcttaaagcaaatatgattatataaaaacataattaattggttctttttcttttcttttgttgcataagtactctttttttttttttttgaggaaatattttgttgcataagtactagttcaccatggtgtaaaaattaaaatcaaatttttcagaaactttctttaattgattttactttttaatggaaaattaattttattaatcaaataaattcgctacttatgtgccacaacaaattaattggaacatttcccaaagtgaaaagatggacataataaaatagaaactctaacaaatttatttgccaccatattatttcactctttaagagtactcttttgttgagttaatagctcaaatttcataaggaaaatttgattttctatacttacatatacctaatattttatttctaaactaatacatat

SEQ ID NO: 120170 - DNA, 2691 bp, Cannabis sativa
  modified_base (2622)..(2637): a, c, t, g, unknown or other
ctccacctttgccagtgcttccagaggccaagaaaggcaagaagatgctcgcctactacatgaaccggttggttcctgaggttagtgagcaactagctagtgctaacaacaactcttctttggagctgctgatgggaggagtcttgaaagaattcacaagggtaagtctttcttgactttttcctttaatcctctttattttgctcggattctaaagttttttctctgcgcaggctggtctgaagttggcttacacttactctcgagctaagtctgttgcttccaagaactcagctctgtccaacaccatgagggcggaggtggacttggccaggaaggacgttgatgacgccatggtggaacttggagctgttcagatggacctgggtgaagtcaacaagaagctttttactgctcagaagaaaataactgagttgactaaggatctcaaggcttctgatcgacttgaagagaccatcgagaccttatctgcagaagtgagtagcattcaagatgaaaggacgtctcttcgagttgtccttccttggctggaagaggagaagaagtccaaggaggaggagcttacagctgaggtggaaaggctaggagaaagagtccatgccttagagacagctggtctcgagctcttctatgacttttggaaggctaaccctcaggcaaactttgattacttgggtgaagccaaagacatgtatctcgagttctgcgcttcccaagtggcttatggtgagcctgatgcgactgcttcttcctctgccaaaatgctgatgtacctcccgttcaactctgagatggttaggttctagcttaattgtattacacgtgctctttgacttgtttgtaaccagcttaccaataggactatcgtgtacttacatcttgggaacacgctagtgtaattgagttgtaacgctaatgatggatatggaatctatagcttctataagtacatagaagtgaaacaatagtttccttagagcttgggtaaatgagtttaaatggtagagtactcattttggaaattatattagtttctcgaaataatatttacaagtagtcaagtattttaaggataaaatacattgaaggttaaaacggtaattttctccctactcgatgtagactatctataaatgatcattgattggttagattaaacaatgtataattataacatatttattcttggtgaagagagcattctatgtaataaagagtgcgattttgaatctatagtagagtcaagaggaattaataagacagagaatttgctctttaaattctaaaactatctactgggatcttgattacatagactcatagtcctcacactatctgagataatcttcttttgtcatctcaattaattgatttataaatcgattatgattttaaataagactatgtcatatttatgaattttattaaacaagtgattatttgagaagaaaagagaatttaaggtttgtttattaattaaaagaccttgaatggtctaattaataaatacatataaataatagttttgtttaataattaattataattattaaataaagaaagtcagcatttatatacttagaatagaaaaataacaattttgaggaaatataatgttgttccactttaagaaacaaaagtggtaaaaataaaacttgtgggccttcataagaagttcggccaaacggttttctttttgaagctttgggtctttttcttcagcccattttagttctaaacctaccctattgtcagttggtatattgtcttactattatctttttgaattttttagtttgctggtcttttttttgggcttaattctcttgtgtctttttttgttgtatattgtgctttgtcgttgatcataatgttccaaggggaagattataagagccatgtttttgtttggcaagttatgttgctttattttggtttagttgtattgttattctggtttttgtcttagctttttgaattgttcatagttgatctcagttgcatctgttttgtctagcttatcttacctttgccaggtccactttttagtttgtttcttaatttagttcaactagttaccagctggcttgagctgttgagttagttagttgggtcggttttaccgaaatgtgagatacattaagctgattttgctttttttttttttttaactaactctccatctttgatagaactctcacatagttcttgctctgctagggcagaatatttcttttttgtttgtttctttgattatgtattgcagatcgtaattcattggatcatcaagggttgaaaaaggagtgtgaatttgtaatgtctgaggggagtttagactgatcagctgaagggaattcaacttggtagaagcaagtggatcttgtcttctcaaatctaagagttcttagatttttgttcttatttgtattcaagtattcagtatctctttgtgtaagatcatttagattatgttgttgatttgtaaaatcaaactgaaaaatgtactctgattgattttatagtggagattactttatgtaatttttaagaacccaaacactactcggttagaatatgtttttgttgaccgagattttcggnnnnnnnnnnnnnnnnattataataaagagctgtaagaaagtgagatgaagattttttacgtggttgggg

SEQ ID NO: 120171 - DNA, 1749 bp, Cannabis sativa
tttgggatcccaactgtttaaaaatttaaaagtattacaagttttatttttattctgtttaatttaaaagtttaaattctgtgctattttgattagtaatcctgattagaggattagggttccatgagtattttgggtggcgtgcctatttatttagggcgttacagatactatcttaattagaataccaaacctacatatgatgttcttgatgataaaatcaaggaccttcttgcatgtgatggatactggaggttcaacttctgtccattttgtgaaaaagttaactgccacaacaacatattttacgccaccttgacctgtgggtaaagacccaattaggtcaattttctatattgcaaatggctatggcaaggtcatcattcttagctcggtgtgtggtactcaaggtatatgtgagaacatttggcacttgtcgcatttcttgacaaactcgtgtgtgtctttattaatcgttagctagtagtatccttgatggattatctttttagacatgctttgcaagttttgccaacttgcatgatctccacagaagcctttatgaatttcttttattattttattaacttctgttggtaacacacatcacagtggaggcatggaatatcctcttatgtacaattttccttcgaccatcattagcgagtaattaaatataagagtttttatgcctcaattttatctgtgggaagttctccatttaatagatatttgattattggtgtcatccatgtaggcctcgcatctatcatgttgatatcttcctcttcacatatacttggctcgtccaaaacttccactgagaccaaattcaacttgttgagatcaaattgagatgccagttttgctagggcatccgcattagagtttttttctcttggaatttgttctattttgaaataatcaaaattttccatgttcttctgaactttctctaagtatttggccatttttaggcccttcgcttggtattctccaaagacttgattcactattagctgcgagtcacttaagcatgcttaatttctgaatttaactttggaaacaaagtcctaatgtgacgggattcagtattaaatgagtgttgaatcaaacttgaaattcggaggcctattaattacctttctagaagcatcacatgaagatatttagatgctctcttcactaaacttatctttctcctggacaagaaccctgatggcctgactttaataagttcggtccatcatcctgattgggcctgtaaattggacctttgttaattgactttggatattggaattacaatgtccctcttctggaaacacagataatatttactcccaagcttccaaaattttggagttgcggaggcttgtagctttctttctagatggtattaggaaacgtggatgtttaaaactgtcacctatagtatagggcacaattataaatcgtcgcctatacccaagcataggcgacaattttaaactatcgggaagtacaaactggtgactgtttcgaactgttgcctattttacccgttttgcgacggtcgtattggataactgaatttagattgacatgataatcagtgataagagcttacttattggataactattatgtcctttctagggcattggcaaagtatgctaggatcggatgtatgaagtatgcatcaaactgaatcgatattgaacttggataagatatcataaacttattgttatatctatctaagtcaat

SEQ ID NO: 120172 - DNA, 1321 bp, Cannabis sativa
atacataattatctagttagggttttgctaatccatttcttaattctgggtattacaggaaatgttttgagccacttctggcagttaaagaatcttttgagctcttgaccttaaacctagggtgaagggaggatgatagtagaagggaatgtgctggaaggaaagttggtcggtacccatgtctttgacaaagtagtaattttcgataaacccaccgatgttggaacaccacttttttggtagtgccactcagccactggtactcattctgggtgaaatagaaataccctaatctattttaatttggacttaattttagatcgaacactagttggtgttgtgggcagaaggctcaccccatccttgagtggcgtacaacacaaatagtgcgaccaaatacttgattcctttggggtgaattaagtcgaacaaagcttgtaatagttagccatctccttgaaatatggatgcaagggtagaattgcacaattcttagcatgaggccctgaccatgtgcaaaatccacccacaggatttgtagctagctgcctgggactaggaaaaaatgcctctaccttcctcgaagagattagtcaatctcatgaaaattagaatggatggaggtgagacccacagaggacctttcgtccctttggtgctcatgggtcgagcttccttgtactcctcattaacatagtcttggccctccaccaagacatcgctcagatcgaagacaggttctccaacctcattgtagctgccaaaaggaagtatttgattttcatcttcctcttcttcattattcactagagaaaaaatatcaacattcgttgcataaaacaaatcatggactttaaccaataattattatttcataaaatgtgttaaatcaatcaccaagaatgaaaaaactcaatattgggatccaaaatacacattttattatcatacacaagaccaaagagagcaagaaataaatcaatacaaaaataaataaagagcataaaataactacagaaacattcattacaaattttccttaaagttcactctaataattgacctttgaaaggtttgtataacactgacatgaccctattatcttctgatatgctaatagcaccaaaacaaagtaaactccttgtatttactactgttgcatcaaccataagaattgtgtgagaaatctctccttaatcacttttaggcccctattcctgctatatgtttggaggcttttcttgaagccttcttttgctgatatgatagatgttgtgaaaattatatacgcaagtatacgcagtcacacaagtaataaagt

SEQ ID NO: 120173 - DNA, 1041 bp, Cannabis sativa
ttgttattttgtattatttgtttttatttgttatgtcatagaactgattctatttttatttatatctgagatatctacttattggtgactttttcagtgacttttctggtgacaacgacttttctagtgacaataatttttccggtgatttttttaacactagcaacttttccgacaaaatttattattattttataaatatgagatttttacctttttttttttacaaaaacatgacataaaaaagcccatataaatgtaaaaaaaaaattaaaaataaaatacataatattacttatttatgccataaaaaattaaatttttataattttttaatatattaagtaatttctataataataataaatattagtagttttcaattatgacctaaatggaatgtgtatatatagaaaagaaaacccctaatatatagaaattgactatttctctacccacttattagttttcctctccaccaagaaagcctatctatagaggtgaagaagaagaaatacaatttttggatttcttcaatagaaatcaatgtctcttactatgaataagatatgttctcttaaattattatgtaattatgaaaatcattttgttcaaagatattgcctattatgattttacataaaattatattgtgatttgcataattataaatgaaaattacattagtttactatttcatttttaaatgaaaattcattccaatacaatattttaaaaaaaataataatcattttttatctatattaaaatttattctcattcttacttttatttttattttttaaagactaaaattgtagtgaaaataattattcgtagtaataaaggtttaatggaatgaaaactctcataaaatgaatagtgataatccaattaaaacaggtataaaacttgtgtataacagcacgttcaaataccctatttattattaataataataaaaataagggaaattttcatgggccaccttattttggcaattattttcaaaaataacgttgtttttgttatgttaagttt

SEQ ID NO: 120174 - DNA, 1700 bp, Cannabis sativa
tctagatcctggtaaaatataatccaacaacaatcacctctatttcctcaaaattttctattacttcccagtgttccggaagctttagctttctgtttgtgatctgggttgccattgtcggtccccttactgacactaccacccacactagggtttgatgccgtgacaacatccttagaacctttctctttaatcacatgttcttttgcctcttcaacaatcaaggctaacttgtcccaatagatagttgcattcaatcccctttcatatttttgtttctgggtgacgtctatctgtaacagatcacctgcgaacttggataagtgatcgaattccagggtatactcggccaatgtcttcttcccttgagtcaacttcacaaagtcttccatatgggaagttctgatggcaatgttataaaaattttcttcaaataggctcttaaattactctcaaaacatagtactgacatctcgagtctgcctcacaatatcccaccagacacgggcatgttcttgaaacatgaatgtagcatacttaacttgttctgttcctgtcacccccatattatctaggatgcagataatagtgctcatcaattggtcaaccttgatgatatcattacctccctaaaatgttggaggttgtaacttgacaaaatgttcaaacactgaatctcgatgtggtagaataaatctcaggttacccagcattggcacaggagctggtggtaacacttgttatgttggggctgtcagtgctgattgcctaaaccagcgcaattaatcttcttgacgaagtatgatgcttccaattttgacaaacattggctgccagtcggtaggtggattagcattgttaacccctgcattatccctcggattctacggaggtgcaggcggtgccggtggattggcttggtccttaccaggctctacgtggtcgccctgtggtctagatgattgtggaggctccattctttttcaaatagccctgaaatcaacaaccctggtaagtcaggcacttgatccacacttacacacttattgccttaacctaaacttatacttactatttctctttttaaataaacatttatcaatttaaacattaatcatgattttcatataacattcatttctagaagctcatatgctgcctaaaatggaaaatggtaaacaatttatcacataaccagttaagcatttactctcaacacttattgcaccatgagtcgagcttgtctctaacgatgattgtacatgttcagtcggcctacaggaagtttaaaacccttggcgctctgatacaaaattgtaaaactctaacaaataggcacgctacgatcccccatgctacataacctaatcccgctaaactgggattaatagaaaagagcaaaattaaactttaaattaattacggaatgaaaatataacttgtaactattacaattttacaaaacattccaaaatattacacacgttttcggatcccgtaaaaaacctttgagaaacattacaagttatttttacatgccgacctaaatggaaaaaatagagaataaaaaacacatcaactggtagactcaacccgcgttgtcacaaactaatttaccctttcctgcacagtagagcacccgtgagccaagcccagcaagaaagtataattatcaataatcataattaatacatcacata

SEQ ID NO: 120175 - DNA, 877 bp, Cannabis sativa
  modified_base (781)..(781): a, c, t, g, unknown or other
aatttaattataaatttatttgtcttaaaagttatctttattcttatttttctatcatactaaatacattataaaaaattaaaactcaaagaacttgttattttttgtatttaaatttcattcaattaatatctttgtatagtaacttaaaaaaaaaaaaaatatttaaacagaaatgatcacaaaaagaatagaatgattaagcaaaaataaataaataaataaataataaacaaaattaagaaaaaaaaagcccattgaaatgagtactaaaaataaagttagaagtaattatttatataagtagtaattaagtttcacaaaatgaaggaaaacttgtgtgtgatatctaatattaaacaaaaaataattaagttttcaaactgcaagctaaatatttataacacgtaaagtaattattttcagggaaaatgaaagtaatttgagtgttatgctaattttggctttcatttaaactcaaataataagaatttatataatttggttatattattttatctctacttttttctctttgtttcatcatttctttttatctctctcataacttctatctctaagagtaaattatcataattttttatgtcatttgtaataatatgtttctgtgtatgaaggacaaaaattacaacttatccattttaccatattttaatgtgtaataaatccatttataaataagacaaaacaaaaaaattaaataaataaatgaataaataagtgaatgttatgaaataattatggtgccgtttggtaacanttttgttttctaattttttaattacaaaatgaaagtataatttttgtttttaaaaattttgctttggaaaaataaaaatgcgttctgtaaccactt

SEQ ID NO: 120176 - DNA, 1518 bp, Cannabis sativa
gcaaatttaacgaaaaatctgcgttaacacttttcatataaaaaaggtctatattggtgggctctatgtgcactgtcaagattgatcaatctcgggaggtcaagctcaccaagataggtatgtaaatatgttgagaaatgtccaaaaaagtgttagaattgtacctatcttgatggaccttaaaaagcctgctgagattgcatagaaatcacaatgggtcaggactatcgaatagtccgttattcaatatcggcaaccaaattctcagtgcgcaaggatcacaaagatagagaaataacgggggatcgggcccgccgagttaaacctttttttgtggtgattagatagaccattcaaaataaaattcttacacagaaaattattttatacctaggagttcctttccttaaactacatttcatgcttctcgagttcatcctttatcttggcaggaggaggagtctcagacacaacatgtttcaaaacagtgatcagttgaaacacaactttttcatagtgacaaaaaaataacatattttgtctctaacatttaaaatgcaaactctcaaaatgaaaaatctttttaaatcagcagtaaaactagaaaaatcattggtagtagtcatgatagaaagaatgtctacaaaattattgtaagcactgctacggaaaataaaagaggaacgatattaccaaataattttttttggattgagtcgcagactaggtcgctctctttaagacgtttatggtactacccaagaatgttcaagcagtaaaaaaaagtgagttgtccccaagataaaacaacctagtcgtacattgtatccaaaccccactacacatactaccctctaataatattaccattaaaaaataattcgaatgagaaaaattgttcataaaagtggatgtctttctcccttggttctaatgcattatatagagaatacacagaaaaataaaatgagaagaaagtgacttttttgtaaatcgtgggatagttggatcgtggttaaaaaaagttgaggagaaaagtctcaatttacaaattaaataaatacatttaaaaacaatttaattaaataaaaaaactaatattttaataaataaattttctccaaaaaatatggtagtacaccaattagcttggacggacggtgacgatgcacgtggtgttcatgtgagcctgtatgtgactcctcccccttccaaaaaaaatagatacctcttaaggtcaaacctaatggctcacatctacaatgtatacacaattacaaacaagtggtcgatagtaatgtgagactaatcctttaaggacatcaaataacactttttaaatttttcaggtaccgtttggtaacacttttgattttttatttttttaacacaaaatgaaagtaaaatttttatttttgaaaaaaaaagacgttatgcaaccacttttgtttttcaattttaaaaacaaaaaataaaagtatgttctgtaaagttcatttttattttttgattttattt

SEQ ID NO: 120177 - DNA, 2495 bp, Cannabis sativa
  modified_base (32)..(35): a, c, t, g, unknown or other
acacaacacaacacaacacaatacaatacaannnnatacggcgtaccaaacgagtccaaataagtttaaaaattaaaagtaactacaaaatacttgtgcaaacaactcaaaaatatatatatatatgtacccataaacaaataattatatactcaattttgtattggtcaaacaacttaataataactaaaaaataattgcataataatactacttatatatatgtaaatcaattagatatcaacaaataatgtaaacaatttgaatgaaataaagaaacaacaaacaaacaatttcagttaaacaaataaaaatcacagatataacattaaaaaaaaactacacggttatataattttatttttctctttcatcataaatacccacaaaatatatgtatatatatatatataaataaaacaacaatcttcatatataactttatttcttccatcataaatatatataaaaaaaaaaacataacaacaatcttcatatatgtaccataaaaaactaaacatatatatagttttatttttttcttaattgaacaactaaataacaaccaacaaataattttataacaacttcactataaaatgtaaataaaataggaatcaaaataactccacaggttgcataaactctaaaaaaattttaaaaaaatctatgtacaccgatttaaaaatatatttaccagtaaaaaataaacatatactaattttctcttagttgaacaactaaataacaacgaataaccaactcaataacaactcactttaaactaaaaattaattaggcatcaacacatagcgtcaactttaaaaataaataaaaataacatacaaataaaaaaaaatatgtatatagtatattctttctttcttggttaaataacttaataacaacaaataaacaactgtataataactttactctaatatgcaaattacatgagtatgaaaacaaactccaaaaaagaaaaaataccaataatttataaaataaatttaaaaacaactgcaaaacacttgtataccaactcaaaaatatatatacccataaaaaactaaacatatacttatttttctcttggttaaacaacttaataacaatgaataaacaacacgatattaatctcattttaatatagaaattaattgggcaacacattgtgttaactttaataactaaacatatactcgttttttttttgttgaataactaaataacaatgccttgtacccagatcacgatatctggagaagatttgcagcaggtggcgttatgtgacttcatcggaaactaggaaatgcttttcggaatgatgtatactcttctttaacctaattaaccttatatatcaatttctactaaaattattataaaatattaatatttaaaaatttaatgcaagcacattcactacaagaaaaaaagtcttttgacactacaaaattcgtgtctaaaaacttcatttttcttgctaatatacttttagacacgatatgtggtacctattctgtcgtgcctaaagagagtttatgggcaccacatttaaatatcgggcctcataataatttttaaataaaaaaatatatatttttcgaaagactattaatatatattatacataaaaataaatatatatattaattctaacaaaataaatatacaatatatatatatcattatacaatatatatatatatatcattatacaatatataatgaatttattaaaacaaaattatataacatgatgtataatttatataaatttgaacatttgacataaaaaatttatttattcaacaaattaattatatgctatccaataaatatttagaatctataaacataaattatatacaaataattaaaaaaaaaactatatacaaatatctattacaaagatgaaaaatattattacaaaaagaaaaaaaaacaataatttatgaagatgccttgaactaccgtcgaagtacgcacgaactatgtcaaagccttgaaccaccatcgtatcctattgtgcctcttcgaaagcccatgcaccatgaaattggagacgccttgaacaccgatccaccattgtgatattgtctcgctgtacacccatcaccaccaagagtttcttgtcgaattgcgtcgttccataacaacgaggtataccccatatttgcttaaattgcttgagagagattacaccgaagaggtgtgatgtcttcaatattttaagagagatgagctcaaccagaaaaaaaaaaatagaaaggagaagaaggaataatggaggcggctagggttctttaagagttggatgaagagagtgatacatttatatttatgtatgtaaatataataattaaataaaaaatagggtaaatagtggctaagtacctaaagttttaagtttgtaagtggcataatcctaatgtttatttttagcggcataagtacctaatatttgtaaaaccgtaaattttctctaattt

SEQ ID NO: 120178 - DNA, 514 bp, Cannabis sativa
  modified_base (79)..(86): a, c, t, g, unknown or other
gtctctcatggacgtctcagctttcattagaaatctgagcacacgtgtcctctaaacaggagtctggtctcgagtttcnnnnnnnnagaaatctcactataacaacaacctgcttctatcacaatgtttgggcatttcataatcaagcttttcatcaacacaacctgctgcttcccttggttaagatggataaaaagattgacttcagcagtcattagcaggagtaccgaaaatattatcacttaagtgctcatagtgatattcaagctaggagcaagaatagaacaaaaaagaaaaaaattagaaaaactagtccgtcgaaaccatagctccgaaatttgggccttggctccgtaatctggagtcatggctccagaagagaaaattaagttgagaaggccccggggctggaactccaccatagaaactgatttcctatttatttttttttaattataattgatttttgagttattatgtgttatttatttttgttgcaataggggtttctata

SEQ ID NO: 120179 - DNA, 862 bp, Cannabis sativa
ctggagtcatcaccagagttagacgttgaaaattaacttacagaaaccggttacatttatcagttagtaaagcaaccaagcaaccaaattaaaaattaacacatcaaaactagtttttttaaaataaccaaataaaaaaattaaaacttatgctacaacaaaaaaaaaaaatcaaaccaaacataagaaactggtaacttaaaataaacagaaactattatttaataacataacagacaacaataaaacatatatataataaaaaaaccacaaaaagaaaacatatataataaaaaaattaaaaacttacagaatcagaaaagaacttctcacaaaaattgagagtataaaatcacattttgatatactacccatgggtctctttcggataacaatatccttaagaaattgaatagcccatgggttcccaagtccatggaaatttcagttgaaaaaattcataatgataggtgggcctgacaaccaggacccacccttaattcatttttgacccatcaacaccttccacatgagtattagtttgtccattaattgagttcaaagcttgatccacagagcatccattcatagcatgtggcccaacatcttggcccatcttagcccttcttctttttaagtcaataaccaacaatgactaagcctccagattaatattttgaaaattagtatcaattttgtcttcctgatttataggaggatcacccacgtttttatctttgcaagcagttgtcaatcctacatcatgaataacttgttgggttttatgccctaaataaaactatatttcaatgtaatccagattattcaatatcaataaagtaacaaaagtatttttcattca

SEQ ID NO: 120180 - DNA, 2352 bp, Cannabis sativa
atacttgtgagagatctaagttcggtaaaataaattccaacagcttccaggtatggctcgctaaaggcagaaggctttgcaattgcagaactgggatacattcctggaaggactaatccaagtagacttgaccaactttacctttgttgagggtcccattgatgggccttaaatactgacctggattccatgtgtccaatgccagaatgtggataacatttacccccaagcttctacaatgttgtgtatggtggcagcttgcatcactctttcaatatggacatatggaggccaaggaataaaatcatgatattttaaatgttactcaaccgcggaaggtggctttcatttataatgataatatgtccacatgtcaattgcgtgagaatgaaagggtgtgaccatcaaggagttgttttccaaaaatagctatattttttaggattgttcacttcttggcacaaaaattgaaaaagagcatcttcatcattggtctgcacctcgactctagggaacattaattacgaggatatgcgtggatcgccaaaaattttaattttaaagtcaaaagtagaagatttgaaattagtgatctaattttgagaagggtatttctagcctcttaagagctaggagtggggatctcaggaccaaactgagaaggtccatataaagttcaagataaaattggtgataacacccatcacttgagaaggctagatggaacaaaaattctgagagcatggaacactgactacctacgatgatactatcagtagactgggggtggctagcttccttttactttttttgctttttattttttcaattcccatgtacggctcagggtaggaatcatttgaataaagaaggatttttcatttcatacttagcttttcaattttttttcttgtaacaagtgatcaacaatttaaactcttaatcgcttggaggtagcatacattatatcattataactacctcttctataaaatataactaaattaacaataattataagagtagaaagtatcgcctaaaaccgaagctctagggaactaaaagtaagccactgccttattagacttaaaattaatttagtgcaactgataattaactcaagttaatttaagtagcacaaatgaagaccaacattgagcttagcgcactctgaaagccctgaaacctagcctttcaattttaagaagaaaaaaaatgttgatattcatctctttgtcttggtctttatctttgtaactctaagagcacaatgaatatcgaaggttcgaccctctacccacaacacccaaaagcctcacgaacctaggttggagtaaaagtctaaccatttatggcgttctcctagacccacaaaacaaaaggttatggcttgatttattttaaattattttgcattttagttttaaattgtgagactgtattgggagattagtctattgtaaattgatagtttgatttgttagtttttattcttttgttagacattatttgtgattgttttttggtttatctctttttttggtttttgggtgttgatttttggattttagaaatgtggtggtggtggtggtggcggcaacagcggtggtatggttgttttgtggtggtggtggtagtggcaatggtgtggttgcagtggttgtttctggtgatgtagtggtgtggtgttatggtggtggttttggttgagatggtattcatggtaaaggagggaggaagagagaatgtgaaagagagaaataaaattaatttttcaaaaaatattacatggacaattcaccttgacacttactagactaaagtaaatggaaaagaaaataacaaaacgaaatgaaagtatgaacaatttaacccttaaagatttagtaaaagagatttattgtaccaaaccgttcaaatagtttaaccgacaattatccaaatgaaatccctattcaaaatcatataattgaaaatttccctattgctctttttaaaaaaataaataaataaaatttggagttttaacaagattttggtaaaagtttataattttattgacacggaattttttataaaaatactgtctttttataaaacaaccgtaaaataacaaaatagaataattaaaacaataaaagaacaactaaaaaataactgtagaacaacagtgaaaacttaaacagtacacagtataaaacttacaaagtatttttaaaaaaaattctgcccacagtaaaatagtaaaaaaatttgaaatttctggtgtaaaaatcctatcacatttcccattgtgaaaattacatgaaatatgggatttcataacaaagttagaaaaatatggcattttta

SEQ ID NO: 120181 - DNA, 747 bp, Cannabis sativa
atggattagtgattgagaagtgtgtttggtttaggttatgcgctgaagagcatcattttttaagaaactttacttttatatattttaaaactttttttctagttaattttatatgtatctggcatgtgatattgaatatcttcaagtgcagctaagtttggatgctcaggattgtagccttcaactcctgcaatgtttccgacaactaggacatcaccattcaaatcagaacttatgtcacaaagagcatcctcatttgcatgccactcacattgacctacaaagaatgaaaccttattttcattaaaggctgcccaattaaagctgacggctaccccgctggccgactaagagttgtaggttgcatcgaagtaatagcccctgtaaagagcaacgtcctcaattgcctttgcctctagggccaccacgtagtcctctaggcaatgaacttgaccttccaactcagcaacacttgaggtcttttcgtcaagagacttacggagggactcttctacttcagaagtctttctccttagagttaatagctcattatttaagctcttttcacgatcattggaactatccatggcacctcacaaattcgagacactagtctcaagttcatcgactatgttctcaaagttagtgaccttggccttcgcatcagaggctctttgctcaacaactaaaaacttctctgcaagctcaccaactctcttatgctcattgtgttgggttttatgccct

SEQ ID NO: 120182 - DNA, 656 bp, Cannabis sativa
  modified_base (451)..(452): a, c, t, g, unknown or other
aaaaaaaaaaaaaaaaacaccaacaaaaatcaacaatatttattatttataaactttttaaattacctatatattggggcaaagaaaatgtacactttgaaatggaaaaacacaatgttataagacgcacgtaattactatataaatttcagtttatatgtaagtgtggtgtgaaactgtgaataaattgaagagaattattataaccacacacacacatttcaatatttctgattttgtactgtgttcccaaattgaccggaatcatattaatacttttctttgtaaacaagttaaaataaagtctcacaaggtatgaacaaatttataacgtctaaaattaccaaataaacagcaaaaaaataattatatataaaactattttctaaatctatgagaagaaaaaaaaaagtcggacacttgaatcatacttttttttttattattattnnttttttttaaaaaaaaaaaccatgcatgattccacgtggttgacaaaaataacacatatgtcttgtaattagttagtgatatctctaaaatgttattttcttaaattatatgaacctgatacttaattatatcaatagtagtacgacaccaaagaaacactacaagaaaaaacatttacgataacactgaaaaaatgtaattaa

SEQ ID NO: 120183 - DNA, 1701 bp, Cannabis sativa
tggtacgatgttagagatagagttcaagagttcgagtcactctagtaaaatctaaatcgtattcactacgcaagattcaaatcgaaagatacctttgctgaagcaatgtcttatagttgtctgatattgctcaagaaaatatttttaaaatttttaagtgggggattgttggaacttttgtgaaattgtataaaaataaaaagtgaagtgtgtgagtaataagagtcccacattggatagaaacacttcattagaagtgtatatatagtgcatgtttgagatttgggtatgggccccaaggggtaccaagttttgtgcgcatgggtgaggacttacacattggaccaccacacgagcacaccattgccgtcccaccgagccaggccggtgggtgaagtgtcaaaaaaattatttaattaaataaatattaattttttatttattaattaattaattttaaagttaaatgaagtagtaaaaagcgatcaatcaatgatccgcttttcactgccatgatccaactcctccacgattatattactgttttcttagcgtttaatcttggatcgactttttacataagttgtattagaacaacggaaacatacaatcttttcaacatacaaaaaaaatctttcttccttatgatttttcttagagcaaaatttagagtgtaatcgagagatatacttcgatgcaaaacatatcgtatgcagaggcttttttatcctagggacgctgtgattactagactgtcgtgtacactttgggcaaagccgcaaaacatcttaaagaaagtgacattatccgtgactcaatcacaatcttttattagtattcgttccagtttcattgttttttaaatttggtttaaacaaaagatttgttaaatatataagtgaaattttaattgaagtgacacaatataactggtgggacagggaatgggacaagtgatttggctcccactttgacatactacattggagatgcttttagaattctcattaaatcatataacattttgactaacgaaatcaaaaacaaaaataaaaatgctgaatcggaactattttgggaactggacagaaaacttcagcttagttagagtttgttaatcatctttctatgattgctagttgatctcttatgacttatcttacataaccaattaataaactaatatttttctttgaattacgaaaaagaaaatagaaaaaagcccctactcttaaacttgtgttaaaaagaagaaaaaagaatattgagcaggggaagaaacttgtatcaaaaatgtaaaaattatttcattaataaaagaaaagaaaagaataaagaattgcatgttccaaaaggtagtcgcttatgaatattaaaagttatagtagcaaaatctatttaatcagttttctttctttctttctttttctgtggacatttctgaccttatctctgtttttaatcctctaaactatgccctgaacctaagagtaaaagggagagagaaatttccaagagaaattaaaccataatataagtcagaccagggctcttttttcgtcatcttctcctgactcctctgagtcttttattatagccttgtctgctttggaagtggatttggtgtgcttaacaacggcatattggagtgaactccaacttgggatttggttttctgggaccatcttaactatgattccc

SEQ ID NO: 120184 - DNA, 1637 bp, Cannabis sativa
  modified_base (828)..(833): a, c, t, g, unknown or other
agtctatctccataaaattctcaaaaataaggttaaaaataaattgcatgcttcgtgaatttacttcttagataaaagggttaattattgagtgtttcgtcttgattacatacagtaggggaattagaataattgacggcttcagcgttatctgcgggattaatagtttgtttggaaactgaaattacattcattaataggaattaggaatgattgttgagggtggcgaataacctttagctagtttctcatatcataatctcaatattaatttgtttattttatttttatttttggtattttaatcttaataaacatagtccttgtgggttcaacccgtacttacttttatactgaaataattgaaagtattgaaaaaaatagtaaatttgatacggcatacgacacacatcattatactagagaataactttgtaatcccattattgaacattggtgataatggatgatttaagcggactacagtccacgtagttttttcccgtattgggtttccacgtaaaaatcttggtgtcctaccttttatgtttgatttgtgtattttcatggtaatgttcattatagttacaacattattcttgtaatttttttaaaaagttcgaatagtttacagtgtcaaaaatagatttcaagttttctgaacacgcgtagtaaactagaatattaagaactttattttcgataatataaactattcaaaaaatttcaaaaatttacagagattatatcataattataataaatatagctatgaaaaaatttgaaaaagtattggagaattatccatatactgtttttttaactttnnnnnntcaaatttacggtttgggtttttaaagtgttttctccgatggtttttatgtgggttgctatacgattttttgttgcgatttaggttgcagctgtagttgcaataggagcttctatgcagaattctgtaaaaatacaaaaaaatagttttgatgtgtaaaaataaaaaaaaaaacccaaaaaatatttttgcatgtaattttaagctcaaaatttgaatgaaaaaattataattagcatttattgtcaatgatttgatttcttagtaatatgcacccttggtcgcgctcgacgtgtatttcaactaggtggtggtggctctcagttgggagttcgatgtttgtagaaacaaaaaaaaaaaaaatgaaaagaattgcaaaaatatataataaaatttattaatatatattataaaatttgttaatttcaaatattatataaactgtattttttatatttttattttaattttaattcaaatattttatataaataaacttaaaaataataataaacttatctataaaagttggataattattaaaataaggggcacttggaaatattaaaatcttaattcaactcaggctaccaaagtgggtaaaatcggaatttttacacttggtgttcttttttgctaatttttttacatttttgtctttattcagttatttaaactttttttaaaaaattatttttcaatattatattttgccaccttcttctctttcatctccaatattacactccatctcctccaccttcttttctttcattcttttttttttttgtttaatttttctttt

SEQ ID NO: 120185 - DNA, 1594 bp, Cannabis sativa
tattaaaaagtaaccaattcaaaataactgatccaatctacacttttatggattgggttggattggactgtatttgagctatgtgtgcgaatttgattagattcgaaatatatgaatgtacttagtgcgaatcgaatgcactatcaataaaatagtgcggattggattagatgaacactcttactgacaaaataattatgggtcatattttatcgaaaaatttgataattaaaaatatgcaagtagtttaagttttattttttatatgttaatgtacgtcataatacttagttaaaatatctaataattttttgaaaaattgtaccaaaattaaaattaaattagtttgttgcaagcgtgtaattttatttaatatacatgtgaaataaataatcatataatgatttaaatagctattgaaacttaaataatttcttgaagaaaaaataaagtaaatgttgaagggatatatgcaataaatttgtaaaatataaattagattataactatttatcatctttttgtttaaccaggaaggttgcaccacgatttggtccatatgttatggaaggaaaattctgccccattttcaagctgtacggcacattaattcctattgtttgcttttataataattctctgatctcgtatataattgtacaaattaacgtacatatatatttacgaacctactgctgctatatattagggatctttcaaggaatagattggatggagacataccagaaaccctagggaacataacagtgtaagttttagaattgctatactgagatgttttacatttgatcattctattacatggttcatttcgagttttcttattgaaatgttttacatatcactgcgataacaaattttccagtgtattttaatatattagtaggttaattttatgtatgtcaaattaattatatttgcggcatattatttaagaatactgcaccatattattaaaaaaaatgtaaaattaattttaaaaaatcaatttgtttttttttttacattattttgtgttaattatagtgataattttatttttctcatatattttttgaatttcgtatatatatttttaatttttttaataaaatttgatataattttttactttattttataaatattaaaaatatattttatttttattttatatgtggaaggaagaacagaaaagcataaattagagatatatttttattttatgtgtcgaaggaagaacaaaaaagtataaattagagatatatacatggaaatgtctatataaaattatgggtgcaaataaaactaaagtttttatttttttttgttcttaaaacgaaaaatcccaaaaagggataattttaaaaagaaacaaaaataacaaaaaaattacaaaattacatatgtgtggaatttttacgattttatttatataaaatacagtattttagtgtattttgtatttttatagaatgccgtaaaaaatactaaaaaaaatttgaacgtaaaagtttaaaaattttacaaaaattgatgttttatgtaattattcaaaatatatatatatatatatatatatatgaactatata

SEQ ID NO: 120186 - DNA, 1237 bp, Cannabis sativa
tcaattttactgtttcagtgattgtttatgtgctaaatcatgctccccaaactttgatatctaccaaatcatgctcctcaatttttgatatatgtactaaatcgtgtcccgtgaactttcatcaatgttagaatttttttactaaaattagataaaagtccttaaatttaactatcgtaagggagaatttttaacggccaaaaaagttcaagggacataatttaatacatgtcaaagttcggggggaaaaattgctaattagccaatataaaattatataactataggattctaattttttttatatatataattattttcaaaatgttacatataataagtcgcctaataactactaaaatatgagtccaattatcctaaaaatctgaacacttcaggtctaaccgtctcgatatatactatttttatgtagctctagactcactgttgttcaacatttgccctgtccttacctacacatgtaaacataactgtgagtcgacaaactcagtaagaaaaacataaacataaacatataaccaaaccgtaaccaagagtccatacaccttatcgcgatcctccccgtatcaaacgcgtataagtcccgagcatttgtatgacaatatgattgactataatatcagcctatacttagcactctaatcatactgatgtgatagtgccaatccatactattagtataatcaactagaatattaacttatactcagcactctagtcgcactgatgtggtagcatcgattcgtactaattaaatacatgtacgctaaacatgtatgtatattattatactaatcttaccttgattccgaactcaggtgtgccagtcaacgtgattggaaactgctgctcgacaatttaaagctcctaagtcacaatttacgtaaaattagtaagtgactcgctaattcacttttgaggatttaaattcaaaactagaaatttctttaccaataaatagcgtggtaataccctaaatatcataaaacgtgaaaaactagtgttgtagctgaaaaatagtcaatatcagctcgctagatttacaagataattaataaatttaagtaatatagatagacacaaaatttatagtagtttatccatatatcccgatagtaatggggctacgtctactttgaatttttatttctcatgagatggtgattaagtatcagaaactccaaactctagtgagagaagctctgaccttatgaat

SEQ ID NO: 120187 - DNA, 5003 bp, Cannabis sativa
tttagacccaatgacggtaccactctgtccactttattcatattctaggggcattgttcaagagtcataaacaaatctagcatcaacatatactcgttgagaagttgctatctgccaaacatgatggtggttgtcactagtaaacaacatcttcctgtctttctcccatgaatcaatatcattcaacatggaccctactctctacttcatgcaataagtggagaaagtcttttgaaagggccaaccttttgaaaggtaacatgccttgaaaggatgatgggagtataaaagtactctttatgataaaaaaaaaaatttctcttagtgatgttatcgatgtatatactaaactagtggagatgatagaagcctttttctttatcagtggcactccttttttagatcacatagaaaattgatctcatgggaagttggaataggctagtaatacaacatcataactccttacacaggtatcaacaattaaactcaataagaagggtcaaataatcacacattacagacgtaattaaatccaaatcaatagagatgttcagtcataaataaaaatcaatataaaaacattcaataataatttacttattaaataatacaatccataccaagtaaccttttttcattgttgtgtaacaaaacaactctgatgcctaaacgggcatcccaaaatctctattattgtttaataagacaactttgatactcatcactaatatccaaacatcacaattgttgtctaataagacaaccctaatacatatttctgatatctcactatcatcatcgttgtctaataagagaaccttgacacatatcactgatatctgaatgttactgtcattgtcaaaccagacaacccagatacgtagccactagtatccctgataagagaaacctaacaatagtttcagtttatagtcatgatatttgatacctaatctttcagtatccaaatatcatttcctaaaaagacaaccttatcatcaatgcctaataagaaaacctttttatcattgcctaataagacaaccttttcatcattgcctaataagataaccttttcatcacataactgtaataattgtatcttaatcttgataacaatcgattcacaaatgataataatcgtatcttaacatgacatgttatatagtacaaatattattttcttacctttaatccagattcatgcatgccggccaacccaagtggagaaatgccccaaaatcctgaccctatgtcacaacaatggtaaatcgataagtgtctattccaaaacactacgtaatacccgcataaaaaaaatctaaagttttctaccaaacgtcttggtgaaaataacctaaaataaaatatatattttggctttaatttatgtatcatactttagagctcttcccaagtttcaaaacagcatatagaacatctaaaacagacaaccgagtggaaagttatggccaaaatacaaaaattagcttttcccaactactgccaaacgaaatttcggtttgggtggccttgtaccatccataattttaattcacaacagtagggcctcaaaaaactcaagttttctaagttctaaaacttggtccaatcaatctcaaatgctaccaaacttcacaaaacaattacttaacatcaaaataacattctccaattaacagaaatcaaaatcgaatcacaaatcaaaattcacaattaatacccaagctttgagttcagaactcaagcttggttctctaaccaactagctagaaaactcactaaaaagcaaccaaaccaccttcaacaaaaacctaggataacattctaaatcctatcgaacacacaacatcccagccatgaaatctccaacttaaaccaaactttccattgagaaaaacaaagagaactagaagaagattaccttaccattcccaacagtttaactctaactccaagagttaatcatggctaaaagaagataaattttgctctaaaattgctggttcattggtatttcttcaaggtcgaaccaagagagaaagcaagagagagggaagtttgatatttttttttgaatttcttagtttgactaagtctaacctctatctacacatcgatttaacttatcctaggtattctattactttctaacttatctattggaagatagataacataagaaatccttaactaaccttggcataagaccaaaatgccccttacttacaaaccaaacaaactttaaccctaggggtaatttggtcataaccaattaccccaaaatacctcgacactctcaaaattaactaaacttcctagtatcatcaatatcacatactaatatcgttgggccaccaatcgggtctccatggtttccgaacttaaaaatatttttatttcataaatagcatgtctattacccacatattctaataaaattttcataattaataaattacgcttattgaatcacttatgaataaattccctaatttccacatataattagattagtaagatcataatattacccattatacccttaacacacatattactccatattttataaaacattccctaattaatcatagttatatttttaggatattacaattatcccctccttatagaaatctcgtccttgaaatttattctggttaattcgtaacacagctcccgcacctggactctaactcaaaagtggccttcttaaccttgttgttacatcacattgttttaaccaacaaatttatctggttccgtacctttattccttcttatctagcataaggataggtggatcctctcatatcaaattcgtgttatattctatactcaaataatgtgtcaagtttgacacgcacttccccaacatgctctatcattgtcctgactaatctctcttttttttcaaaatttttgaactcccttcggagcatcataaagtctttacctagaattccattatctctgtgcttcaaaccagcaagctttttttattttcacgggtgagcacacgagctcaaattctcccaatggcctcataagttccctggacccttttggtccaatgtaatcttttctcaccagcttcatttcagtgaataggtgatcgatattttccctcgtaccatattctctagagtgtccaatcaaattattctttaatctctgccatctatcacacatatccacgacttattttccattatgcaaaatcctctcatttgttcatttgaggatgaaaagttatactaaaattcaatttatacccattttattcttgataaattttatcaaatcttaggatcacaatcagaattgtcaagtttgaaactctatgaagtcaaactgtcttcttcatgttgatttactgtatatgtcttctgcattgtcaaacagtgtgttgaatcagtttatttaaccactattacttggatcagatcataacttaccgtagtatttgaaaatcccactacacagtccatggtttttacctttacattttcattcaaaaatctcacaatgctgatacaaatttcactaatcgttactgtactaatttgcttactgacaacctaatcattcgaacatgtatctcatcatattattcctcatttccagttactaatacatcctggtttcaacgcctctttgatctttacacattagttctttactcttaattaattcctggaatgactgctggctttgcattctaatacaaatctttctagcgtactttgttcatactcacacgcttcccaagaaatatttctagggaggtcccccatcttgagattagtctaagttaagtactcttaacttcaaagtaaggtcatggtgggttaccggaaagaataaatacatctttgtcattcctaaatgtatttcctcttttcctttctttatcaactagaatccagtttcagtcattatctttcaatgatcatttactttgctgtatcatcttgatccattataataacttgattattaagtaatgttgatgaatccttctaatcctagactcttttctaactttgatcatactttttgccattaacaacaaaatttgtttcaactattagctttccaattacttagacacacaagcgatggctttcttgaatttctttaaaactccatctaatcttgttttctagtatcaaaatctctagctaataaagcactaacagagtaatcaatctctgcttcaactattgaagactttacttataattccttgttgcaaatctttatctgtaatggtcaagtctttaagttcagattttatcaacactagaattctcactatggagttgttcaacttaaagtacactataagaacaataatacacatactaagtatcaatagtaaactcaaggtatccacttcccgatttcccaactaataataatcaagtcaaagatcattcttacaaaagatgatcatttctcacatgtgatattcacttataaaagttattgattaataaaacaatcaacttagttatctaataagataactaatattcacttgtcacttgataaagtaaccaaatatcctttgttgtctgctgagacaatcgcattaatcctacaatgagttcagagagtaatagctctatcattctcaatgttacttaataaagtaacccaacatttttggtcgtctaataagaaaacccatacatatattttactctctatattcactagagaaattgacctcacttacaggagataatcaattctttaacaggtaataatgtacctcattctcttaacaatacattacatggtccaatatcctaccatgaaataaatttaaactcaatccccctctataggaaatcatctttcatttttaaacattcaggtaagcttataaaccttacttctgctggaaatattttaccaggatctagatttactaacaactgtgttgattaacatcctaaatatgaatatttctaaaacaatgaaattaa

SEQ ID NO: 120188 - DNA, 1037 bp, Cannabis sativa
aataatacgatatatatatatatatatatatattaattagttaatcaatactgtgcaaccaaaccagcagtactaattgaagataaaccacttatatctgcattaatccttctgcagtttgacctgatttccccttgtgagccagtcaagaccttaatatttcccatcttgatcattgacaccacaaactggccgaagaaaattcgttggtcggcactgaaaacgttgacaatattagcagtgtccggggcgtcggttccggggttggagaacaactcttgatcggtttgaaggattccattctcggattggagattggagaagtacttgttgtcaaaagtgtttggagtgacaggatcgagattagtgaggacactgccgtttcctccctgaggacatagttgtcttagtgttgctaagagggttgggcttagggttgggtctggattgtttgtgttgttgaagttgtatagtctgaagctgaatgtttcgcacttggcacgtccaaatgtgtgggcgcctataatattttatagatatataaatacatcaaatttctagaaatatagtttaaatcttttatacgaactctgatacatgcatgcatccaaaagagcattcaaacttaacatattgatcctcacctgtatatatggattttttttatgtataaaaaaaattgtccatgaagaatattatttttgacaaattattacgattttttttttatataaaattggaccctaaattcttgactttttttagcaacattagatcgataagacatataacgtacaatttttttactttaaaaagctttcacacatgatatatataatatatatattattgtagtttttacactttcatgttatctgtcatcttaatcaataattttatgatttataaaagtacaaactcataaattacatacagtccaaataatattaactttaaaattcaataaaagccacatgtcgtgctcttacttctatatatatatatatatgtattttcaaagagttcatatatatata

SEQ ID NO: 120189 - DNA, 2340 bp, Cannabis sativa
tccttttttgtatttttttgtttttttccctatattttaattgacaaacttccccttttacaatttattaataaaaaaaaaaagaaaactcaaccacacaattgctcactctctctctcaacagctcacacacaagtagctcactctctctctcagcccaacaatctctctcaactcaccctctctcagtcacttccgtttcgatccctctctgtctatagtagacattgaacaacccgaccacactcaatccctcagaaatcattcaaccattataataagtaagttgtattttaactattttttagacattaagaatagtatgtaatttatttcctttatatatgtatgatgttgtttgaaatagtgttattttgctttattctgtccaaaacactaaatctaattttctctcaatttaggttttttttttactgtttatcaatgatttatcgatagtaatgtaatatcgatttcttgcaggcaaaggtcaaggatgaccattatcgatatgatgttgataagttgtcgacagtatacgtacttttaaatttaatcatcgttgtcgacagtatattgacatattgttgataatatttagaaaatattttctggtatttttttcgattatttgtcgattggttatccatactttgtcgatgtattggaatattttctagtatttttttttgttgacattttattgatagaatgtcgatattaatacaaaagagtgaaaacttttagacataagtaaagacaaaacaagtgaaaaatttgaaatataaggaaaaaagaaacaagtgaaaacttttaagcataagtaaagacaaaattatcataacaatcatgaactttaaatgtaacccctaaacgttaaatttaaaagtgtctgtagttcaggtgactcatgcaatacaccctcaaccacctaggcttgactggttcgcctttaacaaaacctactttgtaacgacgacacctttgggagaaccttggtggtaaataagcgagatacccattcttttgaattggaacctccattctttcgccaacctttcattttcaaaccgttccatacattccaattgctctttttgtagagcgtgacgatattcttcactacatttctatttgctctctttactagatatttacaacttagaagagaagaatattctagggttaaagaataagaaagatatgtaacttatgaagtcaaaattttcttttataaactagaatagttgttgggaaggtgagaaaataaatgtcaaaaattaattagcattaaattcttaactgtacacgtgcttgtcatgcaatgtgcttttattgataatatatcgatacgttgtcgataatttttttgataggcaccgaaaatgacacaaaattaaattcacgacactctttattgatatgatatcgatgttacgtcaacattttgtcaagtgtttgaaatgcctcaatgtcatgacttttctatcgataagatatcgatagaatatcgacactctgtcaatttatctcactgctcaaaatcatgacactttttattaatgggatatcgatcatgttaaatatgtcttccatttataatgtttttgatatttttttggttttttccctaacctttttttgtttgaaattgcagtatcaactgtgtttcttgttatatcgtacgatggtgtttggtgtgttgagagttttaattaggtttataaagccgaaggcagtttgacgttgaaagttagaaccgacacaactatataacaattgtgccaaattttatatgaagagttagaggttgatccgttggcatatgatttgaaatttgagatttgttccttgtacatgaagggacaaatggttccgccagaggttattaagaaagaacgccaactgagaacgttcttagagatgagggcaataatatcaaacacagattttatgccattatttgttaccataggtaagaaaagtttggaatttggagccaactcaacctactaatccactcccttgaagtgtggtagagtctttcattcctgaaactgatgtggggattagtgtgaataaggaggatcctgccaatgtagattaacaacaggaagtagcaggatttgatcagtttgaggagtttgatactcctttctataataatgatcttattataaacttgaatatgaatgaagaacctgatttggtagtcgatgaagccgtagaggtaccttccttgaggttagagttgttggatatttattttaccaggatcttagatctactcacaagtatgttgtttaacaccctaaatatgaactttctaaaacgataaaa

SEQ ID NO: 120190 - DNA, 2710 bp, Cannabis sativa
  modified_base (68)..(68): a, c, t, g, unknown or other
  modified_base (2662)..(2666): a, c, t, g, unknown or other
atcatagatatagaatctatatcttctataagtatttagaagtcaaacgataatttccttcgagcttngctgaatagagataaatgattgattacactgggctcacatgctcaatggaacacatctttatggcaaacgaacaccgggtgccgtttaagaagacgcctccaatgagaaaagataggtccaagagagatcccaataagttctacaaatttcacaaggatatagggcacaccactgaagagtgtacccacctcagaatggatattgaggacctaatccatagggggtacttagggggctaccagacagatgaaagacgccctgaggagagagggagggaggagcaaagacaagaacaccccgccaaggcccttgaggtgaaaagagatgtcagaactatctgcagaggacttggaatagtaggagacacttagaagggaagagacaggtatgccagagaggccaaacaacaacctatggtgatgaacctggaacaaagactgcctgagaattcgaaaaaggagaggtactctataacattcactgaagaagatgcacgaggagttcactttccccacaacaacccactcgtgttggctgtccaactacctaacgctagggtccattgagtactcgtagtcaacggaagttcggttgacctactctatcagagtgccctagaacaaatggggttgggcatgaaggatttgaagccatgcacaacacccatatatgggttcatatgggactcagtctatcccctaagaatgattgagcttcccctcaccacgggagagcgacctaaacaggtgactgtgatggccacgttcattgtggtggaaagtctgacagctttcaatgcggtgcttgggagaccctcgctctaccgcttgaaggcaaatgtgtccatttatcacctagccatgaagttccaaaatcccaggggagtcacgactgcaagggggagtagaaagaggcgagagagtgctacaacacttcccttagaatggccacgaaaccccgcgagtcaatggctatggttgtttgtgacaaggaggcacactagcaaagaacctgggtagacttggagccacaggtgagggaggaggaggttcatgctgaacccaacaaagaaactgaagaagtgttgatatccgagcatccgttgaaagtgcttaagattgggaaaggactttacgaggacctcaaatgcgagctaaagcaataccttgtggggatggcagatgtcttcgcttggagacatgaaaatatagtggggataagtcccacaatgatgtctcaccacctaaacatagactcgttggcccgaccagtaagacagaagaggcgggcccttgactcggtgcgatatgtggcgttaaaagaggaagtggacaaactcgacatgcaccgctccatacaagaagccttctacccagtgtgggtgtcaaacctcgtcctggtccccaagccaaatgggaagtggagggtttgtgtcgacttcactaacttgaataaagctgcccaaaagatagcttcccactcgcccgcatagatcagacggtggatgcaacggccggaaacaaagtgttatgcttcatggatgcatactcaagctataattagatccccatgaacccagtagatgaggaacacacatttttcataacggataagggactctattgctatcgagtcatgccttttggtctcaagaatgtcaaggccacatatcacagatttgtcaacaaaatctttgccaaccagattgggcgcaatatggaagtatatgtggacgacatgttggtgaagtcaaaatagacgggtacttgattaaagacctggatgaaacattcacaccttgaagaagtatcaaatgaagctcaatctcgtcaagtgtgtctttggggtctcgtcgggaaagtccttaggcttcatggtcaatgaaaggggaatagaggccaacctgcaaaagatataggccctaatagacatggaatcaccaaagaaccgtaaggaagtgcaatttttgacagggagggtagcagcactcaatcagtttatcataaggtcaactgacaagtgtttaccgttctttgatacacttagaggaaacaagcagttcacctgtggagaggaatgtgaagaagctttataaaagctcaaagaacacctgggaaagccactgctgctagcaaaaccagagaaagagaattgttgttcctttacttgggtgtctcaaaacacgccgtcagcgtggccctggcaagaggggaggggaaacaacatcaaccagtgtactacgtcaataaaagcttggtggacgctgagacccgctacctggagatggagaagttggcttacacactagtgatggcttcaaggaaactaaagccatactttcatgcccactcaattgtcatgctgaccaactatcccttgtgccaagttttgcacaagccagagacctcaagatgcctcctaaaattgacgattgaactaagtcaatttgacatttccgatgtaccgcggacaaccatcaatgggcaagtgcttgctgactttatagctgaattcacctaccagcctgatgagttggaacacggggaagcggtagagaaggatgcctaggatgaaattgttgggttttatgccnnnnntaaaactcatttcatataatcagacttacttattaataaagatc

SEQ ID NO: 120191 - DNA, 2171 bp, Cannabis sativa
aggttacagagcactatttcttaactgtcaacttgtaatgttttgatgtgcttttctagtgttatgcttagaagggttgatttgaataccattggtttcataaaattcaaaatcacaagaaaaaaataaaaatttgaatgcaagttcccatttccaaatggtgagaccctgatgtagatcatgattgcttcttttgatctcatgattatggtctgacaaattatagttgtggttatttttctattgttgggaccagttgttttaagttaattatatgtatatttgaaaattaaccatagggtatgtgcatctaagctcgagcaatatatcaccagttttcatagctttgtacattggggcttttaggttgaaccgtttgtatttatgtgaaaggtacttacctgatatttaaggaggctggtcaacttgagcattttcttaaaacaatattttaaggtgatttgatttgccaccatttatacaaagttagggtgccagcaggtttagactttctgtgtataatttcacctcattgcatatcaatcctaatttagtttggatggagatgctgctgtaaatgttcttttgtaaaatatttttagtgtcagtcaagatgatttcatcaccatgtagtatgccacactagatttagttgatctcctggtaatttggattatacatatacctcaactctttcttatcaggagcatgaagtcgaggatcttggctacctatccagatgcatttccaaatgattcagaaagagaagtactagaccgaagaccggacttggaaacacctcagtaatgcgccaaagtcctagactacatgttataataagagacctcttggattgtaaaatataggtgaatccatgtaactctttgcatgcctctataattctgttcacggttcttaacaagttgtgagttttcttggtctatctaatatataattttggttgggaaatttgattaattatgctttcattagtcttaaattaattccctaaactaatacttatcactattgaaaaaatgggtataaaaatgttttagtacccaaaatgccccttatacacacatccctaacccatcccactattctctcttcactctctttctctcaacttcattttctctcctcctctctaacaattcaaactaaaattttatttttagttgtaaattaaactctccaatctactacaaagtggtagaagttagaggctttagtgtgagactgcaaaaacacacaaaaaaaatagctgtcaagaaatttgtgcataagcatcggactataatcggtccatgtatcggacctattgggccctagcaaaaaaataaatattcaatatggacatctggcccactatcaggtcgtatgtcgggcctatcggaccctgatcaaaaattatgacggataatcaccatcggacctacatcgggccctaataaaaaaataaaattcaaaggacaatcgggccctatatcgggccccatatcgggtcataacaaaaaatttaaaattcaacaagaccatcgggccatctatcaggccctatcaagccctttatcgtgcctatcaggccctcacctaaaaaataaaatggagaaaatacatcaggcctaccatttggcccaacatctggccctatatcggaccatcagtcccatcgggcctaactcaaatggatagacaatcggactgactatcgggcccaacatcgagccttatattagacctttgtcttctttgtagatccatcttttacatcacagatagtaaatctaactttaaatctaattcaaaactcacaaatcagagaccctaaatctattaataaacaacgttttaaccctaaatcaataataaaaaaaaaataccaaagggacgaaatcttaccttggccgacattgcgtggtggtgggttcggtcgagtagtcttcgtgctcaaatgggttcgagagataaaatgcttttgagagaaagagagatgggaggaagagagagaatgtgtggtggtgggttcggtcggtttgcgtggtagtcatgggtggtcctcggtgagagaaggatttgggtgaagctgcatatgttctcggtattcagattatcagaaaccgatagaacaaatcccttgctctctcttaaacaacttacatagataa

SEQ ID NO: 120192 - DNA, 942 bp, Cannabis sativa
ttgtgtattaattttgttgcataaataactaaaaagatatgatcaaggtttaactaaatcgtttctaattttttttttaaaaaaaaatccagtcaaaactacaacttgaatacacattttgatgcagaaaccctatattttaagctatatatgctctttttcaagcttttgccaacaatgtcgataataatttatggacccaacagtccattgtttgtccatgagccatgaggtctggtagtaataattgtactgctttcaattaaaatacatttactaacttttttttgcttcttttttaaacaaaagatgcaattcttcaaaaaaagaaaagaatggtgaacaccttcttattatattaaacattgagcattttaaccattctttttgtacaaataaatattgtaaaaatagtatcagacagacagacctttaaaaaaaaattacacgaaatataaagctgtagaaattaggtcggggaaggacaaccccctctctaatctctatgctttgtttttgtttattgtttttttttttctttcttcttctttttctactcttttttttttctttcttagttttgggttcagacaaagttttgataggctaaaagtattgggctcagcccatgcctacttttgggtttgggtttattgtcgaagatctgtagacagtttagtaactaaaagccagtcacctaaagcgagtttgggcccgattctggaccaactctctttttactggggcctattacttttcggccttactctgaaatttgactaaaaatggagattatggtttacaactgcaaatgagttctctagttttacttaccaacaaaaacgtatataataaaatgaggaataatttgtggaataaatatttaagtttaatttttagttgcaaataaatattcatgtttaatttttggcgataataata

SEQ ID NO: 120193 - DNA, 1140 bp, Cannabis sativa
ttatacatccacctcatgatgaaccgatcattagagaaaattaatgatgataacatgatggtgtttaaagaacggtgatgtgtggacttgttttaccaaaacttgacttggtaaaataggaaaacattaggggttatttagtcatgtttgtacttttgtaattaaattgacactgtcattgctatatatcactatttatcgccaacttaatcacagaatatatcctttttatggtaaatttatatcgataaaattttcaagaaatttgaaacaactataccttaatttgtaaaaatatcgctaatcttatcactatatgtcacattaaatcactaaactattaaaagtgaccaaaaaatacacaatcgtcatgtcgccaaatattgcaaacattgtcgcaattgtcgctatcatcattgcagacttaagcatgagaaatagtgtgtgtgtcgctttgtatctctacatatcacaaaatttttcacgtgatatcacaaattgtcgttaaaacatgtctagaaagtaaaaattaacaaaaacctacaaaagattgcgttctaagtttaatcatatcgataacgttgtcaacacacgttgccaaatgtcgttattgcagctccaaatagtaaagaactaataaaaaaagtaaaaatccaattcataaaacatactactaatacaaacaatcataatactaaaatagagttcaaactcgagccttgcatgaagctttgttgtggcccataccgctagagttttaacaatggcgaggttccacaactatattattgatagatggttgacgtttagtccgtgttcttctcacattgctcttccttggccgaccaacatgtttcttctccatcagtactttaactctcatgcttttaatgtgttcgaggagctcccaatcgtcctcctcactaaaaacattaatcgttgcattgtaggcattcttttatgtctcttttgtgtaatgggtggagctaagggcgtacaggctcacattataagttatcactatggcacatgcatggggcaagagattttgagaaattggaacattttggatgttcatgttctctcaactaagttcacatcactacttctttgaccatcgagacctctaccaacattaaa

SEQ ID NO: 120194 - DNA, 1875 bp, Cannabis sativa
aggggtgatgatgttacaccacgtttggataggagcagctggaacccagagggtggtaaggcctttgtaagacaatcccctatttgatttgaggaaggaatattatcgcacttgaagttctttcttcaatgttttaccatgaacaaaatatttgtctatctcaatgcgttttgtgcgtgcgtaatacattagattggatgctaaagtactatgcactcacattattacaccaagtaatggaggtagttggtaaaggaaagtttagctctttaagtagagattcaattcaactcaggtcatttttgcagcaacatgggcaagagtcctgtatttctgtgttgatctcgataggatctcgatacaactgcttgtttcttcaagactacgatatcaccaaggtaaacatagcctccaacagaccttctgtcatctatgcttataccacaatcttcatcatagtaccttgtaatggcaagcttgtcactatagcaggtatgaagaccgttactcattgttcctttaaggtatcaagattcgttaagctgctctccaaagaactggtgtaggagctttgaggaattgacttaacttgttaactacaaagctaatatctgatcatgtgtgagttacaaggttcgaacacaagctgtaacacttggatttactctttgggaggaattccaggctttgtctttattgcttgaagatgaagctcagatggagtacaagtatggacaagaacaacactaaatggagtctcctactgaaaataggttcacttgataatcatgagttataaactctcatgctctttacaacaataaacactctcagcaccaaaagaataccaaagtggtctagaccattacaaagtgtacaagaaccaaccaacttaactgaattaactaacaaattcaactatcaaaagtgtccaaaaaaaatcacttgcaccaatgaataaaccccacagttaatatttaaaaatgaaagtttttagtaattacatagtataattacactcaaatttaatggaactataaaaattggagagtgtaattggaatttatcaattacctttaattatacaattatatggtcaaacaatcatatttttttttttagggaccaaacaaaaatattaaattatataattacttcttggtacactttggttttctaaacgcatatgtaaaaatgttgtagtagatatggtagttaaatttgtgaagttatcggattaaatttaaaatatggtatctaattacatatttaaattacccgttaatatttataaaagtctttcataacaaaaaaaaaaaatctatacacgagtcaatttaatcttattccctcttattctatagtcaatttaattctaattttttctttccttttgttttttttaattttttatttatttatttttatttttttgggtaaggatttttcaaactctacctctgtgtacatattaataaaaaaaatgctcgcttcagttatatactatttatattaaatagtatcttttgttatagtagatataattttcacagttaatattgtaatatatttgattctaattctacacttgccttagtcatagatattgattagtttgttatagaatgtaaggtgaaacatctaaacaagaaaaagagtccattccgctcataaaagcttcttttgagatatagttacaaggcctactttgggcagacccctagaagcccaatctgtcaagctaataccaattttattctgctatccaaaaatgaaggttaattaccaatttttttccccgaattttgacatataccaaattatgcctttaaacttttttggccgttaaagatctcccctgaactattgagattg

SEQ ID NO: 120195 - DNA, 1474 bp, Cannabis sativa
  modified_base (1280)..(1294): a, c, t, g, unknown or other
ttttaaaactcaaaaacattaaatcacactacaaccaatcacctatatagaaataatttttcacttacaaaatttaaatttttgtttccaaaatacatttttaaaaattacaatttttgaatcacaaaccacatttttgtttccaaaacacatttttaaaaaacacaataattgcgctattttgtaatactttggaaacaatattaaatttatattttggtgttagtttatatctaatattttaagtaaattaattgaaataatgtgtcattaaagtgatattttttgtgtagattaattaccaaatctcgcaatatcaggacttaattataggggtgttcacggtgcaggtagtacagtttttgactatttttttaaaccaacccgatatgcagttttttcaatttctcaaactacacacgcaccgcgaaactaaaaaattgtaaaaaccgcaccgcacaaaatggtatggtgcggtacgatttctgtggtttagactatcactaaataattaattctatcacaactacagcaaagcttgagcaatacttgtcaaaactaccataagggtttaaaataaatatgaaaaaaatttaagttttaacaatacaataattagtgcgctttggtctggaccttcacatattagacctaaataaatataaaaattaatatttttataataagcagtgcagttctatttgtaccgtatattaataattcaaaaccgcaaaccgcaccgcgcagtttaagaaaattcaaactatgaccgcattggaaatattttcaaatcgtattttttttttgcagtgcggtgcagccagtttgagcagtttgatgaataaccctacttaattcccaagatatcgcccgaggatcatatcttcccaaatatgaaaagattgtaattgatgatcaagcattaatgtgtctttattatctataaaagtatgacacaattttgacaactatcaacatgatgtggcatccacgtcagcatacagccagtgcttcgtgagccaagcttcactaaatgggcccatgatcaatatattatgtgtatttactcctttagtggacaaggtcgaacccatataatgtaaaaatgagagatttttttaattagataaaaaaactaagcataaaaactcaaattttcatgatattattcatgaatgggtaatacccattaagagtgcacccataatctaatggaacacttcttaatgggtgttacccgttgatggttactaagccatttaactataaatattaatttnnnnnnnnnnnnnnnattagattttgatccaatgacgaataattaaagagaaatttaaatttttgtacttaatttagctacttaattataaaaaatgtcaaaaattattactttttacactatattaaaaatatatttatataaaaaaatacttaagtcaaatttaacatttttttgccgaaaaactttttttct

SEQ ID NO: 120196 - DNA, 1789 bp, Cannabis sativa
tacgtgcctcgcacgtaacttttgctagtatatatatatattaattttaatgagtattgccacagtagagtattgccacagtaatttttttatattatttattaaatcaaaatgtgtgatacctaatattgaattctatcttagaatttctttaactgtctacaaatgattgttttgaccaaaaaacaaaaagtgatttttttgatcaacagttagaactttttttccctcaagttcttcttctcaaaaattcataatatatcctctctcatggtttttgtctgtttggtccccctacgtgaaccctccctttaatttttataaaacgttctttgcatgtatggtagtgttgatacttctttaattaatacttaggaaaacacgtgtacctatgtattgttaatttttcatgatttgttttatggtgcgattatcttcttcaaactaatttttttatactattggccttagttcttactgaacggttgtaggtcttatctcggctcttacattcatcttatattggctatattcaatttgtagtctttttttgtttcatctgagatacgagttatctcagatccttggtgtatttctcctttccttgattcagaatatggtatatgctgtccagattcttgtgtttgtgacacgtggattttattcaagaaagattaagaggccatcagacgatcaacttcttcaactgatgctccgggaagataaaggccctaactcacgggaagggcttccgtgattgggagttcccggacaaccagtgacgcaaatggtatccgtgagccaaaatattcctcgatcccgcgaaccgaagccatctactcccgcgaagagtatgggtttttcccagaagaacaagggcattttaaagtgtgcctaaccaggctacacccttatttcgtggaggcggccttgctcgaacatgtcagactatggacttatagtgtgaccaggcttttttaggtacgacgtcagaggttatcccccacgacacgctatcatacagagcccgcgtgtctcattgtacctgactgaatgatccaacggctagggataaggaaatttaaaaaggaaaatccctaagatgacgtgtgtatgaggcctagcttgtacaatctgacaccattaaatgccatatagagaaaaggcacctaccaaatcaacatccaatttctgccaaggatgatcaatccaagccagcgcatggaaagaagttggcctataaatactcctgtaaaacacgagatagggcaagactcattctttcaacctttggcaaacatacttgtaatgatctaaataatattacatagagaaactccaagaatatccttactaagtgtcctcttcttcaagaggaacattaggaaaattgagtttcagtccattgtatccctacttgtataaacagttaccgaccgatgagcctaataaaatagattcgtggactaaggatggttaacgtctgaaccacgtaaaaatctcttatttgcgattcagttatttattccgttattttcttcttaagctttaaatatattaagttgccaaaaattcagtaaacaatatacatcagtttcgccttagctcgatcaaaagtatcatttatcttaactcgatttgagatttgactagcttcggtcaagttcgaggttacgatgtcttaatatgtgctatgtcaagttttacctcgatatgggttatatgacatcttatcttggtctgatccgagtttagtctgagaaaccgtgtttttgcaaatgtcagttgt

SEQ ID NO: 120197 - DNA, 765 bp, Cannabis sativa
cctctccttactcacctacaaaattcctcaatgggaattcgtagataagttccactaaaaattagccattaattgttcgaaatcatgacacgttcctgtatgtaaaagaaaaacactcgtagaaaaagttggaatactttgagccacattacgaaccatgacctccttaccaacatgtgacaagagtttaccattctaactttgtatacactttctcatcttctctttcagaatgcccaatacaatagacttttttcgactgattgtacttgtgagaaccaattacatactattctcaccagcttcatttatattcaaaatagcacaaacaaccccctgaataggtccactcacatttctactaaagaaagcaatagatttttctaaattaatcttttgtcatgacatcctcttaaaactatgtagaatctctatcactctttgagcccctcctttgttagcttggataaaaagatagctctcatcagcaaatgacatatgaaaaatttacgaagcacctctagccacatgaccctcctttattaattgattctgctcataccgacaatgtaatgccaaaagaccttcagcacaaatgaaaaatagataaggagacaaagggtctccttgcctaatccctcaagaaggaataataggccccatcctatgaccaccatgaacaacctgatatcttattgtggaaaaataacctgaaactagttgaacccaatgttgtgaaaaaccaagtttttgaagcataaacct

SEQ ID NO: 120198 - DNA, 1634 bp, Cannabis sativa
  modified_base (1522)..(1533): a, c, t, g, unknown or other
tctaatcttctattgataacaaattatattacattgaaatgagttttacttagggcataaaatcccaacgaaaacacgaactaatctaaaccaacttatttgagaccgaactaaacgaattcgtcgttagtggttcggttatctaggtcatttccttattgtacatgttacgattttgacattatttctactgatttaacagaccgtctggattatttttatgtaatatatatacatagtaatgacactcaatatattatatttttttaaaatatttgacttaatataataattaaaattattggttaattaattttgaaaacatattatattcatcattaatgctgacgtgtattcagcttctgactaaagctttagttttaatgttgatcattctctgatctttcttattcatcacataactcatacttctttaaacttgaaaaactgagtttttgcaaatgccaataattatactaaattttagtaaaaatactgcagtaacagtctgcagcagcagaatgttattatgtcactgcagaacataattttgaagaaacaaaccagaaataaatagtgcagaatttaaaaacttgacacaagagaattgtacgtggtatcaatgttctttcaaatactactagtccacggggccacgcctagagaatgaaattaattagtaaagtatcaaagtttacaaaagtaattgacttaaataaatttagactccctctagtgatttgctgcaatcctttgtaatccaccttgctaatctgatctctgaaacacaccaagcagtgaactcctttcaattattgatgtgtgcttacttctttcagaagtaaggcttaaacaaatcttctctcgaagatatatgctcactttcttcagaaatgagacttggaaaagtcttctcccgaagacccacacttgttcaaaccttcttttcaacctattctatgaatagcatgagatcataataagaaaaccaaaacctagttgaacactctagcttttacaaatgaaacactcttctcacaaagaaagatatgaaaatatgagaatagaagagataaaaccgtttggcagctctctaggtcctatttaaagaacataccaaccctagagacagccacaaaaatgatttcccacgctgagttctcctcgagcgcgttgtccgcatactaggaccaacatcgggttgagtcctcctggaacgggtggtccttctggactgcagattggtagatcttctagagcccatgggctcttttccaggacgatggttagttttctcatgtggggtgttaatattctttggattttcaaccataaaggagaaggttttctttaaaagaagggagggctttttctgagcttttttcatagaggttctcaatgaaagcaccaaactgttaacgcaaattttctttaaccaaatttgagcctcacaatgataattcaacaccgaaaaataaaagctatagacaaattatctatgaacacagggttttttacgtgnnnnnnnnnnnnaaattctgcatagtccacgagtcactcttattcaaatttctgagtctttttttagggcctctttcataagagttttttcgtcccttttttgagattgtttg

SEQ ID NO: 120199 - DNA, 2220 bp, Cannabis sativa
  modified_base (2163)..(2183): a, c, t, g, unknown or other
ataatttaattctcaaattccaatcttcatgtgatagcggatttactaaagaaacttatattcgggttaggacatataaatctcaacctatatacaaactttctactttcatgataaatttaacaaataagaagcagtaagcataaaaatcctaaatgctacacaaactatataggtactctcgtcctatatcaaaatttgtgtctattttactgtagcataatcaatactcacttctcaaattttgtattgaaatcattaaatagttaattggtgatcaagatattaaaagcaatcaagtatgaatgaaaatagatacacaaaaaattggagagaagaattaaatcacattaaaccaaaataaagtgtcaaacaacctccattaacaaccctagttgaaagtgtagctactcgtagtcattgaaaaaaaatgccaacaattaattaagaatataacaaaataaataaaagaaggaactcgtcgaaaaatatggatgaaagtctccaaaaccgccttctgcttccaatttttgtccctcgaaattgtttctttgaaaagtgccaacagtccctttataaagcctcacattaggattaaaaccctaaaattttgccaaattagctacgggcggcgacactgccagagcatgtcgcagcctatgtctctttaagcacggatgaatcttccagatttttcctagtgggccgtgacactgccagagcatgtcgcagcccttgaagctctaatttaagcagtgagcaacaacaagtcccatgcctcaacattgaatcccaacattgaggtctgcctacaaaccttctaaacacgactttactgccaaatttttaccttttaatgccatgacattgaattttggaagctgcaatcatatcaaatattctggattttttcttgaattcatctccttgtgctctagcaacaagactttacttaattcatccattttgtatgttttttattaactttgttctattcttcttcactattaaactcgaaaaaatagtaataactaaaccataaaattacacaaaacacaattaaaactcactaaaagcattttaaaaacccacttaaaaataacactaatatagtcttaataaactccccctcacttgacctttattcgcactcgagtaaaaattgacactaaactaaagacaaatgaacaccaaacaagccttacttcatttcacaccacaccatcgccactcacaagattctactgttgtaaactagattttcaatttaattgctcccaatactcaactttagcattcaaactcaaaaagaaaagtataactcacaaatgtcaaaaataattggaacttaatatacatgctcaaagtcaatccaacatatccacaacctaattatcagtaagcttgcaatatttagcctatccactaatgtcaacaacatgtgctttgaaatcaaaaagacttcaatggttttaaaactttttaggcttaggtcaattgtagatgaaagatgttatttatgctcacatataccataagcttttctaatcaaattatcccatggttttcacaagtgatctcaatatccccttgtttttactaatttcatgaaagaatcttctctttgatatccttgaaacaactttttttcccaatgtacactgtattgtcaaaattttgttcttttttttcttttttctaagttgttgcaaatattttttttttttttttaaaattctctcaataatatattaatttttcacaaaacataacataaactttcctccattacaatccccccaaactaacgatccacttatggtatagttagggacaaaggtagataataatggattcaaatttttagctcaaggtatgtgtaaaaataaagaataaagctaaaattaaaagctcaaagaagggtaaactaggatataaactacaagggtagcttgaaagtcacaaacgttccaaaaaaatttcctaaattatttttcaaagcacacatcatcaaggatttcacctcaaagaccaagtaatgcaagttctatccaatccaacttatcaatcctctaaccaagcaaacaagtataacacattccaaatagtcacatcctatcaaataaaaataaattataatttaaatattatgacaaaaaaatnnnnnnnnnnnnnnnnnnnnnattttcttagaaaaaaaataaaaatatatatacatga

SEQ ID NO: 120200 - DNA, 983 bp, Cannabis sativa
  modified_base (927)..(927): a, c, t, g, unknown or other
  modified_base (953)..(956): a, c, t, g, unknown or other
ctctctctctctctaagtggggcgggtttatttggacatgggtcattcgttacttgctaccaataaccaaggtggtgcattacttgctatcaatgacccacatcaatgttatacaggtgtaaaattaatgatattcagagaagaaaaaatgagttttagaagaaccttcgcctaagaatgaaaggggtgaagatggagaagaagacaaagaggtgaagaggaacaatggtggaggagaagacaaagaggtaagagagaaattggttttctggaaaaatatatataaaaaaaaaagttaaaaaatggaaagaaaaaacccacattataatttaaaatagaaaaataccatgacttacctaaaactaaaatttatccatatatatctaaacattatataaaaatccatattacaagtaatttccacttgattatcttgtttacttttataattcttttgggcccgttggtacgcagggattagagaggttaatttgtccagtctagtgtttgggcatgttggaagtctcgataacagatctagctaatatcatctgtctaagattttttatcccatccaggtgagatttttttttatcgtttttttttaattttaattttatttatatattttaagtttaattagaatttaaatgaaagaattattatacatttatttgtatttttttttacattaaaattagtgaacatttataattttgaattatcacatataagttttcaaaatttaaaatattattaattaaataatagttacttaaattgattctaagagaaacaatatgataataaaattatatattatttttaaattattaaaaaaatttatataaatatattaaaaaaattatattcatcttaaattagtgattaagttagtatttaacataaataattttatattattcnagtatttttattttactattttaatnnnntattaaataaaaaatatgataaactat

SEQ ID NO: 120201 - DNA, 5640 bp, Cannabis sativa
  modified_base (5580)..(5594): a, c, t, g, unknown or other
tggaggcttgaagcggggacgttacactgatccctagtcaacagttgatcatttatagcttgccaacaaataaacctatgcatgcacacacatcttagatatagtaaatatatctaattgcactaaactgatccaatttcacggaattagtcaaatccaatctaattacaaaaaattagacatgcaatagttagattggattaaaagtgagtagttgtattttaattgaattatatcggggttattggaagaaactttcaagtccaattaaaaacaaatctaatattattacatataatacatattaaaaatatattatatttattcatatataataaaaaaaaaatatctttatttgttgtttattaatttcaataaatcttattacaactaattaaaaaaatccataaaataaaccttaagagcttatatatagttttgtttttatgtattttttttagttaatattaaaaattaagtgttgaatagaaataatatttataatacccactcctagtttaaatatgtgaaatttttttagtgtcaaataatcatgttatgaataatagtttttttttacttaatactaaaattttgataaaattataactaattaagcaagattaaattgaataataaaaatattttattcaaccatgtgatacgaaaaaaaaaactaatattgtgacaaataaaaattaatatttatatggttatttatactatatagcacaacaaataaaacagttcttaaacaacgtggaattgtttttaaaaatttatcatcaaactttcttcacataaaaagtctcacaaattagtaaaaatagaaagaaaccatataaaatgattgtgactatacaatattaattttggcacaaaccaaagtcaaaaaaaaaagtgatatatatagtctctaagtacaacaccacattgatttctaaataatgtgagatttttttaaaaataactcactaagaagtaaaatcactaaaattttgaaaaataattatattgaaacttttttagcaaatcacgttacatgttatgtactttcttttatatatgtaatatagctaaaaaaaaattctccatgattacaatatttatttaaaaaaaaaatagttataaataagaaacagctaagaaaataattttatttgttaaaaataaatataatatttttttaatgttaaaattttgaaaaagttagaatatgattctatgatttgtcctaatattatttttatttaattaattatttagtataaataacaaatattttatgtatttcataatttgtaatattttacacttttttataaaattaaaattttgataaaacaataaaataaaataaaatataattaatttgacaagattggattaattataaaaattcattcaaccacatactaattttgtgataaataaaagtaaagaaataaatattttacttatacatacaaatatagcacccaaaatagttcataaaccatatgagattcttttcaaaacaaacatcaacttgaacacactattttgttctcaaaatgtgaaaacctaaaaaaattagtaaaaatagaaaaaaaaaaaacaaaaaaacaaaaaaacaaaaacaaaaacatatagaatgccctagcactctttattctttcttttatataaatatatacatattttgtaattcatgatattttacattttcttataaaattaaaattttgatagaacaataaaataataaaaaaaatatataattaatttggcaagattgaattaattacaagaattcatttaaccacatactaattttgtgacaaataaaagttaagaaataaatattttacttatacatataaatatagaacccaaaatggctaataaaccatgtgggattcttttcaaaacaaacatcatgttatatcaaacttgttcacactattttgttctcaaaatattgaaaacttaaaaaattaataaaaatagaagaaaaaacatacaaaatgccacctatcacttttttatatttttctttgtataaatatatagattaatctagttatatgcggctatgtatcccgcgtccttgagtaattggatggcaaagggtctttgggagaccgaggtgcctttttttgttctactaacttcaagaccaaggaaaaactgaatggttcaaaggtctttgagtttaaatttgtcatggagatatgttttaaagtgagagatggcattgtcattgttgctagcaatgattatgtcatctacatatatcagaatggcaaggaagatggtgttggtctttttggtgaataatgagttgtcagaaagtgattgatagaaaaatcatttgaaatgagagtttgacttagcttgctaaaccattgcctggaagcttgttttaggccataaatgctcttgtttaacttgcacatcgtgttaggaggagcttcataacctgggagaattttcatgtacacttcttcatggagatccccatgaaggaaagcattgttgatgtctaattggtgtacattccagttgttcatggctgcaagagctaaaaaaaattttaaagtgttaaatttggccacaggggcataagtttgagagtaatcaatgccatgcctttgagtgtagcctttggctactaggcaagctttgaaccgttcaacagccccactctcattatatttaactttgtacacccatttgcaaccaatggctttatggccagggggtaacttagtgacaacccaagtgttgtttttttcaagggcatcggtttctttgtccatagccaaaagccaatgtttaaattgagaggcatcagcataagtttgaggttcaatttgggagtatgttgcaagaatagctgctcgaaatgtgggatgtagtttaatgtaagaaagatattgctcaattggatgagcagtagatgaggcatgacagatgtaatctgtcgtgttttggttttatcaagggcctaccagtccttgtgattgtggtggaaggttgagcatttgatggctcagtagttggagtgccagaaaccgtttctgctggtatggaactagctggtgtgaattctggtgcagcagaatctggtgtgagattagtaccaaatatctgttgtggttttgaggctacctgtgtgggagctattgttgtaggattagtgaggccagaatgcatttattctggtagtggaatttcttgtgtgccaaaatcagtgtgaattggactgatgttgttggttgttgtgatagcagcattgtgctggtatgcaactaatcctggtggtgtagttggcaataacacaccttgggaagcatgaatttgttgttgtactgatctgatagtgggaatgacagtatcaggtagtagttgatcaatttcagaagtggatgttgttgaaaacaatggaaatattgtttcataaaagacaacatcccttgaaatgtaaatttgtttagttttaatatcaagaagtgtataggctttcatgccttgaggatagccaatgaaaacagaggctctacttcttggtgtgaacttatgtcttttagaaggaagggtggagccataggctaaacatccaaaacttctaagatggtcatagttggggtttgtaccatgcaagagttggtatgaggtcatgcctttaagcttttttgagggagttctattcatgagataagtggcggtttggactaggtatgaccaataaaccaagggtagattggattgaaatcctagtgcatgtgctatgtttagtatgtgttgatgttttctttcaactactgagttctgttgtggtctttccacacaggaatggtaattgagtatgcccttggaagcaaaaaaagattgtaaatttaattctttagcattgtcagatctgattgctttgatagaagtggagaattgggtgcaaatcatgttaaaaaaggtagggataatgttttgaacatctaatttgttcttgagcatataaagccaagtgaatctagatttgtcatctactatagtgaggaagtacttgtaaccttccacacttagtatgtggaatggtctacaaatgtccatatgaaccaagtcaaacacattctttgagaaattgtgattggaaataaaaggtaaacgcttttgcttggccaaatggcatatatgacaatgtttagtagaactttgatgtgaaatgttgtgttctttattgaaaaaacttgaaatacacatcgaaggatgtccaaggcgattgtgccattggtttacattggttttaatgaaagaaaaaggaaatatagcatcaattgtagcagatggtttgtcttgttgaaacaagtacaattttccacatcttttagctgtcccaatcaccacattcagagtaggatcctggatttcacaagagttgtgatgaaacaggatgttgttagaagtattaagcataaaatctgaaatggaaaagagattgagtctgaactgtggtatatacaacacattatgcagagtaatgttagaattaatcttgacagtgccaacattttggacaggtatgtcttgtccatttggtaatgtgacaaacttaggaaaaaaaacgttagtaaaggaagaaaagcaagcaatgttggaacatatgtggtgtgtagcaccactctcaattatccaagatgttgcaagtgaaagagaatttttacctgcaagattcgaagttgtaggagtcatggcaagggtttcagcatgactggtgtggcttagttgttggctaagcagggagattaaatgctggcattgagatgaaagatcagcatgcatattgtggccattagtatcagctttcaaattgttggtggaggcagtgtttgccttggcttttcccttgtctggtttctttttatcaccatagccagagggaatccatgtagaaaatagcatttatcaactaaatggcctggtttgccacaattagagcaagatggtcgggttttcttggctttagggggattggttgaacttgaagcagcagcagcaaggggaattgcttcagagcatccaagagacctttgacgttcttcttgaacaatcatggaaaacagtcgggacagattaggtattggttcactgaacaaaatctgagcacgaaccgaggcataggattcattcaaaccagtcaagtgcaagttgttatgggttgaaattctttcaactcatcccatagggatttcatcttggtgaaatatgcagaaacagaataatcaccctgctaaagccgagtgagttgggtctgcaattggaaaattcgagggccattgccttcattgaaacgctcagcaagatcgttccacatttcagtagctaaatcaaagtacattataatttgtgcaatctcagatgaaacataattaatcaaccaagacattaccatgttgttgcaccttaaccaagaattaagagtagaattatcaggttctggccgagggagagatctgttaatgaatgcgatcttgttcttggcagtcaaggccatcataatgcctcttttccatggttgatagtgttggaattattttaccnnnnnnnnnnnnnnntaccatgtatgttgtttaacatcataaatatgaatttctaaaacaa

SEQ ID NO: 120202 - DNA, 2068 bp, Cannabis sativa
atataatattaattacttataatttttgaaaattttaaattatttataacaaattctataaaaaaaatttattattatttttagggaaatttgcagtaaaattacttaaattatttgatttgttgctaataaatacccaaattcaaaaatttgtggcataaatattgctttttatttttttttcttgagaaaggtggcataaatacttaaatcttcaaaacaaactattttgttggtacgcaattcacagctccgttagtttttcatttagacgccatgtgtcaatattatattagtcaaaataacaatggtaaaacaaacttaattttaaatgattatttttataagagatttatttttcttttttttttatggaacaaataataattaattaaaactataaattatattaaaaaatatatatataaacgaataaactgttcatcttcttcaacctaaaaaatctcaaacctagaaacttatttagcttcttcaatccaaaaaattcctaatccatgaaattattaatcttcctcaacccaacacttccaagacccctcctcgtcattctagtcgtacaagtcccgacaaccgtttgaccagtcgaagaactgtttgtaacgtactcgtcctcgtcctcgtcatcagcatttgtgtcgaagaagtctcaacggccttagctctgacgtcttccctagctcagttaagccaagatttggatctgtcgagatcatttccttgccatcacgatttcagagatctgtgttttgaagattttttttttttgagatggcaccagatcaaatgttcgtctaatagtagtaactataatttgtttataagttttgattaataagtttattgaaaacaaaaagaaagaagtatccgaataaatgattttatatatttatatttatatataattttaggtgttagaatctataaaaaaaaagatggggagtaggagctatattcgtggttcatgtagaaaaagatggtaaataaaagagaactgattttttttttctttagttttaataaatttttattttataaatcactcaaaattagttttgttataaaattattattttgactaataaaatattgacacattgcatccgaatgaaaaattaacggagctgttaactgggtaccaacaaagtagtttgttttgaagatttaggtatttatgtcactattttttgaatttgggcatttattagcaacaaatcaaacaattaagtttttatgccgtaaattttccttatttttatgaactaaatcttaaataaattctatcttatcatgatgtatgtgtttgtatgccactaatttttgaatttgggtatttattagcaacaaatcaaacaatttaagtatttatgctgtaaaattcccttatttttatgaattaaatcttaaataaactctatcttatcatgacatatatgtttgtaagtaataaaaaattcgataattaatcgtaagcttgcgacatttaattctttagcacaatcattgagtttttatacctcacgacaacgtgacattttaaatgacatagattaaactcacaaaattgactttgtctaaaaagagcttacgagcaaaaacaagtactgaaacaggtaccgaaagtcgggattgggtatatatatacaattattagcagcaggactcctgttaatgccctgccgctaataattctaatgattttttttttttaatactattagcggtggggctcgccgctaatagttttttttaaaaaaaaaataaataaataagtagaattagcggtgaattctggttccaccctaatactaccactattaggggtgaatttttcccatcattatctgggtcccaagttcgggtccaggtcccaggtctgagtctggggtccaggttcggcatcccgggccacgggcccaagttccgatcgaagattggtgttgaccatgaatttttataaaaattataatataagctaatacagactatttgttatgcattaaataatacaacatacattgtattaaaaattttggtcgtaataattaat

SEQ ID NO: 120203 - DNA, 524 bp, Cannabis sativa
aaagtagactaaagagctctcataaatgttaaaacaaataagaaatgtaccagaataacctctgtaaaataaatttaccctaaataatatatgcatgagcccaaacaaaattattacttggccccccctattattgtatgctggttccgccactggtgatatccaaggtattgaggaagatcatgtaatattctagtcacttattcagtaatcagatatattttggttaaacacttgataataccttgctacaaaaaagatttaaaggttgagaatgttgaacagaatgagtcatttattttactgtgtcacctctgtaagtatacttaaacttaatgtgtttaatttttattttaaaaagcatgttctaagtagcttaataattaggttaactgaaatacgtgatagtaaataagattttggtaaaaaaaattcctacaatgacaaccttttagtcaacccctatgcccgaaatctaggacaccatctatttctctattggaatgatattgtccgctttgggc

SEQ ID NO: 120204 - DNA, 1955 bp, Cannabis sativa
  modified_base (47)..(62): a, c, t, g, unknown or other
  modified_base (427)..(431): a, c, t, g, unknown or other
aatgttatttctgatctatattaacaagtaaatctgattatattgannnnnnnnnnnnnnnnggcataaaacccaacactatgttgaatgatttgaattatccttattggaaggtcagaatgagagcattcatcaagtcacaagaagagaaggcttggagagccatacttacaggttggtcgtaatctactgaaagtgatgataaaggtcatactaaggtaaaacctgaactcagttggactactgaagatgaaaaattatctggttataacaataaggctttacatgctattttaatggtttcggtgaaggctttattaaattcatttcatctagtaaatctgtaaaggacacgtgagaaatccttcaaactcagtttgagggtaccgctgatgtaaaaagatcatgttttaccatgttgcaaacnnnnnttgatgaattgagaatgtcaaaaactgaaactttgtctgatttttatgaaagattatctgatatttataatgagttttttaccttgtgaaaaaattagatgaatctgtctttgtttgaaaaattgttcgcgtgcttcttgacaggtttgacacaaaattgctagcaatggaagaggcaaaagattttggcaaaatgaaggttgaaaagctcatgggttcattaagaacatttgagttaaatcaacaaatcaagaaaaagggtaagcaaagtttcttgagtgagaaaagcaaaggtattgcgtttaaagtttttgaaaatgatggttttgaggatgaaactgatgatgaaatggccttgttgacaaagaattttcaaacatacatgaaatctgttggaaataaaaaaaaactttctaataactccaagaggtaacaattctggtaacaatccttctaaaccttttatcactaacaataaaaagggtattcaatgtaggagtgttaagggtatggtcatatccaatctgaatgtgccaataccttaaagaaaaataaaaagggttttaatgttacttggagtgatgactcagaaagtagtgaagatgaaaaagaaaaggttgctctaacaagtgttttgtcaaaaaaattgcaagaaaaaggaaaattcatatgtttgaataacaccttgaccgatgacaatgagaaagaagttggaaatttgtgctaaaaatcgttcattgtttaaagtcaataaaaatttgtgtcataagatcttgaagaaaaacataaatgttatgaatttgaattgattttaaaagagtctaaaattatctctttaactaaggaacttgaaaatcttaaaagaaatgtcaaaatgctaaatccaggatccaacatttttgaaaagattcaaaattctggtcaaacgagtcatgctggtttaggttatgtttcgactcaatccaaatctaataccaaatttgttaaatctaatatttttttggttctggaggttctgtctccaccttgcagggctctgttttttcagcaaaacacactgctgacacagaaaagaagcaacatggtaagtttgacaattttaaagggaatagaagacaattcattcctatttgccatttttgtgggataaaaggtcacattcgacctaaatgcatcactatgcaaaacatgtttaaatctaattattttgaaaataaatatgtttctcaaaaacaaaaatgggttgtcaaaaataaatgcttggtaggctcctcatgttttaaaactattgcttctaacatgtggtattttgacagtggttgttctagacacatgacaggtaaaaaatattatcttgacaacattagaccaatacattgtggagaagttactttcgataacaggcttgtcagaaaagtaataggaataggaactcttaatcttgaaggacttcctagactgaagaatgtcatgttggttgatggactaaaagctaatcttcttagcattagtcaaatttgtgat

SEQ ID NO: 120205 - DNA, 1111 bp, Cannabis sativa
cagaccaaacaaatcttcccggaaatacactggaacttcatactccgaacccaatctcggaaccttttctgcgaatttcgggtcgaataaatacaatggcctctcttccctcacttgatctgaatacctaaagtaattctcaagcttcatctcaactggccctactgaaaaatgtaaatcaccagagagcttaaccaaatagtctctatcccatttttgaagagcagcccaattatctatacacccttctaacaacacaggcttattcggttcctcaaaatttgacacaaattcttctaccgatatgcccttcttccgaattatgttatctctttcaagccactcaggtttcatttcaagattggcacagagccaactctgaaaaagataatcagaataaaagtccctcactctcaaacacgacaatccaatattcatggcatcaaaagaagggtaacaagtagcaatgtaagtgagcttccatgaccctttaaagataaacccaccactaagattttccaacacgagattcctccaaaggggttcatggttagtgaatacatagaaagatttgctaacagtcgctaaaacccctaaatgggtagcacccaaaagccctagaatatcaataacaagctcatctgttagggtttggagattgcccaaacctgtgtttctagagttgacagaagatgagttgaggtagaaatttcccaatggtcgaaccccatgagtgtgtgaaggagcagaggctttgaggctgaaaccttcattaatttcttcatcttcaccttctgattgatatttttctgaaatgagattttgctttatgccattggttttgctcctaagctcgtttttggttttgtttttggtcctttttcttttccataacaagctcttgcagctcaacatggcggacgaggttcaacactgtaacagccaactccgaaggagacacacaaagctatgtgccagggtttaagctttccttcattcgtttggggcctttattattgggcctcaaaacaaatttcacaaagggtttcataaatgcacatttttttttttttgtgaaaattacatgaaatatgggatttcataacaaagt

SEQ ID NO: 120206 - DNA, 2392 bp, Cannabis sativa
gatgcagtaatgctaatgtgattttaattctaaaaaagaaaaaatcggaacaaatgtctaatcttcgaccaatagctttgtgtagtgttatgtataaaatcattattaaagttatggtcaatagaaggaagtctttcatggattctattatatttgctaatcaaagtacattcgaaggctactctcagataacatcctggtttcgtttgaaattctccactatttgaaaaggaaaaggaatggcaaagatggttacatggccctcaagcttgacatgagcaaaccttatgactgcattgagtggaggttccttgaagctatgttgagaaagcttggcttcactgatcattggattcaacttatcatgaaatgtgtgacattagctagataccatattatccatgggagccatgagatcgaccttattgttccctctagaggaatctgccaaggagacccactgtcaccatacctctttatcttgtgagcggagggccttttaacttcttaggaaatatgaataacggagtaggcttcatgggtgtaaagtggccaatggcactccaagaggatatcccacatgctctttgttaatgacaactatttgtattgtaaagctactcaggaggaagcggttcgggtccaagaagttcttcacaagtttgaattagcattgggcgaaaggtaaatttcaccaagtcatcaatcttctttagctccaataccagtgcgaatttgaaagtaagacttgctgagttgctgggtatgggcattgctcatgaatgcagtttgtatctcggtctccctagctcattaagccataataaatcagtggctttaggatatttgaagaaaaggtttggaaaagaatacaaggttacggtacaaaatttctctctcgtgcggacaagtaaatcttaatcaaaatggttgctcaggctctttctagttatgctatgagcgtctttttgttgcctcttgagattactaaagatatggagagcttgatgactaaattacggtggcaatcatctagtaatactcacccccggtatccattggatgtcatggaagcgtctttgcaaacacaaaactaagggcggaatgggctttcataatctttgtgattttaatttggctctcttgggtaagcaaggctggaagctccttgtcaaaccagcttctcttgtggcacgtatcttcaaagctagatattatcccaatgggtcattccttacaacaattattgactccaacccaagtgttgattggcgaagcatcttagaagtgcaatctctaataatgaaaagcactcggtggattgtgggggacgacatcagtatccctattctttgtgagtcgtggcttcctgatactgagaacccaataattatttcttctcacccaagtctctcccatgctcgagtgtgtaaccttatgactgttaatggtatggttgggatgccaaagtcttgatagatgtattggagtagcgggatcgcgagttggtgttgcagattccaatccaaactcaacaaactaaggacacgctaatatggcacaaggaaaatttagggttgtatactgtgaagagcacctacgaaattctttaagagtcaaatggtgaaactagttttgatgatttggatgtggatagattttggaagaagctttagtaactcaaaataccaccaaaaatgaagaatctgttgtggagagctggtaaaaattgtctccatactatgtctcaactccaatcgaagcccgttgaggttggtattccttgcccagtttgttctttagaggtggaaaccatcctgcatgttcttttcacctatctagccactcaattatgttggaatcgagtgggcattggtacaaatatgcaatttggtccttcttttcttgattggtgcattgagtagttcttgttgttcgatattgaccgtatcaagttttttgtggcactgttctgggctatttggaatgctaggaatgatagagtttggcaaaacaaagtggtgggtgcggataacattgtttcattggctaaaaactatcttaatcaagggctacttgctcaaagatctggtaatgagctttttttcacttgttttattttgggagacggagcggagcaatgggtagcaccaaataataatagcattaagatcaatgttgatgcggcagtgtttaacgaggcctaaagctacggtgttgggtatgtggctagaggagcacacgagggtcgcacaaggatgtttcatggctcggtgacacttgaagctgctgaggaaattaggatccgtaaagctttgagttggatctagataatcaatggccacatgtgatcttggaaactgattgcctgggttatgatcagacgcccata

SEQ ID NO: 120207 - DNA, 2072 bp, Cannabis sativa
acatatatgtaatattcatgctatattacctcgctccgtgctcaagtgtgccggtcagcctgagtggaagtgtagctcgacgctttacagggccttaaaccataatattcaaacttgatgagagacattctaaaacatctatcggggatttaaaatcaaagctaaggataaccctatcgataaataggatgctaacaccttaaataacataaaaacagggaaaactagggtttgggaaaaaccccagttcctaggtaccaaccggtcgaccggttctaatggtctcccaaaaccggtcgactggttttgtgctgggaaccctaaaatcgatccctttaattcaaatcaaccccaaatctttccaaaacttccagaatacctgtatgcactataatgaagcatattcaagcagaagaatacaataaataacacaaaaactcaagatgccattagaggtcaaggtttgagtacaaaaactcaaaccttgctacaatctcaataccacaaccaaaatccacacaaataacttcaagcaaactccataattctaactaaaacaacaattataaccacagctcttaaattcctacaatcttacctcaaaacctagcttaagcttaagaattactaaaaagagaaaggctagaacacaataccttaaacacaagctccaacacccttgatttctcctgaattcagctatgaaaatctaaactttggctgagaatgagagagagagagagagagaggagttaaaaatgaatgaattttctaggtttttctttttattttccttttaactttaccctcaatcaaacataacttaatcaatatataatcagccccccaaatccactacaagacaaataaacacttaaggaaaaagacctatttaccctttagataaattaaaatgagtaaaactcccaaaggtaaactagtcattttccaaaccccaaaaattccaacacctccaatacccaacaataacaccccaaaaataatattctaaagatataaacgcaactctctaaaggcccaacgtcgttttccacagcttctgaacacaaacacagaaattgagatatttacgtaaatagcataataaacatatatgaacttaaatatatttccacaatatgcattttgtaaatattaattaaatctcatacctaaaccctacttatcaaatattccaaagtactaattataagcggtctttacaggtttactctgtacctcgagtaaccctaagtgatgtaccacatacacaccgtacctatccgtactagtgttggtaacactgtactgtactctttaaacaccgcacactataccaatgcactcagtactgctactatactagtgttgtatgtatacaaattacaaaatagcatgcatatatcacatataaaacatgctctatgctattcttacatcgtttctgaattcaagtgtgctggccgacctgaacagaaaattgcaagctggatggatgccttatgtcacaatcacgtaaaaggataaataacacgccaaaacctaatctgggaacctaaactcacaactacaagtttcgctatcgataactaacaaagcaatgtcctaattattgagggaacaaccaactaaggctttaaaaataacacgaattgataaaatagatttttgggaatcctgcccctgatctaattaaccaatttgcactaagtaacccaaacaagtctaaaacttgccaattcgtgtctaaactataccaaaccttacagaacacatataaaaacctcaaactttccaagcaataacaataagaaaaacacccaaaatccaaaagtaccattaatgactcaagtttgagttttcaaacttaaacttgctcattttccactcaaatcatcaaatccagctacaagcaatcaatttcaacttaaactgaacttagaaactgaaccacaatcaattctaaccctaatagccactaactctcaaaattggatgccataaccaactagaacttagagaattctagaagtaagagtttctagggcttaccttggttagaacttcctcaa

SEQ ID NO: 120208 - DNA, 1613 bp, Cannabis sativa
  modified_base (786)..(797): a, c, t, g, unknown or other
aaacttggattgtgaccaagttcagcagtaaagaaagagcctcggggaaagtaccgagccttgtataaacgactgacaagagaagactcattaacaatcaatcgccaagcttgcttacccagcatatagagattaaaatctcttaagtctctaaatcccagaccaccaaaatgcttatgctttgtcagatattgccaaggaattgttactaactacctaaccaaaataagtgtaacctatgaaaagcgtcaataatttaaaaaataaaataaaatttaaaattatcctaaccacctaactagccaagattagtttcacgaccatgttaatgaagggcaaagtaacagaggatagaaaggataacacatgggcacaattggaaaatccatcttgccaaaaattttatacgatcataccactttttattgaaaggaaacaagagaaaaatttatacaattataaactatataatattatcactccaaacaaatagatcatatgttaagtactttatagaaaaaattacctcagcattcacattttttaaattatttataaaatacgctttaacattcccagaatataacgaatttttaattaatagtttagtatgcatataccgagactcctcaatctttttttcttttttctaaccaccgagaatcattgactcccttcttttattatttttctttttttttcaaaatctcttactcagtgtcttgataacacaacttgctttttcatttatatgctttttgttaatttctctctctctctctctcnnnnnnnnnnnntctctctctctctcttataattttaataaactttataaagattttttaatttcatcggtaattagttgagcttaaaaattatattattataatatacttttaaaaataattattttaatataggagacatatatttctcatcatcactagtaaagatgactgaaataaaaaataacttattagtttctttttctttttcttttcaattaattaaattttaaaattaacaaaaataaatatgtcaatcaattttaataggttactaaattatattatgttattcaaatttaaaaaagtttatatattattctaaataattgaagtagtttattgcaataaaaaataatttttaagtttcttttctattattttttttaaaaaaataagtaatcaaactttaacgtaaacaaaatttaatatactaattttaacataaaatattcgaaataaaaagtaactttatagtttattttatagtttcttaatgaaaaaggaaataacaaatataaattaaacaaaatataaaagtcaactaattttataaattactaaaaattatttgttaattcatatccaaaagttactatatgatatgtattttatataaatttattttatagagttatatttaataaatttctaaaaacaacttataaaaaaacaaagtgatatcttttttttgaaacaccaagtgatatcttaaagggatttttacactgttagacatttatatgtataaactgaaatatatatgtttatgtataaaatgcggaattaaatcaaacatatatacactatgaataaggatcgaaatac

SEQ ID NO: 120209 - DNA, 1275 bp, Cannabis sativa
tgagtagatctaagatcttagtaaaataatttccaacaattccaccatggcagttaacaactaaaaatagatggaagtattaaactgctaactaaacacaagtttagggggttttaccaccaaaattttagaatagggggttaattgtaaaaacctaaccacttaaggaggttatgcccaaattactcttataaatttgtagttgtcactacaatcaaagttcttattatcattgattttacttataatcactattacatttaaagttactgttatcactatattttaattgtaagcaccactaaatagaaaaaaaaatttaataaatcaatctaattaattttttaactataaatataaatattagaaaaaaaaaataagatttttaacctggactatgattattgtacttttattatctcctttttttcatttttatactttaaattatttgttttttttttttttgtatttttacggaaattcacatagcaatccacataaaaatgaacgaaacaacttaaatcgtaaccaaaatttacacaacaacatatattaaaactttaagagcaaccaaaaccgtaaatttttttttaaaaaatagtataaaaggtaatttttcttttcttttatatgtttaataaaatagttagtgccaaaggaatccgattatctcatccaattcgaaaattaaacgtgtagaaacattttaaaataattattgatgagatatgcacaatcaatttcagattataatcaataaaatcaaaaaacacaaaattaatttcataatggaaatatataagccctaaaactttaaacataaaattctcaacccatacataataatttcatacatataatatttcaatagaaaaagaatttaacgagaaataaaacctctaaaattttaagactaaataacgaaaaaaataaacaaaaaataataacgaaattaatatataattagagaaaattaacatatacatattaattgttacacaaattataggtcctaaatcatatacaattggtaatctgataccacttgttagataaatcaataataaacccaagatcaatttgtatataatatagaacatgataatagtatatgataattaggtatgcgtacttgattgatccatagcaattatcacaatttgataatacaatactatcaactaagtcttcctctctagatctctaaatcaaaagtagtttttattttatctgattatcaaaaagtatacaattgtgatgagacaatatgta

SEQ ID NO: 120210 - DNA, 4311 bp, Cannabis sativa
aataaatgaagaatagtttcggcccaattcactaaatacagcaacgtatgcgacttgtgttatagtgagattttctcacctagaaactcgagaccagactcttataaaactgacaagtggactcactctcctcgaggaaaactgagatgtcagtgagagacctcttgagtataaacctcgtctgaaccagactcagcgagatgacgtgaccatgacagagtctaatcgtattcgtatagctcgcataaaataggaccaaggaacggtttaagactcgcatataccgagatatatgcgaggactatcgagatcctcctgcgaattgtaaagattgattctttactcttcgagttggtccagattacccaacaaccctgataacccgataaggattcgcatgccttaggttgtcgacttattacaggatgcccgtataagcgacttgaacagggcgcagacatcctagactcaactagtcttgtatgcatcttaagcctgcgagcttatgcaaggatatgaacagacaactcgcaccataaaagtcgcatacattgctgtatttagtgaattaggccgaaactgttcttcattgattatatttacgtttttattaatttaattattgtaattaaatgtacgaatggattgataatgaatttaatctctatgtaatcaaaggacagttgctttgtatataaaggagtgatccaacatgaaatggacaagacagaaaagccttgcaacagtggactaagtaaatcgtgatctgaccgaaccactatattcctttatgttctttatatttccagtatacttccagtatgtttgtgttcatagctcgaatactcgcctctaggttgagtactcgcatattctctgctcatatctttattataatatttattttggtgttgtctacattcctccaataacatttggcgccgtctgtgggaaaaaaataatttgttgatttcagagaaatcactatggctggaaatcagacgacgggagataacaacgcttcatcaatcaacatcagaacaatgaatgttcaactcccaggtaatggaacgactcctgtcgacaccatcaacggaggagtgggacgaacaaccattactcttcttaatctattccctgaaatcgccattcatgttggagaaacgtctacaccaacggccacagtggggaagaacctgcctataacacctgtcgtggtaattgaaggtattattcagttgaccaccacccaatatactgcattacaagataaaatgctggctttgcaggctgaaatcaacggaaggaccaggacttgacgtcctcctcgagtaccaaccacccgctcagataaccctcaagtaactaatactagacgccaaactaaccgcactcgcagggaacgcaggaccgaacaggaagggctcaacttaaatcagccaacgccgagagatcaagtcgcacgaaactccaatcgcgaagtacagcaagaggaggacctaaacaacgcaacccgcacagtaaggctcagccacggaatgaggtaaacgatgctgaatcttgttcttcatcctcacaaagttgcactcctagtgtttataccaggtcaagttctgtggaaacatcacgagaaggaaggtatcaagttcacacgggtgatctttgtgatcaccataatgtagtttttagggtgcggtcccagacgccccaaaatcgcgaagagcctcgtgatccccaattgggcgatcaaggcataaacaacggtaacaacccagtagatattactagcccgcctaacgcaccaactgtgactactggggtagtgatcctagcaaatatagctacagttgcaactgcaccaaacacgactcagaacaacgccatcctgctagggggtgttgatcagagcattttactacaagcgctaaaaataatcgaacaacagagaatgcccatttacaaactccatgggacttctcctttcaccaagaaagtgcgacaagcttgattgtcaaagggattcagactatccaagtcgctgaagtataaaggtaccaataatccaatatattatttagaaaaatttaatacgattattgaagtagactaggtacctcagctagcgaagtgtcgtatccttgcggcaaccttggaggataatgctcacgattggtttagccagttacctgaggcgtccatgtcgacttgggaaaccttcgtggacctattcctaacacatttccaagccacgatgaggtatagaccaccttacacaactctggctaatatcaaacaagaggtcagtgagtcattacaggattattttaaacgtttcaatgccgaagtgactaaggtcgagaaggtatccgagtcttcattagtttgcatgttgattacaggtgtcttgcagagaattgatttctagaaggagttacaggctcgaagacacgagtcgctggtagagttcttcgctatggctgagctgcataagaggataaaaaattctctggctgagttagagagagggaaggaccaacgcgagtcacctgtaccacggtaacaatctcgcagtcccagagggagacaccatagaagatgcagccctcagaggctgcgaagtccaaagttggctaagtccccctcaaagaaagaaacatccccaaagaggaaatgaggaccatgctttgtcaactacacagaattggcggtcccacgagattatatctacgcgattgaagaaaagaacgaagttttcagaaaaccacccccaatcaggggtaatcgcgacaaaagagatccaaagaagttttgtaagtatcacaaggacattggccataccaccctggaatgctggttcctgcaagacgagatcgatgaactaattagacgaggaaaatttggaaagtataaaaagcttagtgaaagtcatccctaagcggatgacaatgatgaaacaaacaatgtgagtggttcgagaacccctcgcaatattttgacaatcattggaggaccccacattgtaggagactccaagaaatcacaagaacggtatgctaaggaagcgaaggagaaaccgctcactgatgtgaataacttaagtgaacgaccaaaaaaactttttaagaaggaatgcgacgacataaccttcatggaaagtgacgccaggtgggttcaccacccgcatgctggcgcactggtcatcgttgctaatattggaggacataatgtccaccgcatcttagtggataatggaagtttagtcaatcttctcaaatttcaggctttcaaacaaatggggttacaggaaaaggatttgtcacctgtagtctcgagaatctatgggttcactggggacaaaattgcattaaaaggaatgattaaactgccaatcactctaggaaccgcacctgtcactgccaaatcgatggctaattttgcagttattgatcagtactcagcatacaatgtggtaattgggcgccctattttgaagaagatgaagattgtgacctctatctataatctcacaatgaaattccctaccctcgctggtgtaggatctatgcgatgagtccaatcagattcacgagagtgctacaacgcagcactaaaactcgtagaaaagaagaactcggtaaatgtgatatatctattggaagcaccacctcctcgacaagaagttttcagaatcgaggagatagcgcatgaagagaaacctgatctagatccaaggattctcgattatactaacaccgcacaacctgcagaagatacaattgagcgagaaaggctggtcacctttctcagaaaaaatctagatgttttcacgtggaaacatttagacatggtcgggatatcaccgcatgtcatgtgtcatcaattgaacattgaccccgaagtgcgaggtgtctgacaaaagcgccgcaaaatggaccctgcgaggtacaaagcgctaaaagaagaagtagatcgccttctgcatgtggtttcacaagggagtcattctacccaaactggttagcaaatggctcatggcccacatgcattgatttcactgatttaaataaagcatgtcctaaggataattttctcttacctagcattgaccaacttattgatgctaccgcaggtcatgagcttctcagcttcatgaacgtatactcgggatataaccagattttgatgtatggaccaaacccggagcatacctccttcattacagattgaggtttgtattgttataaggtaataccttttggtttaataaacgcaggagcgatgtatcagaggctagtgaacatgatgtttgca

SEQ ID NO: 120211 - DNA, 889 bp, Cannabis sativa
gagatcggagtcttatgattatccctctgaatttaatacactggaggaccttgcttcgcttttggatcaagtacttctcgggcaagtaaggttaccccgcctctcccgcgatctccaaagtcatgtcacaacaagatcggaggacaacgatctcaatgagtggatccaccaagctgtgtagtcaataggggttcatcaccaagaaggaatccgaaatcgctacgcgaacctaacttctggatctccttcaacaccagagacggatagtgaatgtgatgaagagatggaaatggcaataagagaacacaaaagagcctttgctagactcaacagcttccggcaagtgcaggaagtagcaccatcgattccgggagtgacacagtgggtgtcagatgtcgacagtgatgaggcagctatataatcagagctcctaaatgaagattctctgccttctgtggcatcgcctgagatattcgaagctgcgaagaacatcgccgatggagaagaagataaatggctagagagaaatcagcagcgtgatttgccgcctaagatgacgaaggaagaggcgtggttgttggtggagtcttttaagtaaaaggatttattggcctcgacaccagatcgagaagttgttccatggggttcgctcgcacctcggcaacgaacgatatcagagaagaaggtggttatgtcgaaggagaaagcgtccctggtgccattgccggagaagaaggttgtgtgggagatggtgccgaacgagaaagagatgacgaagacgctgttagtgatagcgccggaggagaaacgatcactagaggcagttccatcatcggcgtcgaataggaatgaacctcctattggaaattatcttaccaggatcttagat

SEQ ID NO: 120212 - DNA, 894 bp, Cannabis sativa
tgaaatagattagtaggatcataatcttacttattacttcattaacccagactataaatataaaccctaattatttatcattaggcttatcaggatattacacaaacaacccaaccttccatgaaaggacaaagcatatcgagctagattgtcatttcattcgagacaaaatcaacaaatctcaaatcaaactcagcccaattaacaacacccatccaactcccagatgttttcaccaaacctcttgcctccaccattttaacatctcacatcaacaaaatatctgtatatgacatatataatccatcttgagggtggggagggggggggagagtaataagttttattaggtttactagtttatacttctgtattgtcaaggtagttattaccgttatttactttcctttattgtaagtcaattggttggttagatcgttagttagttagttagttattggtctattcagttcttgcttctcgtgtatgtatactttataccttagtctctattattcaataagatgattaaacacattcatttctcttattctctcttctgcaattatactggatctaaaatattgtatggatccgatccgatccaataaatactaggtctaaaatattgaatatacttaaattaaaccaatagatataaatgaaatacatctaatggatagaaccgatgaaatctaacatccattggatggatgttgtattgattggatgactggaattaattaattagatatcggatctggatagacctaaaaatattagatatgatcaaaatgttacacaattgaccaaaattaatttagggattatttcacaaatacataaaaataactaaaaaaattacaaaaatacggtttcacgaaattttaaata

SEQ ID NO: 120213 - DNA, 1958 bp, Cannabis sativa
tctttattttataaggttaaataaaaggtcatatatatgatatatattatacgatacactaaagaatttgaaccacataattttctaactagaaattagtgtatagccaaatatagtctctctatctctactcgtgtatataattggtagagtctccctctctctcatcatcacaatgtctaataagttgagtacacactgtgatagtaaataaccatccttgaattaatcttacaagcccacacttatcttgtagtgttgaagattaatctggaaaactttgatgtgagttcttcgcaaattaaacatcgttggattggatgatcattattatatatgaaaagattcgaggatacattgataggctacaagaggtaaatctttctcatcatgtagtgtagatttaattatgtaaatacattgagatcttggggattgtggtttagattatgatttcttaaaaaaaattatttataaaaatgtttttgctttctactctgatttggaccataaaaactaacacgtataaggtataaacaacaatatacttgagcaaaattagcattaacaataatgttaatataaaatcacacctatttttcaaccacaaagaccctaaaatcttaaaaatttagtgtttcttttcctatatctagaacatacttgtgatatcgcttttagttcatacaagtttatgcatttttcactaaaaatggctctaaaaatgggttaaatggtaatgtttttgagtatggtgaatagagattgtggtaggatttgggaagagggaacaagagaagagaaatggaaaaaaaaatgcgagtaaaaattaagtatgggtatttttagaatgagcacagagatggtgtccaaatgcaactcctatttaatttcggtgataattaatgcattaaaagtcaaaggagttttttcaaaaatactatttttaattacttttttatgttttatttacaattttacaacttaaagtttttatttacaaaaatacgattttaaagtttcaaaattacaatagtacaattttctcagctaaaagtaagaaaataattaaaaaacaacgagaaatcaacctccaacaatctttaaataatgagaaagctaacatcatgacaattataataaactataaaacaagtaaataaaatattttgaaaagtttactaaagtccgaatttttataaataaaaagatttaatccgttaaaattaaaatttctccatgttaacacatttttgttattttttctttttcaaattttcaatctattacgtaaaaatttcaaagtcaaatttcccttccaaatttgctcaaaatgattttctttcactcacaacaatttctctaaaatagagaaatagacaaattttaaaatatttaaagaaccatactaaaaacatatcaatcaatcaatcatcaatcattaaacaatcaatataaaggagagatataagacatgacgtgacactttaaaatcacttcaaatagcttcatcacttctctccttaattctatcattttttaattttttattagctttataatataggaatggattaattaactaagagaaatatctatctaatttaaattttctcatttttatataatttatattaattaaaaaaatacaaaaatatctctaaaataaacctcataaatcctcacgaatttaaagtttttataacacatataaacatattattaaaacctaaagcattactaatcatatatatctataaccatatgcacattttaaaaaaaaaatacttgaagcaatactatatctctttaattctcttattttttttttcattttttattagttctggtgttgttttgtaataaatttattttctaatttttaatcacaaaatgaaggtaaaatttttgtttttaaaaattttggttttgaaaaataaaaatgtgttctctaacca

SEQ ID NO: 120214 - DNA, 823 bp, Cannabis sativa
tctttgaatttcttaggcatataagatatgactatctcattgagtgtaacaatgtttcttactccatctggaactctcctcaatctactgcatctccaaatacgcaaatagtaattaatggaagacatataacactgtaattagtgtagtgtctttcatcaaatatatgaatagttgggaaattttgaagaccctttttaattaaactttacattggtaacagactaacagtggtgtccatagtcttaggtagttctattgtcattagtgtcatgttgatgggagggagagccatcttacttggtttcttatgctactctatacaacaagaatgtcatcaaacattaattgtggactacttagtcagagcattgaacccattaaagtcacttaggaaaaaaaaacaattacaaaattacttcaacatggaaaaatttttatttacactctttcaactttgtatttacaaaaatgtctcttcagtaaaagtaataaattattttttttgttgttttatagttgtattatagttttcatgagattatttttccggttgttttataatttatttgtccaatggtagagtacaacttatcaaaaaggagaatgcagccaacaacaaagtgtgatcaccgtctcaaacacctagaacacagttggtatctacacacctagaactctttaatccttgaagcatttcttttacttgacattaattcttgttgggaaacaatcgattcttattgatgcattacaccatgcatgattgcacacttgaactgaaatatcagttctctaaaactagaaagaaatgagagagaga

SEQ ID NO: 120215 - DNA, 1326 bp, Cannabis sativa
aaaataatttccaacaaaaacatgtaaaagaaaatcaaaggaaaattacttactctggtgcattccatcagcaaccgcccataagaagctctacagacatgtcctccccccgattaactgatcgttcatttagggaagcactcgatctttatagaattgaagcatctccttccccttctttgtttctagatttagcacaggaggaatggctagaggcttaggcagattgggcccttcagtgttcaccccttagaacccttggacgggataatcgtggattgagacttcgaattcttcttggttggtgggacaaagtctaaaactgcaaccttaggaacctccatagtagggacaatgctttttggcggtatatcatccaccttgggacgctttgctggggacttttggccagaggcatcgcgtgacctcttctttagtgcacgcatcattctctgagatgtaactgcacataagtaaaatagagatgtcaggacagcatgaatcaaacaagtgcaaaataaactaccctgcacgtgaacagggccccctcccaaacaagcaaggaaggaacatcctcattagaagaatcttcttcttccactaaaccacaatggattttccctttcctaccacttggacagaagaatgagcagtctcctcaagaccatccctgatcttgataggctgcttaataggtactgtttcaccttagggagctttattctgcttcttcttcttcttcggaaccttctgtttggttacaacttcctcttcttaggcaggcataggctctcctgctacctgcttggccccttgttcatcatcagacgggtagagtttatacatgatgaaattggcctcagtagctaagagagaaatattctaagcatctgagggaaattggagtatttcttgagccctcttcctacgttctagtgtgaagggaggccaaaagtacaaaagaatgtgttggaagcttatgtaattggtccccatgtccttgacaaaataataatcctccataaaaccaccaatcttggacacgtcaatatctgtggtgccagtcaaccacttctcttcgatctaggagaagtagaagtatctagacctatttttcttggggctagactttaggtcaaacagctagttggtgtcgtgggtggatgagaagcattcagcacaaataaggtagacatgtatttaatgcctttggaagtgaatcgggtcggactgagatgacagtagttgtaatcccaaattttgtccacctgacgtggcatgtctacgttagccaaagatagagtacaggtggaggatagccctgcc

SEQ ID NO: 120216 - DNA, 1399 bp, Cannabis sativa
aaaaacgtataggatacataccaaaattatattgtaaatggtcatataaaaaaaataatcccaactcgtatgtggttaataattgagatcaaagagggtggtgtagagcctttttgtcctttttgtggtctttttattgagtatgagcatcattgtttgctttcttgtgagtattgttgggtgactggtgatttgggacgtgtggggcgagagtttgtctcagtttggggttggatggaggagttgtttaagtgcctgctgcctggatcagttaaaggacttgtgtcgtgtgggcggtgtggtcagctcggaatgagttgttgtggactaaaccgattagaggcatcaatgttgatgctgccattattgaagatgaaaggtagtttagctatagttttgtgggtgatgtcagttgggtatggctaatccagtgttaattaaaacgcttgaaattaagaaagttttgagttggataaagaattttaattttttttttcttataatgtagtggagtccgatagtttggtggctgtttagtcaatgcatgatattttaaagttgtactctgttttttgtgcagttgtttagtaaggcttttcttgggccattaggtactgttgatttggaatttgttactctttttttttaaataaaagtgtaatatcataaaaacgaaatagttagacctcccggtcattacaaaataagttctccggtaaggaggaaaccggaataaagccgttcaaatggtaggtaaaaaagccaacttagctacgtagtgggcaataaaattacaggacctactaacattaataaaattacaactaataaaagagggagaagacttaatacaaaaagagacatagttctcaagagcccaatgggactccttcccattgagagcattgattactagtctcgagtcactctcactattacaaactcagcaaaatgggctgcatatttttttactagatattctcgagtttaggctaattgtttttactttttttgaggtctcggctccctctaaattgttttttttttgagcgattagtctatttaataaagattaaagattactttcattccaaaaaagaaaaaaatctcttagtaatggcaacagtaatatccttatagttagttacctaagaaactctctatatataaatatatttgtttctcagaaattgcgataaaaataaaatgttgtgtagactttatattctttctctatttgacaaaaaaaaaaaatcaaacttcacatcttccaaatccatgttgaactagtcttccagactcttctctctcgactctcacagtatgaacaagggttcttcttccttcccagcgtgttcacaccagctctctgcatgtttccacacggtgaaacccatgc

SEQ ID NO: 120217 - DNA, 609 bp, Cannabis sativa
taattatttttataaataaataatagaaaaataaaagacaattgatgtcttattcccctccatgatttttatttttaaaactatctgaaatcaaatatttatttatttaataattaattaaatatttgtcaaaactaaaaaattataatttaaatctttatttaatgtattttattaatatcaataacaattcattaatattaacaaaattgacctaattttgatgtattactctttctttgagactttgtaataattaattaagtcctcaaaaaaatttcttgtttcttttcttaatgaaatatcaaatgaataatttatttccataatattttcataactaataattaaattaattattcaagagatcactagattcataaactcaagctccaattatcatgattttattttcaaacaaataattttattagcctattaattcctagtaattctattataaagttaaaattacacttttaaatttataaaacattttagaccaagtataaatacgttatccaacctgacattccattctctacatttggaaagccacaatgtaattaaatttgtgtgtaattggaggtaattacacaatttgacatg

SEQ ID NO: 120218 - DNA, 1300 bp, Cannabis sativa
  modified_base (41)..(54): a, c, t, g, unknown or other
  modified_base (1245)..(1253): a, c, t, g, unknown or other
aagttcatatttagggtattaaacaacatacttgtgagtannnnnnnnnnnnnngtaaaataatttccaacagatgtttctcaggaatcttctttatattcatccaaaatgaggaaacaaatattttcagtaaacaaatagatcaacttggaggacaaaaaactaacccagcgcccaagttgacactaagcctggtcactagcactcaagttgacattttgtcaacctcaagcatttccaatgagaattctaacaaagtcttctaagcatattctctattttcatcaacaattaagatacgggtgcttttgggaaacaaacggagccatttggtggccagaaagaggacttagtgcctaggttgacattttgttagcctgggccagttccaagcatttttctctggaagtctcccaggcattttcttatgttcatcaataaagaagatacaagtgttctcgggaagtaaatgaaagcatttgggagccaaaataggtacccatcacctaggttaacattggtgctagtccacacgcctgagactgcagctcagaaggacactggaccttatttgaaactatacgtctcctccaacaagcacggttctggtgttggattcatcttagtttctttagagggattttgaactcacagtggtttacagtttgagttcactacaacaaacaacaaagcagagtataaggcactcttagcaggattacaattagcactagcaatcaaagccgaatcactcaagatctatagtgattcacatgtaattgttaattaaattctcgacgagtatcaagcttgagggccaaacatgattacatacttaagcaaagttaaggatttattagcctagctcaagcagtactccatccaacaagtgtcgcgtgaatagaatgccaaatacctcgccaaatggagcattaatgaaggctcagagcctatgctgatgatcgacagtagtccatcatgaatgaccccaattccacagtacttaaaacaaggtattcttcttgctgactagaacgaagctaagagactgatgagaaaaacaactctctttatcatcataaataaagtaatgtacagaagatgcttctcaatgcctcctcttaggtgtgtcacgaatgaaaaagctaaactcctcatggttgaggtacatgagggcttttgtggcaaccatgctgggggaaaagtctctcaaagaagtgttggatttatgccctaaataaaacnnnnnnnnntataatcaaatttacttattaatcaagatcagaaataacattttatg

SEQ ID NO: 120219 - DNA, 1853 bp, Cannabis sativa
tccaatcaacccaagttttaataaaaccaataaaagttaatgtaagcccaaataaaaagtctaacacagaatccttcgagactcgtactcacatgcatgtggttttcaaatgtgcatggccgggtttcaagattagaaaccgagctcacatgcgatgtacattacaatgataaaaaaaatttacataaaaaaaattttaaaaaaaataaaatatacataaaattcctatgccccaataatggcttacattattttttagaaaaaaaaataataacgagaactacacctaattttactatatagttaacgatttatcacctctcatacattcacaataatattaccatccattcaaatacataacatatatataaatacataaaatctacacaacatttaatatttaatgtatatatattattgaattaatacctaaatctaaaacaaattaagtaattaatctaaattaaatttaaaaagatgtattaaataaataagtatatatgtatatataacagtatatataaaatatttataaattaattttaataaataattaaatatatatacctaaagaaggtggtgggtgccggtggccacgaagaggatgagggtcgtgattgggaatggttggtggttgagtgaacagactgagagaagagagaaagaaagcatcaccggtgatggagctcaaatgggggtttcttagttgttatccttcgtcggtggtggatgccgctccaaatggggtttcttggtggttgtccttcggtggtggatatggatttcgtcttcgaggctttaaagggagattaagagagagacgagagagggagatcatggttggattttgtggggtatcggtgctgctggtgagaaagagaagagactgaatgagagagatgtagctacggtttgattttatattaattagtcagttatacacgatggtttaaaatagtataggcgacggtttaaaaccgcatagtatacatgacggtttaaaatcgtcgcctatagtgtacccgacggttttaaatcgccaggtataactgactattaaaaatctcgataaacccataaaaccgtcgcgaatttccctcctgagtgttctaaaccgtcggtaatacttaattttttctagcgttttaaaacagtcacttaatattgttagcgacggtcctcgaaaaaatttatttttgggattgtcacgaattttgacttttgtactagtgaatcttcttcattcaaatacgggtatcaacaagtttgagttcttatcctatattggttgtttatttcatgaagtaaggcatgaagtaaggaattcggtgagaatcaaaggagctacccctcaggttgttctgctgattagaagtaaccagcagcctgaagaagtcaatcagtgtgtagcagaggaacaggttttggttagtgctcaggccaatctaattgtgttcattgatgctgcttggcatgatgaggaggttgagttagctattgtggctatcaacattgtagataattcgtggctgtataacatctcctctgttcgtgctcattcagctatggaagcagagactcgtgctatttgtttggcactggattgagccattcagaattcttcagacgattttcatcttttgtcggattgcaaaaaagtagttagagctttggatcggaagggctgcccttctgataggagtttttgcatttatctttgttagttttagatttagttaagcaaatttcggattgtaagttttagatttagccacaatagctaacttccatatattagaatattttatatatggaagttattttctaattaaggaaatgattttctattt

SEQ ID NO: 120220 - DNA, 1242 bp, Cannabis sativa
gcacaaaacccaacacagtctttgtaactttttgtacaagattgtaggaaatatttttgcgaatagacttaggccatttatggagcaattaatctccctggttcaatcaacatttatggctgatagaaaaataacagaatcgtctatcttaacgtaagagattatccacaagattaacaagaagagaggtaaaggtggtttgatggctatcaaattatatattcacaaagcctgtgatagattagagtggactttccttcaaagggtcttaagagaaaatggattcaatgaaagagcttgtaagttgattatggtatgtgtctcttcagtttcatactctgtccctcttaatggctgacctctaaagaaatttcagcctaaatgaggtttgagacaaggagatcccatgtctccattcttatttttgttatgtcgggaagtgctttctaagattattagtagggaaggagctagagcaagagagatcccatgtctcctttcttatttttgttatgtcatgaagtgctttttaagcttattagtagggaagatacatgggatcaagatagcaaggaatgcccctatttattatctcatatttgctgatgataccatcttcttcgtaagagctaatgaaaatgaagccaaagtttttcttgatttcttaaagaagtatgaagaatggccaggccaattatgtagcaaatcaaaatcaagcgtgttgatttctaagaacctgtgccatgaaagaagagaaattctctttcaaactctacaggtgcaagctgtttcaggtgacgaggaatcttcaaaggaaggaagagatgggaatacaatgctcttaaggataaaataaaagcaaaacttgaagggtggaggtcaagtcttctttcctatgcggggaggatgacattaattaaatctgtttctttgagcatgtcagtctatgctatggccactcagaaggttcctcatatagtttgtagagagaaagatgcaattattagaaaattctggtggaatggaaacaaagatatagatagattttggccttgaagtcttgggaaaagttgtgtcagccaaaggcttcaggtggattgggttttcaatgttttgaagatattaatagagtaatgttggtgaagcttgcgtggagtttggcaagtgttgttgctaaaccatggacaaactgtattgtaacgtccccgcttcacgcctccattaggtccttacacccacaga

SEQ ID NO: 120221 - DNA, 1640 bp, Cannabis sativa
taataagaatagcataagaatgatattataatgtttagtttatttttgtaatggcaataaaatgaatggtgtttccatactttaaattaattcgataaataatagtacgaaataaaatgtataaaggataactttaatactaaacattgtaaaagcattacaaagtttttcaaaccgaatcagtaaaattataataacaatttcattaggattaccattacaccaaattaagagtataacttagctttgtatataagagcatttgctctaacattattaatacataataaaattccaaattcacaccaacactctcttaattctcacatcccttagattatattaaagtttaatactttaattttttttttaaaaaaaaaatccatataaaagaattcacacataaaagtccaaaataaattttataattttgcttttttgaaaaatcagtaatttcttgactgattctaattagcttttttggtagggtctaattataatggaccaaagaactttatatactttcaaaattttcatgcatgctttcattaactactccctctatgcattttgtgatatatattatttttattattaaagtagcacacctttaaaataaaattcttctcaaagttacaaatttagatttgaaaaagttttaaggaaatcaatgattttaatttaagtaatatttaacatcaacaaattcttaatttattggtttccaatccttggtactaagattggaattttaagtgttaattacttaacatcatgtcttcatgttcattaataatagttttattctatactaccgacactaagaaaagtcaaaaatagaaaagataatttaaattaaaagaaaaaaaaaatgagaattaaaaaagtcaaagaagctgaattgttggtcttaccagtcaacaaaaattgaaaggtacattccaaccaccataaccaaatgagctatgagtcatgttatatacatttcatttttaagatagtgcaatttctcattcattgagtctctcatatttaaattcaaaacaaaatatttttcaaatgaaaaagagcacaaataaaatatataaatttcgataaatttttttactattcattgcattgacggatccacattaagcctaaattaagcagttgcccatcctctcaattttctactttgaaaaacgagcacaatcttttaataatgaaccatattgctcatcttgatggaatcaacaatcctgagccgctagttggctcagaattgttggttccattaagatgagtgactttttcgatttataatgtaatccctatcatataattttttttacattttacgctcttaccattcaataatttgatcattttgtacaaaatatttatattttacttcctatatagtatattatagttttaataatttatttttttaaaaaaaataaacaactaaatattatgttaaacattacttttagtggaaaaaacttctgagtccgtcgctgattcattatatgtcgcatcttcagagacggacctacttttatcaatgtgggggttatagcccccactaacaaaaatattgttttttaaaaaattaaatgtatttttttaatttgataattataaaccaaaataat

SEQ ID NO: 120222 - DNA, 1227 bp, Cannabis sativa
ttataattggttagtgatatttcttaaaaattatttttttttttataaaaaaaataaattattttcttaagttatatggaacccgataattacacggtacaacaccgaaaaaaatgctaagtaccaataatatcttttagacttaagaaaatagtcttttttttaattacatataaatttaaccaagcaagatccgtgtatgaagtaaaagtttaggataattataatgaaacatcagttaagacctaccctttgagctggttctggggctaaaataaatatccgatttatgcgttacttgatcacttatatgaataattatgacacaaagaaacaccaaaatttattaaattatacacacacctgtctttctcactctctcttgttttcttacaccagtgtacgtgtgacaagctcatctaaagcacaatttaacaaaaacagaaaaaaaaaaaaaaaaaaaattatctttgataaattaaaagtgttattgaagctcccttacaaaaaaaataaaaataaaataaagtattattgaagcttattgttttgccgtttcaaggaaaaaaaaaaaaaaaaaagcttattgttttgttgttatacaaaaaaaaaaaatctgtgtcgttttcgcttattatattgttaaatagttgactcgttatgtaggtatagttaatagtgggttctttcctgtcccttccccacacacacatatatatttattattgcagaaattcccactataatttatatataatataatcaatatccttagagtacttataaaatgagttattatagtttattctctaaaatataaagacaaagtggtaaaagtgatatttctgagctaaatttgagcttttatgtatatttttttagcttaataaatagtaaaaatagtattacatcacatgagctaaaatataaatattatattaatattttaaagttttctttaatatatatgtgtataattatttatgtgcttttaaaaaagaataaaatatatgagaaaaaatataactttaaaatgatatagagaaactaataaaatatatgagaaaaaatataacattaatgtaaatatttgatgtaaattaaagaaagttgaactttaataaaatatttatgatatagtagagaaagtaataggagtacttttagatgagatggtttataatttgagctaaattaagttaaaaaaaatgaatcaatattatattt

SEQ ID NO: 120223 - DNA, 1646 bp, Cannabis sativa
aacaagtattgtgactaaaaatttatttagtcacaacaaattgtaatttttgtgattaatacctttagctatagtccttttagtcacaatttaggaaatattatttataattagttataatttttttactttcattcatagttttattgtcactaaaagtaagatttttcatatcacgtcattgacacaacctaatttgtatcatgtccactaaggtatcatgtcatatacaaaactaccataaaactaccataaactaccatgaaataaggtcttgaaaatgattaattgtttcacataataattattaaattagaatatatcagtaaataatataattgactattacatctcataaaaatgataggcataacatttagaatttctcttggtttaattgtatatttagctttttatagcaataaaaacctcagtaaaaatttaaatttttgtaataactataagggtaaataccattttagactttgtgttttgcaaaagtcactaataagaccctctgttttgttaaatgacaaaataaatcttgtattttctaaaatggtacaaataggacactgaaatgattttttgtaaaatttaataaaaatttgatctaaatgtgttatgacaaaactatttacgttttctgaatttgttcgtgttaggaattgtcttcaaattgattaaaaaaaaagttgtcgaaaattaaactcagtatcctatttttatcattataaaaatacaggattcattttgttatttaacaaaacaaaatgttcaatctataacttttgcaaaacactgatccaaaataatatttatcctagcaataataatatgtaacaatgccatatgcgccaaaaattcaagccattaagtttcgtttgggtttgcattataatattttaatttttttgttggcattttttgtttggttgtaagtgaacgagttatatattgtagcctcacaacttaaacactccagttcaaagggtaacacgcaatagaaatggagaagataagcacaacgttgccatatataattgataaaatcacatcactttgaccaaatgagaagcacgaaatacttaatgggcatggttatgtgatgaatcacacaaaatgggcaaggttatgggcaagactacttgattttccaatcgattttaatgttttcataattttttgtgggtgtgtgaatgaaatagttatcaaaatttgaaataaacccatatgatatcatgtgcattgaactagatactttagtatcatgtataaatatctaagaaaattctacaatgtaactcctttaaataaatgtattgatgcacttatctgttatagcatatgaaataattttttagttaaattttttctcatgattatgtacgttatagctatttaagacacgctacaaaattttaagaaatttataaaaatttaataagtggaaaataaggttcgaaaaatatattgcacgcgtgactattttatttttaacgcgtgtgaaatagattgtttgaatattactttttaaacaaatataacacaaataaatattaaaaaaaatatattaaaaaatttttttagataccaaaataaataagggtcaagatgcaaaatgaccctaaatctaacaattaagt

SEQ ID NO: 120224 - DNA, 967 bp, Cannabis sativa
ttctataggccctaacagcgcaagcggtttacgccccaccgaccaatcttctgatgttgcttcagttatggatgaaactgatacagatacagttccccctacaacgagatatccagtgtctgatccatatttaaatgacaatgaggatactgttatggctgacttggttcaacatccactcattctatcaggagccagggaaccccctttcacttacttatctagtttgtcagccaagttggctgcaatgacagaaagggttcattctgttaagggtatgattaaggtatgcatagtttttaatggggtataatgtggtgaagtagagatcatttgttatgtacttgtctaaatgtggattcatattgcagtgctttttaaccggtgtaaaaggattccagtacagggagaaagccacctatgatcttcgggtgtttgttgatgatggtagtttaatcaaagagattcgaatacatcataatgtaagtgcacatttgactttcacttctgatgacaggagcttgatacaataactgctgagtttattaaccttgtgttctctccagcttgtacagaaattgataggccattctccacgggaggtaatggcagctcttgcttctccagacacaggaatagttaacaacatcaatcaaggaaactctgtgtaactttcaaaacttcttagctagttttgaggtaatgaacactatgtttggtgcttgtgcttgttttagtaaggggcctgtatttttatctcatcatgttgtaattctttttttaggggaaaatgcttatagagatgcatgatcaccttgaacattcagttgctgtagagatgaatgtgggctgtcctgaatctgatgcattgttacttttgagaagagtgaagtcctcattttcatctcctcaaacaaggtctcttcctgtggatcccattgatctatccccttaattgtctcaaact

SEQ ID NO: 120225 - DNA, 919 bp, Cannabis sativa
atatatatatatccgtatatatacgaccttttaatttatataacacaaaatactctttgctgtaatcatgtggcgttcaagagtaaaatttagacaacggccatgtgtggggagcaactaagaaacaataggaccacacattaataaataaaattgaagtaataattaaggatgtgatgaattattatatatagattctgaatttggcaaatatattttatatacatgtcaaattcagaagatatatagtatacttcctcttttatgttcccaatatccacatccccttttgctaggcaattcaattacgttctttcaaattcagtagatatacatatataaatgagaattgctagaagggatgtcactagactagcaccaatgtaattaagtatatataaaaaatttatttttatgaataatcttttgtaaaattttttttgcttatttattattattatttgataccttaaaatggccaatacaataatactataccaatatgatacttaataattagctagcaatttattatattatttactaaattaaaatttgtaaaactcgatattgaaatgaacttataacagtatgtcaccatttatactatttagcatgtcccttatatctacatatctattagaattaacttttagttcaaattatacatatataactttgtaattttttttttcactttgcgcactgcgtaataagaatttcctatgattcttacttttttttttttatattttcacaagctcaataagattgtattagtaatttttatgtttttttttgtcatatttggaccaattattaatacttttttttaggtaaatactattttggatatcctatgttttgtaaaaagctaattagtattttttcctctgaacttttttagtcgttaaaaatt

SEQ ID NO: 120226 - DNA, 1347 bp, Cannabis sativa
atattttttgattttttaattttttttttagtgtagctctatttagttataacatctcaattagaatataatttacttggtcccaagtgtattcttggatagaggttctactgtattagagtttaccaatgattttcatatacagtttagggtcagcaagtttgtcttctccttcttggcttagtttaagattcacttccataggagtattagcagctttacatcctaattttcctaaatcttcaagtaattgaagagcatagtgtccttgggatataaaaattccttgattatttctagcaatttcaaggctaagaaaatacttcaattctccaaggtccttcaacttgaatatgttcgtcagagtaactttcaatttctccactgcaaccatattattactggctaatatgacatcatccacataaacaaggaggattatgatgcttgatttattcttctgaatgaacaaataatgatcaaatgatgaatgttggaagccctcttcaaccaaagttgtagaaaacttctcaaatcattgtctagaagcttgttttaggccatatagggacttctttagtttgtacacaacattaggtggtaactctccctcaagactataccctggaggttaagtcataaacacctcttcatgcaaatctccatggagaaaagtattattgacatcaagttgatgtaaaaaccaaccttgaatggcaataagggcaaggatgagcttgacagaaacaagctttgtgacaagggcaaatgttttattatagtcaatgtcttcttgttggttgtaccccttagctacaattcttgctttaaatcttttaatggttgattttgtagacccacgtacaccctatggcatgttgatcagcaggtaaaccaactacagtacaggtgccattagcttcaagagcttcaatttcagtgtccatggcatcatcccaaataggtatgcctcgagcttgatgaaaaaattctggctcgaagtggctggaaatagctagcacagttgctcgaaactttggtgatagcctgttgtagtcaagaattacagaaagagggtgagcagtagatgaattaggtacctgagattgcacattgttaatagataaaaaatagtgataatcttgaagataagatgatttttgggtatgtctagttggttgagtattagtaactagttcatgtatgttaatgatatcaggttcaggaatgtgtggttgtgtttttagttgaggacaagcagtgatggacccagaatttttactttgtgggggcttatttatcattcaaaaatatttatacctatattataatcattcttactagatt

SEQ ID NO: 120227 - DNA, 1345 bp, Cannabis sativa
tatatagtagatggatgatattattgactgttgtttgtttcaacttgtctactgcagagttttaggcacattcattatttgatcagggaaaaagagactctgaatcagcacgagagagatatcatagtgagaagagagagatagtacgtattggtatttaattaatcttaattaaacatatatgttctacttaatcatctaatacccgttattaattatatattccgtgcctccaattctctcaattaaatataccataatggcgtacgtatacattataattatactactgatctcaccatgcatggttttcgtattaattaaaaaatatttaagaaacactagcatgcactgatgtttgttttagtcgcgactttgaatattgataatgatttttagttacaaaacatcagtgaagataagactatttagtgacgagaatatgttaccattcatatgcgtatatatgtatagagagttatagtagtattcagcatttgtataaataaaattttaaaaaaaaaaaagaaaggaatacgggtcgggcttgacccgcaatgctgaataaagaagtcggaccgggccgggccaggccaaaacaatatcgagtcgggccggtctatggcgggccgggccgggccgggccgggcccgattgccattcccaactggcatctgtcatgaataaacatcagtctaaagatattttgtaatataaactattataccattaatagaaatcatattcattaaataatatattatatatattacctcataaaggaaccatcttgattacatcacattgcctaatcaggcaagtcgataatttaatctagtaatctaatattgcattgtttaatcaggcaagcacgttccatagcctgacacccatatatcgcataaccgcatcacctaatcaggtgagcccgtgccgaaacctggcacccatgtattgcatcacctgatcaaataagcccgtaccctttcttggcaccaacatatcacatcacctaatcaggtgagtctgtgcctaaatttggcacttacatgtcactacccctcatccctaatcaagaatcgccgataggaagaaacctaacaacggttttagtcatgccataacttgacattcatatgtcactgccgcttatacctaatcaggtatcgccgataggtatatcgcatcacctaattaggtgagcctatatatcacattcatggtatcatcacattgtcattgcctaatcaaaaaatattttcattacatagcaataataactgtatctccatcccaatatcaatcaattctcaacaatttgaattacattgcaatataacttgct

SEQ ID NO: 120228 - DNA, 1524 bp, Cannabis sativa
ggtgagttttaccaattttataatcgatcgtttagaattataatcgtataaaacctaccatacgacttttagcagttttttgcaattttttaatttggcggtttttgacagttttttgcgatttatggagattttggcaattttttgatttaaccattttttttttcaaaaattgaaactgatcgccatatcaaaaaattgtaaccaaaactaaccaccaaatttggtaatggcatagaattgaaaattcggttagggtctagtcggttttagtttttcaatttttatgaactaacaaatcgatcctatattttttaaaatggtaaaaaatagtactttgagttcaattttcatcaaatttttttaaacataactatcttaaaattaatttttagcacgaatagatacaaaaaaatataaattagtttggtcataaacacctccaagtcatgttatttttaagtcatattttgataaaaattaaacttaagaatgtataaagttattaactttacccactaaatgtttgtaggactcactacattctcacctaaaaaaattcaacaaatcaagtttttttagagtaaaaagatttacttggaaggatctcacatcacaaacacttatccccataataaataccataagggagtgtttgttttgatattgaattttctaagaatttgtaagtggagttaagatgaagaataacgtaaaactttaatgtacaaaagagttcatattacccattaaaactcggtgagacccactatatttccacctaaaaaattacactaaacataaggtaaaactcatattctcatctatctaacactttccttcatgacataaatcccacaaattattaatacattatcaatctttcataatttttttcatgttatgaggggaaaggagaagaacacaacttacttgttgaggcttttattttagtttaggtgaggtaccaaattttattgactaggactaatcgtttggtaaacttgtttttcaaatgaaattccccaagtttgttcacatatttttaaaatggcttcgtatttagctttaacttattcttccatacataataccaaattagcatttttaaaaatataaagtatggtatatttaaataaaacacatgggtacatttggtatgaggtaatattatataggaatagtaatattttatgggattaattttaaatatttttaaaaatgtggattctaaattttaccttgaatcttaatgccatggataaatatattaatatttttacataacttttacaacaaattatcaatttcctacgttcaattaaataatataatttgattaacaataatctaactggatatacgcataaccaaacataattataaatttctaaacaatcatattctcgaattatttattccaattaattaaattattaatatatgatgactactctgttagtttctatatcactcataaaatatgcaacaacaagattcaattccatagataaacatattaca

SEQ ID NO: 120229 - DNA, 1151 bp, Cannabis sativa
ggtattgtaatagaatcaaattacccattacgatatttagtttgctcttataaaggtgatattacacaagaaaatcctccttacattaaaaaatgtatgtgatgagaattatattatgtgataaataataaagtaaaagtaaaatgactctaacaccttctctttatataaatataaaaattaaagttgagacaatattgtcaatttaatacttatttcaatatttattccaataataagaaactaaaatcgtaatcaattttccttattattctttttcattctattactaagtggtgtttggttagagataatgaaataaaatggaatgtaaaggagataattttcattccattcctttatttagttgcattttaaagtattgaaatgtcattctaatggaatgactttttcatcatttttgtggaatgactattctattttataaataaatgaaagaccatggatatgagaaaaaaattaataattttttatcaattttttatacatttcaaatttaattatatttcatttcttccaattagaccccaccatgtctgaatgagtttttacaaaaattgaattttttatataatttattttatgagtatgagtagtaattattctacttaaccttctccttttcactctgataataaaaataataaattttgtagcctcaatttttttaattattttgatattaataaatgatatttttaattaattaatttattaaagatatatattattttatggttaattttaaatattaattctaaaaatattaaaccattagattttatacaattgacaaataatatatataaagatcgtagaaattaatataatgttaaaaaaatgtttctattagatgtgtccatacatatatatatataagtgtgtgtgtttgaaattgagaaaagaaaattaaatgtgcaaactttgttgaggaaagagtacatgtcatatactgcaaaatatgatttcattaaaatttgtttatatatatatgaaataattttatgatagatcgacagggccgaccctgagctaagataaaggaggcggtcaccttaggctccccaccgctcagggccccatttcgaaaaaaaaattaaaatatagttagtaataaaataaataataat

SEQ ID NO: 120230 - DNA, 609 bp, Cannabis sativa
tacaaagagaaaacaacaaatttaaaaaggacttgttgggaagacaaaaaatgaaagtaaaaaattggtagggaaatcagatgagaaagggactttgaggttgtgttgtgtggctttattctcacataagtttaaacaacccaggttccatgtagtttcatcccttttgtctcttagctcatcaagtttttctgtgtttgtttgttttcctttccttttaattatttttaacgttcttagtactgtctaatcagactatgacaggtaagtcaaccttacgacccacttgaactacttttcctttctattttacttttgttaattaaagtgtatttctttctcaccacgtacaatattcacatgggtcgaagttaatgctttggacataccgacacctacatattgtaccagaatccagaaacaacctttgttcttactgtataatagagaatgttagaaggccctagtgtagcaccctcttaaacattactattagttcaattaaatatctaatattactatggttacaattaagtatcaagtccaatatagtttaatataataatttttagagactttttcatttttacacttaaaaacagttttttt

SEQ ID NO: 120231 - DNA, 3210 bp, Cannabis sativa
  modified_base (33)..(73): a, c, t, g, unknown or other
catgcaacataaaaatgttatttctgatctttnnnnnnnnnnnnnnnnnnnnnnnnnnnnnnnnnnnnnnnnnagggcacaaaacccaacactttgttcaccacattccctaagaaacttacttggggcagccagaactcacactttttgaatctagcataaagcttatgttctcggagacgtcacaacaccatccaaagatgactctcatgtgtctcatccggttcattaaatctgtgaataccgccagaacattagttaatccgaaggacatcatcaaaatttcatagtatccatacaaggtacgaaaagctatcttggggatatcctcctctcgaatcctcaactagtgataaccagatcaaagatcgatcttagagtagacagtcttttccataattgatcaaacaaatcatttatctttgacaagaatacttattcctttccgttaatttatttaactcccagtagtcaatacacatccatcccataacaaatctcttgccttgagcactgagattaatagaattcaaaatccttgaaccttgcccatgaactcgaattggtcttcaccctctggttcaaaagtttccatctttcttgtcaatcgatgattacattatactttgcaagctattcattcccaatataacatcaaatcctctaaattcagttcaatcaaatcaaccgacaattcctttccctccacaaccactagaagggacctaatccacctgctggaggtaaccaattctccaataggcagtaaggtacaagttcctcttagtaaaacatctttatacaaatttataatcgctatactcaacacatatgaatgcattgcaccagaatcaatttaaaacagtcaacaaggtaccattaataaaaaagctaacttgtcacggtagaaggagcaacatcgacctctgcctgggtcaaaacaaacacccaagcaggaactaaagtgttctattatggtcgttgtaactatgggtaatttcttttcaaatagcccactaccccacactggaagcaggctctagcttaacacttgccctgattgcatctcttgcacctcgggtactctagataggtttgcaaattttcgtttccacctcatcagaatcctaatgaccttggaatcccttatttggtcccttagttgacggatcattaggccgctcttacgatcgttagggttagcgcccttaccaaaactaacattagatgtttgcttccatgaatctcttctcatactatgtctcttttgaatttgatcttctacgccctcagcagcaagggctagctcaactgcatgagcataagttcagacaacacctggttatttgcagctataattacatctcgagcgatgtgttcttccgatccttgaataaatttggcctctataacagcctcagtggccatttcatctaaagcaatctttgctaaccaatcaagtttggtggcatattctgtcattgcctcattaccctaggttagccgcataaatctttttgctttagcagcttgaataaattcgttgtagtattttttcatagaacaaaatttgaaaagcatccgaagtcatgttattcagatcatgaccctatggtacaatatcccaccagatgtaggcatctctacgcaacatgtaaacgacacatctaacccaatcattactcttaacccgtatgaaaataaaaatcgatattatcaaattcatccattgctctaccttgagtggatctgcaccaccctcgaacactggcagattctgcttcctgaactgcttgtgcaacaactctagccaattctagcatcctatggaactaccaaaagtgtcagaggatcagaattaaaatttggagcaggctgagctcgctgctccctcaattcttgaatttgatcaccttgctgtcggatgacctcctgcatcgcggcacacatctcctcccagtttggtggtggaggattcacaccttcaccgccaaccccaagcccaaaaagctcgcagttacccctactaggccgcctcaggtgcataatctaatacacctgcgaccctaactttccaccgtacagtacatcttaaatcaaaagcaatgctaataagtatttccatgtatacacatacacatccgcccttactatgcttttctaataactagcataattcaaataagcacataattaacaaataatctaataattagcacttactgaaccatgagtcgaatgagtcttcacagtcgatgtacatatcgatccaatctttaggatctttaaaccttggtcgctctgataccatgttgtaacaccctaactctcaggggcgccacatgtgtgtgcttttacaaacttatccctgactaatctattatcttaggaaagtggggtttaattaaaaaccttttgattaaattagagtaaaactttcatacaaaataccactataatacggggatcccctgtttataaaattcttttacaacacattacaaaaccgctattacaaaagtaagattatacttccaaacaaaagaaaagggttgattttgcttcccggaagccaaaacaccacgattgatatgtacattgctgggagacctttgactcatggtcaaacacagatcctaacctctttacccgcaccacgaagcacccgtgagtcacaaagactcaacatgaaaagctactaaatcaaaagtgatataaagcacaagtagtcacaatgcgacataataatcgtactcataattcattacatgttcaacatgcatataaaatgtaacatctatacaaacacatatgttacacattataagaaaatgataacaacccttactcaccaacttcattatcataataaatatatattcactcattaggtaatcacacaaccaattaattgtcttataagacaatcctattctaatgcttcataaagcattcttaccactcgttatccacaagctacgtatgtcactatcgttgcccgataaattaaccaataagtaagaaatctatatacggtttcaaaggagtaattactcattttattaatggtaatgactgtatctttattcattcattaacggtaatgactgtatcttttcctcaatcataatcgagtcacaaatgataattatcgttatgcatcattacctcgatcataattgagtcacaaacgataataatcgttcctca

SEQ ID NO: 120232 - DNA, 1278 bp, Cannabis sativa
  modified_base (1240)..(1252): a, c, t, g, unknown or other
gcatcatggtgtgttggtggaaaagtagcattagtaacacatggagcaggccgagagaatggtaaggctgagacattttcagcatctgtcaataggcttggttgtggagtggctgcagtgttgatgcgagggatggctgaagtaagagtggtacgggcaagacgggttaagagcggccatacattccctttagaaaagtcagttctatacttatcataacccgttgtaggaagccgtgcccctttcatccatggtccataaggaagatcgtcatcatttccattgtccaaacgttccatgaacttgacacatttctcaaaggggtgtccgatcaaaccacactcaaaacaaaactccggtagacgctcataacgaaaatcaatccaaaactcatctcgtactttaggcaggctaatcatttgtccacgaggaaaaggcttgttgatcaatattttcacacggattcgaagaaaaggaccccagccctcatcaagggagtcctcatagacatccagaaattcaccaattagatttcctaaggccttagcaagagcttttgatttacttagaaatggcagtcggtaaatttggacccaaaatggtgtggaagtcaagttattcattgagacattctgcagagcacttggagtgtacatcacaatgagatgattttgaaagtgccaaggttccttattcataacccgaaatttatcacctgcacaatggaaagaaaccttgaacatatcatccccaaaatcagaaatcacaaccggaaaacggcccttccagtgtcccgacatctggttaatgaaggtcggcttgtggacgtatgaatcagtgagaactcgagcaataaacatatggccggaatgcacatctgcaggggcagttacttcatctgataaagcaaagacagttccttccacatcagtcaaggagagtgttgtattaagggcattctcgataggttccatgataaaagcaaaaggaaaagggctgaggaggaatgaagacagtagtgagatcagaagaagaaaggcatgggcagatgaaggagaaggcaaaccagaaaaaaactgaaaacagagggaaaaaaaagatttcgaaaagaaggagaagttagttaaaaagaaaaaaggtggttaaaatgcacaactgcaacagaccaaaaaaggcacttgagtttgattgaacatactcattttttctatatatctcattttttccttattagaaattnnnnnnnnnnnnnttaaatatttaaataacatagatatt

SEQ ID NO: 120233 - DNA, 1333 bp, Cannabis sativa
  modified_base (32)..(35): a, c, t, g, unknown or other
  modified_base (1293)..(1294): a, c, t, g, unknown or other
aataatctggattacattgaaatagagttttnnnnagggcataaaacccaacatcttagcagtccatgcccgccattattgattatgcaatcttgacaatctttgtccgtcgagttaggtatatttcaatcacaatttagtactttgaaacacctaactcggcgagctcgatcctccaaaattagtcaatctcgacagtctttaagcaacccatcgagatatgctaatattgtaaaaatatatatatttattttaattcctcttgtaattaaattgattatatacaccaatttacaatacaaatataatatacaataattttagtacctatcatatcaacaaataacaatcacagaataaacataattgaaatcagaaatttttttctttatttttataatattttctaatttcataagtacattttatctcaacaaataacaaatacaacaaataatacacaataaatttcttccttatatctccacaacgcacaaatttcgcacaacttacttcactaaaacaaataagttttaacctttcgttatcaccacaacacacatttaaatctctaaaattagtattatatcattgaacaaagaaataagtgattctacatatctctaataatgaatcatcaagaaaatttcatttcactttgtaaagttgttccttgctaattaaatcaacaacctacaatatcaaatatattaacattttattgaggcaatatacagtctaaactttttaaactaagtttccattctaacaactaatgtgcatatccaaactcaaacttctcaattctaataaattatacacaaaaataaattttaatcaacaaattacatttactacaactagctagaaaataaattattaaaaagttagtcatagtttcaccctacaccacacaaaaaatattaaaaaaagtttctaaatcatatcatatttacgtagcaaataaactacgaaaataaaaactttttaaataaaaattacactaaaataactactacgtacacaattgtagaagaaaaaatttaatcactacaatatacactatataacacttaaaaaaatcatatacatatttgtaaaaaatacaattatttgagaaaagataaacttttcaacctaagattctacccaaataactattttaaagtatatatttatatcaatcttcttctttttcctaaatacctagttttatatcaatctttaacaactaaatgagcactttttccattagtcttgtcttttgacatggttctttagtcttgtcttttnncatggttttttagtcttttctttttagttttttctggtt

SEQ ID NO: 120234 - DNA, 3878 bp, Cannabis sativa
gttgcccagatatattatgaagcgtatgatttctcttctgattagagtttggctgttgcccatatcaaaagttagatccttcctagtattttattttgtgaaaactccaattgtttgatcgaaatgttacctaacccatcttcaagcctttttcactttttctctgttaaggaaataagctcatgattaatacaaaatgttgattgttgtaagtatttcgctgcgtgatcttccaagtgtgtgataaatgcattttacaggatgttctatggtcccggagggccgtacgcaatgtttacagggaaggaagctagtagagctttggctttgctttctttcaagcctcaagacatgaacgacaatcttgaagatttgggtcctgatgagcttcaagttttagaggattgggaggataagttcatcgacaagtatcccaaggttgggaagcttgtcaaacagtcaacctcgaccgaggaaccatctcaaagtggagaggaattgaagaaggaaaattaaattgtaggttaagtaacatgatgaaacttttgtgagctgctgcaaattattcaatgtaatatatataggatgattgatcaatccagtttaatgagaatgatttgatcttttgtgtaattgtaattaacatttttatgaggataattgtgcattattataaaagaaacttgtgagcaagttattcatagcaccaatgcaatgccctcttagagtcaacattgatcagttacatgttaacattagccctttgacttttaaaagcatttaatcaacgactcaatcaatccactactaagaccaaagaaaatggcaaaaagtttaaaaattcctcgagtttattactttctaactcccagtttttgacaaacaatgagcagataacttagcatttttatttacataaaaaactatcttactggtcctgcaatttaataaaaccagtaagtacattacttaatatagtttgtttaaggtctttcttcttttcactgtgaaagaccataggaagagaagagatgaaggtgacatgtccatgagtgacctcttcccaagtttattatctgatagtcctcacttaataaaatatggctgaggaaaaccgtggttacaatacaattgtgacattgggtatgtgactaatcttgttccagtactcattcccacgagagtactttttctccaccaatggacatccttgtgtgtataaagtggtgagggaggttggaaacccttcttctgacaatgtctccaactcagggcaaaacaagacatgaagtgtttgcaaggaggtgagttgtgtaagcccatttttgtccagccctctaagtcttctaaaacaccagatttcaagagaggtaatagtggtagatagtagcccttccttcgggaatgattccacatcttccatatcatctccataaatataaagagtggtaagatggggtaatgtttgccagttccatttcatcctcaaaagttcaccataggacatatcaagactagacaaactaacaggcagaccaccatcagggaaactctttatcaacggacaatatttgattgtcaaggactctaaagatgagagggaagtcatcttctctggtaaccttttcaatttagggcaattaaaaatctccaacacactcagcttgggagcaataagttcaccatttgggaaggatacaaaactatcacaattacgaatagataaaaatgttagttcctcaagagattttccatctgacactgtaatagcttcaatgtagtcgctggagtaaatctcaagagttttgagattgggaaataaatccatatcgagggatctaatcgatgatccacaatcccacaatctaagagactgaagaggagtgagagtggaacaaggattccttggctttattgcctcatacaatgactccaaattctccaaattcttaataatcatttttgtaacacatggtattattgggagacttaataatggatactgcttgatacctgcaatttcaatacttatcaatgaaggaagcaagccaggcaaatctccgacgagcttaggacaggaaacaatctcaagtgttttgagcttcccatatgttgttgcctccccagtctgccattgttcccatgatgacatatcgctgaaccttaatgtttccaatgatgaaaatggctttctcgcagaacaattcccgtaaaactcagcacccactgtcactaccgaattgcattctgagatggaaagatgttttagcaaaggaagttttccaaagggtggcaaataggagcagtgcttacatccattaagagttacttcagcaatgttgctaaacgaatcattcccaacccaatttggaaatattttgcctggatagtaattaatctcgagctccttcaacgttctgttgggtgaaagcatttcaagcacaccctctccatgttttggatcaacattgacatcattaacactccattccaaagtcaatttatcaagttgcttcttctccagtacattgacttgatttgctgcttttgtaatattgaccacattttctaacttcttaatggaaagctctccgtgtagacttttaagttctaccaattcttctattttagcgccatcctccttccccacaacaaaagttgtcaaaatttggagattcgtcaatttacttatttgacttggcatctccactagcctttttccactaataataagatgtctcaaattaatgagatgatgcatatctttaggcaaagtttgaagatgattacaatcttctaatttcaatgtctgcaaattgtacaatttagttacaaattcaggcaaaatcacaatcttagtcttggaaaaatctaaatagcgaagatgtttcaattcaccaattgaattagggaactcagtcatatgaaaaccacgaaaagatagaactctcaaacatttcaacatcgatagcatattctgcaatactgcttccatagaaaacttgatttcaaatgaacttgaatctaaaaataataaaaaggttcgcaaatgtgtagctccaaaaccatagctagctatcttatcatcagtataaagttctctgtcacatccaaggtgacgtgtcttcttctcaagcttatcaatgctgtcattttgctccaataaacaactgtattttccagtaatagttctagccaaatcaacaaaaagatcatgcatgacaaaataagactttcccctcttattcggttgcaaaaatgaaaaaaatactaaatcatcaaaatactcccgaccaacttcttcgattctcctattactcttggaatactgtacaagattttcggccatccacattaacaccaactcttctcttttaaataaatagccttttgggaatattgaacaataagcaaaacaccctttcaagtgtgaaggaagataatagtagcttacttctaatgcagcaggaagactcttgctccttttatcttggagctcccaaagattactattggctatttgtttccatttctcagcatcatccgttgatctcaagaggcctccaagaactttggcagctaaaggcaaaccattacatttctagcgatttctctgccgatacgttctaatgcaggatttccacacgatgcgtgctttgaaaataatttccaacactcatcttcaggtaattctctaagatggtgtgtgtgaatagttcgagttcgaatgatgtctgcaacttttccatttcttgttgttactattattttgctaccttttgccccaccgttgaaaggcttcatcacttctgtccactgcgcataatcatcttcccaaacatcgtctaagacaatcaaaaacttctttcccattaact

SEQ ID NO: 120235 - DNA, 1145 bp, Cannabis sativa
ggttgttgctcaataggtggagggggttttggtatagtgttaggattgtgatcatgttgagggtgatctgcatgaacactatctagagagaaagtatcaatgttaggattaggagtactagtttgtaaaggataaactaattcatagaaaactacatcccttgattggaagatgtggttgtttgtatatcaaggagtgtgtaagctttcatatgatcaggatatcctataaaaatgcaagctctagttcgaggagcgaatttgtgtggattgttaacatgggaagcatatgctaaacaccaaaaaaattttaggtgagcatactggagtaatttgttatgcattaattcataagaggttttatcttgtaaaagattagagggtgttctataaagtaaatagacattagttttgaccatgtaactctaataggataatagtaaattggattaaaatgttaaagctcgagccacatttagtatgtgttggtattttctctcgactacatcattttgttggagtcttcctacacatgagttgtagttaattacactattaattcttttgcatatctgttccgacagatttaatgttgcttttgtagtgaacatttacaaaagtaaagaaattttgaatgatggttggagcatttgattttgcccaaagtaagtataaccatgtgcacctagagtggtcatctacaatggttagaaaaatatttgtatcctttaatggaagataagtgatatggtccccaattgtctacatgaactagatcaaaaattgatttggagaaattataatgagacacaaaaggtaatttcttttgctttgaaagatggcaagtgggataattgtgaatactatgattatcggtaacaaaatttagttatttattgattttatttgtaataagtatagaaagatgaccatggcgtgtatgccatttgtgtttagtcgattgtacattacaaaaaactaaattagatgcttgaacatgtgaagagtcctgctaaatgtagtagaatttgccaaacctttcagctgtcccaatcttcaatgtctgagaagggtcctgaatgtagcaagtgttgttagataaattaacaattaacccaagatctatttgtatataacatagaacac

SEQ ID NO: 120236 - DNA, 2548 bp, Cannabis sativa
ttatgggaaaaatcagggacaacagttacagctagttattctgcaactaacgctctctttgatgccgagtgtgtatataaacttggattcactatgtattatcttagttgagcaatataaaaacaaatcacattgttctctctctctctctctctctctctctctctctcatatggtatcagaagacaccttgcccacagcttcaatggcaagaccttcaactcggtcccaagatggtgctcctccatcaatggctgagaatcaagcagctgagatcaatttcgatcctcatcctgcttccaatccaacctcctcagcaattcctcgacgaactcaaccagtcaagccccagaatcaagatcccgacctggttcatacccaagatcactccatcattgttgcagataacaccacaactccctttgttcctcgttttcatagcagatcattccagtcctttcttcctcagtactggtgatcatcctgggattggtgtctaccgtcctcaatggaacaaattatcaatgctggaaacgtggcatgccaagaacaagatttccttcatcaatggctctcttcctcgccctgaaactggtaatctctatcttaattcttggcttcgttgcaacaataaggtgatgtcttggttagtgaattctgtttcacacgagattgcacaaagcatcatgtattttgatttggccactgacatgtggaatgatcttgttaagcgtttcaatgaaggcaatgaccctcgtatatttcaacttcagacacaactcacccgtttacaatagagtgatctctctgtctcttcttactttaaaaaactgaaatccctttggaatgaaggaatttcaaccagtcaccacatgcacttgtagtgccgtgaaaatattcttagattactataaccagaatcaagtacttcagttcttcactagtttaaatgaatcctttgcttcggttcgagctcaaatcttgctcaatgaacccattcccaatctgtcccgtgtgtttgccatgatcattcaagaagaactctaaagatctcatagttctgttgatgcaacttggttgctgcctccaattctactaatcctctaagaaccaagaaaccgcgcacttcttgctccaattgtggcaaaccaaaccacttggtcgacaaatgctacttcatccatggatttcccctggttatggagacaagaagaaacaagaaaagggtaaagccaaggccaatcttgcctctagcagcaacctcaaacctgatgcagatggcatatcaaccagttttgatctttccacacaatgccagcaccttatctctcgtctaagtcaacaactcagcaacaacaatcatgctgaccttgctgtcatgcatcctgttgcatcaaaccttgcaggtaaaatgttgtagcacacactaaactcatcactacctcataaggacgttgagacttataagtatgccttgtcggctgctactaacataggttggtatccggattacctaaattgtattcaaaactttttatcggttgagactagtgatcaatgaatatttgtccctttcccttttcttttgagctttctgatctaaaaggaagtgcttttatggaacttttcttctcaaaataataataataatttgaggcaaaaatcataattagcgtaaatgtgagaaaattacaattgatgtgcagaatcaaattaactataaatttaatcaacaaacaattaacaatgacaagattaacaaatcacaaacaataatcagagataaaacaatgttgaacagagtaatcaaaaccaaaaaacgattaaagcaataaaataataaaataataaaattaacactaacatatatatttgttcaagtcctatagatcaatgtgatctatggctatactctagttcttgaacaccaccaaaatcatctttattgattgagcaagaacatagtataatacagtcaatattaattctctatttggattctctcaaagtgtttatctctcacactattacccaaaaatattcttcatctacagaaaattcttcatacaaatcctaaaccaatctctctctcttttctctgcacatctctcgctctacctctcaatctctttccctgatcacaatcttcaacctcgaagtcttctctaaaaactcctctatcaaaatgataaccctcggtggtatttatagattagagatatatatcccaaagtcggtggctgcaaatattaagttagatgttaagttagttataacttaacgaacttaacaaactcttcgtaacaaaatctccatgtcaactcaagttaaagcgcttctagatgagtcatacatttcctagaagatatttcgaaacatatgctgaagggacttcccggataggaaaagcgacagcaggactcgattattcggtaggggtgtacatcggtcggtttagtcaggttatagtgtatttttactaacctaatataaatgtcgggttgtaaatatctaattataacccgtccaaagaaaaaataaaaaaaaa

SEQ ID NO: 120237 - DNA, 1269 bp, Cannabis sativa
tctctctctctctctctcttcgccaccactgtcactcatctctttctctctcgtccagagatagtcatgcgaccacgagccaccacaagcaccaccgtgactctgtccctctcctccacgagcaccatgagttcatatttgttcatttctttttatttctatatttttgtttattaattttcttattttggtatattttgtttagttttgttctagagatttgagattatttttgcattttatctttgttttgtggatcatcaggatctaagatgatttagttatgattgcttttatggttaatttgaatctatctaataaataaatgcaatggcagtagtggtattataatggttggtgtgcttgcggtggtagtgggtggtggtgtttacatggtggtgattgacggtggtggtggtggtatgcagtggtagtgttggtggtggtgactgcttaaaacagttgcatatactataagtgatggttttaaacaggttcctatagtataggcgactgttttaaacagtcggttatactgctcagtatccccgatggttttgcacgtctaggaaaaagttttcctgaaagttttctacttttgcctattctacccagttttcttgatagtcgaataggcgtcattcttaccgatgggaataatttactcgactgcttaaaaaagtcaagaaaacatagttttgtagtagtgtcacttactttcttttctttctgtttacatgtattacaagcacacaaatgactctctactctttctctttagctgatgaagtctgtctcaggtatcttgtgggtttaaaatttaggaatttataggcttctgtaaacctgagctcaatctaggctggcagttggttgcaactgcttttttgttcttgtaatcttgagtgacatggccagaaaaactcacaagcgagggagttttaatttattgtaattgagaattagttaaggtctttagttgatgacttatatgggaatttacttaataatgtacacataaattttcatatgagttgttctacgtggtgatagctttagttttctaagggtcttagcttaaaattctcccttcttaacttttaaatcaaaagttcttaatcctaacatggttaggtacgatcttcagagtgttatttatattcttaaaattgttcattaaagcctaccaattggttcgagtaacacatacatcttaggaatattatagtacaattgagtgggagcactaaccatagatatggaatctat

SEQ ID NO: 120238 - DNA, 1956 bp, Cannabis sativa
ctaagcggtctttacagaaataatgaagatttaagcaaactcggggagaaaataacaaactcgagaacctgaaaacagggcccagcgcccaagttgacttggtgctgggcccagcgcccagggtgataatcaacttgggacgcttccttcaattgctcaaattctaaatctgatgcgaccattgaatctgaaatggtaaaaaattgggtaggagacctcatcctcaagttcaaaagtcttggaagtatcgaaaacgaaaatctcgggagctcgtgagtaagtacccaacacccaagttaacaaaaggcttgatgcgttgggtttcgcttatccgattctgatgccatttcgaccgtccacctagttttttataataacaaagatctatgaaatcagagaagtcaaatgcacaactttgcatttctcatttttcagctcacacagaaatgaagagttttgagtctctcatttccgcaaaacagcaacatttcaagaactggtaatcatcgccagaacacagaaactgactaagtgatgtcaaaaagatcacttaggcaccttaaaatatatttcttggacgtttttacacttacccaatgtccagattgatgtcatatgtcaacctgggtgctgggatgtcaacctgggcgctggatgtcaacctgagcgctggatgtcaacctgagcgctgggtcaggaactgccttcaataaaacaaccataactcactcaatttttatttgattgacacgattcaacttgcgttttgaagctaattcaatgctctaccatgtcattttctcaccccaatcgcaattctaaagctatcattgtcaaaattcactccaagggagttacaaaaataagctttgagctacccgcagcaggacccgctgggctccgaaaaatgaccatcaccaccaagagctaatcttcaccgttagatcatcatcaacggtaaaaaaaaaaatatttgtatttttttcctatttttgtgggtctccttcacctataaaaggagagctccataagctcatttttcaagttcaaaaaactacccacaaggtcagagcttctgacacttagtctttttctgtaatgaccagctcgtgataattaaaaactcgaagtagacgtagctccattactgtcgcgatacagggagtgaactactataaatttgttgtatctctcttataattattacttaattacttaatcattcccgtcaatctagtgagcgagtgtagcttagaagtttagtctagatttctgagtcaacattatatgtttactcagtctaactgagggactttagttgctgtccaaaatagttgcagacatggtcatttggatgttgctgttgttgaggctatggggttaaaagggctctaagttagatcaaaaacatgtccgggcagcaagtagtggtcgaaacaaatagttaattaaccattcaagcaattagaggttctttatcaataaattttgcatttggcctttttgttcaagattgtaaaaggctcatttcttctatgagtcatggttcattgtgttttgtaaaatgttttacaaatcaagttgctcactttgtagttaagcaatcttgatttaatgctgattatgcaatcaaccattttaatatttcttacttttatgcaggttctattgtatacatattctatttaattaaatgaagttctcttttagttttagaaaaagaaaaatttaatgtgtttggtgaatctgttaagagtgctgtagtaataaaatttatggtacgaaaaataatatatttatttatttttcatcttgaaaaaatgtacatcggaacctagccgaggtcgtgtgtaaaacaattaacgttgcagcccttagagcaagtgcaaggaggcactaaactttagatttggtgtgtgtaatccctccaacgtagcagcaaatggtacatcatat

SEQ ID NO: 120239 - DNA, 1117 bp, Cannabis sativa
ctctctctctctctctctcatccggagacagccgcccaaccacgagcctccatgagcaccaccgtgaccctgtccctctccttcgcgacgaactgagctccgtctgaaccaaactctcatatctcagactcacgaattcagatctattcatcatttcttttatatttctatattttttttgttcattgattttcttatttagtattttgtttggttttattatggatgtgagattatttttgcttttttatttttgttttatggatctgcatctggagttggatctgagatgatttggttttgattggttttgtggttgattgaaatctaataaatgcaaaggcggtagtggtgcggttgcgatggtgtgggtagcggtgttttcatggtgggggttggcaacagcgacggtggtgttgcagtggtagttttggtggtggtgacagtttaaaactgtcacttattataatataggcaacgattttaaatagtcacctatagtataggcaactattttaaataatcaactatcttgctcagtatccccgatgattatgcacagttggaaaaaagtttgcctgaaagttttctaccattgtctattcaacccaatttttctgacagtctaataggcgtcggtcttagaaaacccaattttttttttaatatttttacgaattatgttttttacaagtttttcacttgttttatttattttattttatttttgaaaaaaaaatattttcacgttgtttttttgtagtagcaatatgaaaataatgaaaaaacaactcttcatatttttgtaaaaaaatattaatatctgtaaaaatgtgaagaaaaaaaatcataaatctataaagaaattaaactttttgtcatttttgggtatctataaaataagagaaatgctagaggacactattagtgtctagtacctttctatgtgtcgctattagtgtaattgcaattaaatattgggtctcatatatgagtatcgctaaccaatcgcaaaatgatacttgtaaaagatactaggcaccattaatacccaataacaatacttataaatatggaataattacataaggtactattttttgtaaaatatttatat

SEQ ID NO: 120240 - DNA, 1145 bp, Cannabis sativa
aaaaaaatggtaatataaaaaatgtgcaaaatataaatttttggtgtaaaaatttctttagtaaaattgtacatcattagagatcttcttaccaaattatagctaatatacttatttaagtaaaactgaatgaatgaaccagctcttaaatgcacttaaaacttaactctttaaattgagctgaatttagttatttgagctagctcactttataacattacgattgatcattacataaataaataaatcaatcaattattgccgattgccgatcatgtcgttactgtttaaatgtgttatagaaagaagttatataaaaaagttcttcacttaattattataaataatatgttttgctaattaataaaaatatataaatcgaaacacataacatacattatttataattataatttatatatgttaatctcaagtgtaattaatcttaaagtaaaaattttatttatatatcttgacttattatatattaatatttttcataagaaaataaataatattataagaaattagaagtcgataacataattatttaaaaggtataattgatctcattactatgatatagtattcattaaagaaagaaatatatatcatagtaaaaagccaaacaaggaattgaataattatttaattagctgcaaattaatggctgtcataatcagaggaaagactttgtggtaagagataggagacagcatgaatcttcaaaacaacactcatctcatctcacctcatcacaattaaataaaaacatatatacacatatatacgtacgtacgtgtacaagaatcaattgcttttttttctttcaatctttataaaataaatatatattatttatatatcactctcaagtcaagtcccaaatggatcatcatcatggctttccatatgacaaaatgtataatagctccacacacagaccgtcgtggacctctcccataccacactgccgctcataataatcatatcactcgctcaccataaaatcctttgttaagtaaaaaatgagacttaatgaaaaaaaatgagattaatgagattttacaattttgtatacattatattaattaattacaaaatatgtaaaaaaaatatattcccactgtctctgttgtcttgtc

SEQ ID NO: 120241 - DNA, 1278 bp, Cannabis sativa
gtgtggcagtaaataaaattgaaaagttgaaaagtattacccaagtattaccccattaccccaaatttaccccaaatccagtatttttgtaaaatgcccaattttaatgtctttgcttataaatttcactttctcaactgtgccaaatacaaaaatatatcaataaacacttctataaagagtattacttctttataatttctaaacaaatttaaaaaataaatattaatttttaaaatattaaaatattagatcttaatccgataacaaataataaaaaaaaattaatttctatatttaatttaattatttaattaaaaaaatatacataaaaagtacttcttttacattatatcaaaaatatttaaatcaaatttatcttttttttttgtcatataacttatttcttattatttattttttcaaccgatggtacaaacttagcccatataacgtaaaaataaaatatttttctaatgaaataaaaaaaattaagcataaaaactcaaattcttaatattacccattcatcggtaatatgaatacatattataatgctctgatgtagtgtttagaattattagaacatttgtatggttctttagtacatcatattatgttatattgtgtagggttgtgttatattgtatctattatttaatagtatataatatttggtattaacttgtagtgatcagttgtgcaaaattatacaatattaaccataaaccctacctcaaccccacccttccctgaccaagccaaaaccctaaacacaaacccctgccttgtaccctaaacccatacatggatctcgatttcggcctcggaccttgaccagtgatggaccacaaacccaaactcaaacgtggacctagacccgaacctactcccagccccgatcccgacctcgagctcgaccccgatctcgtacccaactcataccttggtcccaatcctagcattggacctcgacctaagaactggaaccctaccctgtaccatgatcccaactcctgacccataccttgatcccgcacccatgcaaggaccttaacaatgggcctaaccatagattccatattaaaaaacaaacactgacctcaactctggaccccgtacccgtacccgaccgtggcttcggaccccagacctcagcccatcctcaaccttaaacatgcactctaacccgagacccaaatttgaatgaggacccttaacccttgaccccgtgccccaatccaaatgctagcccaggctctggaccataatccttgc

SEQ ID NO: 120242 - DNA, 1428 bp, Cannabis sativa
  modified_base (27)..(27): a, c, t, g, unknown or other
actaatcagattgtaaagagttttatntagggcataaaacccaacaatgaggccgtttttaattatgtgctggggatagagcacaaacacttgctgtgttgagagaaccaagattatatctactttgtgttgaaccttcccaaagagcaccactgggtggcagttgaggttgatattgataactgggagattatggtatatgattgtgatatcggtgccactactgagcagaacatggagtcatattttaagccttacggcaagctatttgcatccataattcgagcgagtgattattttgaactgaacagttatgtacttccagttgattgcggtgatctcaactagctcctaccactgcattatagaagagctacctctaaagttataccacagacgaatacaaggtaaattctcttttttaatttatgtaatttatttaattttacactccattatgaattacttaacttaattgttgctaatatttactaattttttactttgtagtggcgattgtggaacgtttgccatggattacattgagcacagcatgttggaccattcgtttgagcatgttacagatgataacatgctcaccagaacttgacatggtagttttttgtaacgttattcatatatacacataatcttttacaattatattatattatactgtgaaatattcaatcgctcaaatgtcgcacctatattgcatagacatcgcaaataatttaacagttgtaataataacttgtagaaaaagacaattaactcgctaaaaatttcgcacctatattgcatagacatcgtgaaaattagacagcatagattattagacatgttaccagtaaaaattgccaaatgtcgcacagaaatcgtataggcatcgcaaagaaaatataaaaaaatggtgcaaaaaaattgcacaaaagtcgcatacatattgcataaaaattgcacaaaacaacagttatgaaatatggaataaaatggcacatacatcgcataaatgtcgcacaaagtcgcagacaccttaaacatatccatgcatattgttaaatattcaagctacagtcatattaaacaacaactagcaatacaacacatatgcatctaaatattaaagaaacaattcaaactcgagctttacatgtagctctgttgtgccctgcactgtgacatagcgaacaatgatgaggttccactaccacctgaccactagatggtcgacgcttcatcggtcttctacctgcattgctcttcctaggtcgacctactggtttttctccactgatagcccaattcttatgttcttgatgtgtttcgattgtacccactcatcctccttgccaacaatattaattgtggcatcgtagatcttcttccacgtttcttttgtgtaatatggagagcaaagtgcgtaca

SEQ ID NO: 120243 - DNA, 1457 bp, Cannabis sativa
tattagtattatgtaatattataatttagagaaagaaaatagagaagagatgagaattttctgagtgttttattacaataggtgatcttctatttatacacatataagagtcaaatattaagaaactaagagaaagggaaactaagaaaaaagaaatacattaatggtaataaataaaaaatttggacatccacataattaataatatttataacacattcataaatttatatcatttataaatatgtaatattaagcctagatatttttagattttgataagtaactacatcttttctcttataagtcttaaatttatttttttcagctgaactaattaatcaaattgagcaatttttttattttagaaaacctttcattcaattagtgtaagaaaataaagaagtgattaccaaatagatgagtagatacaataaatattaaataaattaaatatattttttaatattccatatttttttttttatcgattgaatctatattcaaaacactttgaatccaaacatacagaaaaaaataataatagatgttatagaaaacacataaataagaaatggtaaaaaaaagggctatttttaaaaatacaaatacaggaaaagttctaatcaagtttacggtcttttatcttttaatgcaagaatgataagcaattttttttttttttaatttgatccagatttcttgcaactgtagtccaacaacctccatctttactggcaattaaaatccagcgacctccatctgcaatgcgatctttcattcgtaaatggtcaattccttccgtacaatctaaatcactattctcatctctgtaattcctaggtggttgtattctttgtttttgttttgattatttgaaaatttaactctagtgaacctttgcttctggtgctatttccattactggaacactcataagcccagcaacattgtagcaataagggtatagtttattaaagttgtagtatcaaaattggcaaggtaatacaatgttatttatatacattgtctattatagaattggaaattcaaataatgtaacgtaaaactgtaaaaaaaatattaaacttccgtataattggtaatttccaacaaaaaaaaaaaagaaaaataaaaattgctacgtacttgcacattaaaaaaaaaactgttaagtctttacaaaaataaaaataataaaaatattaatttaacaaaaactgttacatgtataacatacatgtggcttcaatatcaaaaaaaaaataattgagaaaattctaatacaacactcttctcataaacaaataaattaaagccattagattaaaaattaagagttataaattataaaaatgcgcttatttataagagcaaaagtgttgctctcacataaggaataccgtatatatctattctatataaagtgtgcatatataactgaattcttggtttat

SEQ ID NO: 120244 - DNA, 2388 bp, Cannabis sativa
ccgacgtgaatagtacccaaataactgacccgtctttttaaaaaggacactaataatatgttatttgcgtcttttaaaaaatgacggtaaaaaattaactgacgagaataaagcaacaaattttaaaattgcttttcattttacgtctgttattaacactcgactattgtgttagcgaggttttaaaaacgacacaaaatgaaatagaagagacagcaaccgacgtaataaaatgtaaaatccttaaaacctaatcagatgcctactgttcacaacctaactctcttcaaatttgctctggcgaaacaggcggctcctctgtcctctttgatactgcgcccagtcgaagagaaccaaagggctcgagtggattcaactacaccccatctcatccacttcaaaaactgtaatacctaaaagttggtttcctctcactcgtgattctccctccctcacatttttctctcgctatttttgtcgatataccctaaacgcatactccgtctctcgaaccaactcgcattttgtgtcccttgcttcttggtctgccgccgccgccggagtagccttcacagaggaccatgtcacaggtattaaggttccttcctcttagttacttctataatttgtttgggttcatttatgagattttttttccttttcgaaaccttagaagtaggaatttcatttgcttcattggtgaaggcactcttagtggagtgcacaagttagaattttggatgatttgattatgtctgacaatagctctttctttatggatggctctattacattcatgagttttgaaagggtacttcaatctcagagtaatatcgattagatattctctcaagtttgtgttgtttgtatgtttacataagatgagctcattgtataatcaagaaaatactagttagagaaattaaatttaggtctatttaatgattcaggttatattacgcttgtttattcgtacttttcctatgtagtttggcttgtgttgataatagcattaatttattttctaacttgcaggcaataataagaacattgagattaaacatcctggaaatattagttttggaactacagaggtagtatatagtggtgagctatttgaattcgaccatcaccttaaatttaaatctatttgctgatgttccattatgacttgagaaactattagggccttatttatgaattcagttaaaaagggtttgttgttgcagttaaatgttttaagttgtagagttcccaaaaccatagggcagaaaaagtattttagagatttatagaacattcccaaaccctgaagctctccctctctccttctctgccatctccaacccatctctgacgcccatttcttgtcgtcgatggcacaggcggaccatagattcagtttagtactctatggaattcaatgtttactcattactctatttattctccgctattttgaaatttcgatttgataaagtattgaagaattttttaatagccttggtccctttttcttattgatattcatgttgattgaggatcattatttggtagatcatgagtgctggtccttcacaaaagatcattatttcattttttttttctttcttttgattttaggttggtcccccattatgtcgcttttcaatttcttgtaaaaccagagattttaattattgttgaaaaattactcaattagccatatatatcgaatataaattttgagttggttattatatacgtttcattctactgtgatatgctacctctgattttgtataagccatgcatgcatttctcttgatatgtgcttaatttttaatttagtcatttgttttggtgcgcattcaatgtttgaggtaaactgcttttgcataagatttatttatcattgcaagtattgttctcatccctttgatctgattgtagttcttgtatcgttgtgtgtttgatgtgaatgaacagttggagcttgctcagagcgtaaaagattcgtcgattgtcaagtgaaaataaggtttgaattcattatttcttagtctaatatactacatttctcaggtttcgtcttttgatattactaagatttaaggtaaacaaaattatactagtgtttgaaatttgaatagtttatacattgctgtcctatttggtagtttttcacttgtaattaccatatatttgcatattttttggggacaattggtcccatattagttaatacattgttggcctatttgatagattttcacttgtttatatttgatgcataaataatataagctagctatatagctactgcattaatctgaatctataactacatatttttttcacggagtagtttttcacttagctgatcttaagatatagagtagaccacat

SEQ ID NO: 120245 - DNA, 2325 bp, Cannabis sativa
  modified_base (2287)..(2289): a, c, t, g, unknown or other
ttacatccgattggacgatagtcatcgggtgcgtctacatattcccagactttgtaatttttcatggaatccatttatggatatgcagttcaaagatcatttaactgaacttgggattgaatcccaattgactgcccctagcactccacggcaaaatggagttgcagaaagaagaaatcgcacgcttttgaaaatggttaggtccatgcttagctactcaactctacccacgtccttctggggatatgcaattcagatggcgaccgaccattgtttctgtggcacaggtctacccatgtcattatgatgacatctcttgtgagggatactaactcccaccacacaagagtgtcctcctggaactgaaatgtggcacaggtcacccaatcattcccagtaacactcataaagttcaagatcctctcaattactgttaaccactgttctgccttcatcacatctagacctcccaaaaacactggaggtgcctgcttgtaaaatatttcatacaaaggttccatatgattgctagttggcacttgcggtggaggcactacaggaggaccctgctgtcttagccacttaatttctttatcttgtttgttaatcttggcttgtatttttgcaaacctttgctcccaatcccaagcaacttctggtggattttcttgaccacccctctaaaaccttacacagcctcggttgcatcggggaatcgaaagatttcgatctccctaatcgcctccggtcccgaccatgttaacatgacttcttgtgtttcgttggacgtccatattataggacttagcctgcgaacccataagtcaaatagattaaacagtgatcatatatactctaggtaccgcacttatggatttaaacgcaatgcactcaaataaataacatatggctatcatgtttcctatcatgcttttctaatctcataacttaccaaacaagtaaaggctaactgaacagtgagtcgagcttgtctccgatgatgattgtacgtgtcttgatagtcttcagtagacaacctggcagctctgatacaaaaattgtaataccctaatgcttaggcacgttacaatgaatttttaattaaagtgcacacctttgctaatcaaagggatttattacgaaatcgagataaatttaaacttttgattaacattaaacttatctaatcataaatatatatacttatacaaaaaggtcgagatcccatctgtaaacttatttatacaaccaatatgagctttataaacatgtcgcataacgactacaaaatgaaccccaagtcgtcccgagaccaaactctgcaggtcgtgccatcttgacatgtataatcatccttgagctatggactcattgttcctcaaccttagcctttcctttacctacacatgcaatcaataattatgagtcaacagtctcagtaagaaaagcatataacataaaatatattaccgacttgaatttaggcacccatataccattgcacaaggcttaacagatgattaagaacgttcttaacaaaggtacgacctttgtactacatgcactatgtaccgctactgtactagtgttggtagggtttgaatcataccccgagtaccactaagtgttgtacaacatgcactatgtactcaatggtactagtgttgctaacactagattgtactcttaaacatcatatgatgtaccacatgcactttgcaccgctaccgtactagtgttggtagtatatgaattatataaaagcatgcatataaaggtatttacacattctgactggatatgaccaaatccctcacactccctgcactgaatattttttctgttagactgaaaaggtttaagagaagaaaaaatatcttttgaagtcttaacattagacttcttatttctaattttcgttatatatttctaaaaattctttgtaagcatagccatttccttatcaccatcttcatcatttgatgcttccttttcagtacttttgaaagtaatagtcttctctttttccttggaggtaattgatttctcctttgaatgaattttttgattaaatttaaaggtacgaagagataccatcaattcttctactttcatagtactaaaattatttgcctcttctatagttgtgagtttaacattgaacctgtcaggaagtactcacactatctttctaactaaaacagaatcatcaagcttctcaccaagggcaaaatattcattagaaatgtcaaataacctttcatagtgttggatatattttaccagnnnctagatttactaacaaatatgtttcattaacatcct

SEQ ID NO: 120246 - DNA, 2999 bp, Cannabis sativa
tgatacggcccgcctcctcggccacagaaaaatccgcattttccagaacagaattcatagtaactgtacccctagccacattagcatcagaaataagggacatagaaccagagatagttatgtaatgttcacctgttgggaggcccgactcaggatcaggtcgagactcagactttgccacttcctcgtcttcgaacaacccatcatcttgttcaagggccagcaagctttcaggtttattgctttttccaccccgatttcttgtaccgcgaatctcctgaaaaagatgatcatcacatcctctacccaaatcatctttcccttggccttctctaacttcggtatcggtgccggctttccttttctttccattgtcctccattagaccaagatttctctcgcccaacgtaacagctgctcgctcgtcccccaaagggagacccgaatttgaactaccctcagcaaacacatccttaggtccccggtcaatcacaagccacgggttcgtcttaaggttgtctccctcgaattcattgtgtccatccgagattttctttctctttgtaccaacagcactcttatccagatcattaatattcccaaagatcggtttctttggaatcccacggggcccaaacattcttgaatgagagtttttatgggccatccttgatctccctttggaaagcagggatgaaacttttccacataacgagacagtcaaaaaagaaatgctgaatattttcagtatccacatcatgcacaaagcaaacagtttttgaatcaaattttgtcaaacaatccattgttttaaggttattttgaatcgctaacctaaaaataacagattattttatttgaaagaattaagtctgttccatacttcattatactagctagtgcaatgaaataagttcataaaaagagtgttattaattataaaataagaactatatccacgatcatagatataggctgcgctagcatcaagataacagaaacaacagaattttagtattgatattaagcatcagatactgtgttgcaaataattagtagtactatgaatattatgaagcttaaatatattgaaccaaatatataattaattatattggtgatattagacactagtggtattttctaccatttatctttcagcataattaaagtaagcataatagacaagagtccatataaaaaattaaatacacagaataataacaactacgatatttaatggtttcacgcaactactaaagaggtagatgacatatgtggccggtgtctttgcaactaattaattaataattatgattgctaatgttaattgttaattaagtacactaatattatatatatctacccagaatgtttgtgctgcttttactaattatgtgggcatgttagtgagctggtcagcattatatatagattctctgttccattccattatacctttccccctctctcttatccatcctatcaattaataatgacaactcattatcactgttagttaattaacactttaagtatctggttccttttcctataaacaaacgtagaattgataataataagctctttacaaacccaaagcagccattaattaattccccaaaatttatgatttcagcctatatgaacattggatatagcaacatatatatgtaactatcagtattttcagtttttttatggaaaattatgaccaaattgttttatctacaaggtaagaattttatctttataatataatggttcattacaaaagaatttacttttagtaacaataaaatttgtgaatgaaagtaaaaaagttatgactaattataaattatcatattcttatgttgtgactaaaatgtctatagctaaaagtattagtcacaaaaattacaatttattgtgactaaatgtatttttggtcacaatactctaaaactaaattagtactaacttgtatctaaatactatgcattaactacaagtaatcttttgctgtgactaaaaattacatttaatcacaaaaaaaattatgttgtaattaaaaaattatcactaaggatatatataatttttgtagtggttagtctatatttgtctttgttgaaactgcatggtatcaagttccatctacatattattgcaggttatttgggacacgttagctattactgttaatttgagaagagttaaatctaattaattaactggttagtttggtaattagttacaaattaaggttactataaataatcagattcttaattagttaactaatcctattgattaatttttgttacagtgttaaaaaacgctttcttcttctctctttgttttctttgatattgtatacttgcaggaacttcattgaagggtgaagtttaaagcaagatttgaagctactaaagtgttgcttggtcttatttgaatctaaagaaatttcatatcgtgaagttgttgaaaggattttggcaatttacacaagaagatcttgtgtacaaccaaaggatttggtttagggtaattgttcactagtgtcttttgtatatgatcttgtgaaatttttaatatggattagctgtttttaatatggattagcggttgttaaatacattcttgacttggtagagttattaccctagttctttggggggacccaaggagtagttgactaaaatctgtttctagttatagtgaaccttgtaattttttagtgttgtgattttatatttaccaagtgatgattaattgttcaaaagtttcaagaaaatgagataaaaatttggtatagcacattcaattggtaacagaacctactatttatttgtgaaatagtgatttgaggtgttgtttaggttgtgttatacttttcttgtatccccttcatttcttgatttcatttcattaattcttattttttaccgtacgagttgttgggactaactgttgggttttatgtcctaaataaaactctttacaatctgattagt

SEQ ID NO: 120247 - DNA, 1034 bp, Cannabis sativa
  modified_base (991)..(1008): a, c, t, g, unknown or other
gcaaccgaatcattacgccgtaaatagttcggattaaccaaaccaccaaaaacagtttcttcggtttacggtttacgatttacagtggttcaaacttcaaattttcgtggtccggatttaaaccgtaattttccgatttatatgaacaaccctattaattacaccaaacacaatatttatccaattacctaaattaatttacttaatatagataaagtttttttttattgattttgttaatgagtaatgttgtccctgaaatttgaaaaggttaagtggctggggtcttatttgacctgctcaagcataataactcaataataaccttataatttccttattagaaagttattagatatttacaatccaaatttaaatttgcaatctagatatattttacttgtaattgtggttaaaacacatagttaaaggcccatgacacattatgtacaaataattagaggctgatggcttcattattttctaattcacaaattgatcgttgtaacatatttgtatatagatatgaagatttatatgttttatgagtacaaaagttctaaggcccaggccaattgttgaagctagcaattaataaattaggtaaatatatagtagctaataaagaattgagtttcgatgatgtatctatatatacctgaaatttttttatgacaagggtataatcaagtgcaatgatccaaggattatagagttggagatacagggctgacgttgtcattaaacaggccattccatagaacttgctaactggcggtagagaattgtaatatctacattcaaaataaataaataaataaaccagaaaattcatgataaattagttataccatcaacaataagggaaagaaaaataaaaaataaaaaagccccttcttttgatcacgatttcttaatcatatcatcatacatcaaatgcatatactagtatatactactattatgtgtgtatttatatatatatatatannnnnnnnnnnnnnnnnngagagagagagagagagagcttcctt

SEQ ID NO: 120248 - DNA, 1278 bp, Cannabis sativa
ctaaaatcctggtaaaataaatatccaacattaaagtcacaggtttccttttcttgtgtctcaaaatcgtgtgagtcaatctcttgagcatatttacactgatttatggggggccatcacacatgttttccaagaatagttacaaatattatattgtgtttgtggatgattatagtaggttctcttggattttacctcatactcttaaatcacagtcctttgaaaccttcatccaattgaagagcttagttgagaagcaatttaacttgcctattaaaagggtccaagctaatggtgagggtgaatataggcctttttaaaaaaaaaatagggatcaaggtatattgtttcaacaccctttttctcccactcatgaacaaaaccacttatactttatattttttagcaattaaccacctaaattaattttttggtgacaaaagtactcaaaccccttttttgttagctaattaccccttccatctaaaagtctcagttaactgccacggtggacggcctacgtgtacataagtgtacacgtgacacgtttttagtggtccaaataatattaattttaagtataataaaaataatttaaaaattatataaaataatttataaaaataaaaaaatagaaaactttttttctattttccttttatttctctttcttctcgaactagaaccccccaacccaacttcttcttcttcttattcttcttcttcttccttctcccattaccaccaccaccatcccaccacaacaattttcacacctcaaccactatgatcaccatcactgtcccaccattaccaccacccttatcaccaccgcagtcaccaccaccattatccccactatacaaccatagccaccacttcatatttactaaacctaaaatattttcaaccatcattgttaccatcacaaatattttctctaaatcaaactaaaaaaatacaaatctaaaaaaaatactaatactccgagagaggaagggcgggattcatcgcccaacatcttcaacgattgatgaccggagatggggccttgtggcccattgccctttttcgtcaaagagatcgttagacaagagaagagagtgagtgcgagaggggccgagagagaattgggtaggggttttcaggtcttggggttttctaggtatgaggattgctcgtccatctgtgtattaggagttgggtgttagtgttgggttttatgccctaaataaaactccaattcaatgtaatccattttattcaacatcaataaag

SEQ ID NO: 120249 - DNA, 2155 bp, Cannabis sativa
acaattaataattgaagaaaaaatattattaattattaggtgagattataatataatatatgatacacatatacattctaaatcgagaaaccttcttcacgtctttttacttttgaaatgtgaatccaaacggttataaacaataagtaccatacattataaactaataacaataagttacaataaatacagttacaaaccttgtcttttcttaaataaaataaaataactgaagaccatccatctcctctgattttgatagaaaacaaagtaaaataattatatcttaaagagtaatcatagagatttgaaggaagaaatggcccaaaagccatttggatattataggctaaacaaaagaaaatctacaactaaagagtgtcattttgcaatttgtaggaagtatggccattaaccattggaaaggaaacattaacaagagaaacttctgaaaacttgatgctactcaatagtcagtatttagaaaattttgaatcaacttatatatgtatgtgtgtgtataaattataagaaacacgtagtaaaagctacctacgctccttaaattggctcttgacttttaccataatttcaatacaacttttagaacgccttccaacttgtgcttccacccaaattagagatttttcttgaaggaaaaaacagtcacacatactatatttgatgtaaactgagaaagcaatttaattgcttgaaagttcgaccattggctgccaaacacaaaacataataataattttaatttaaaataaataaataacaagaaaatagacaatattatactattaaaagttcactacatatgaaatgaacctgacttctgagtgtatacgtcatgagatcaaaagctccatttgggggtatggtatgaaggatatggttcgaccatttttaaatcgagccaaacgtacacacttaacaggttgaaggaaccagaaggaatgttatgggaaaagaaaggagcaatcatacagaatgtctgacttgaaacagataaacagtttgcaatagttaaacagaacttgaagggagtccgaaaatcaggagaaaaacaaaagttgataaaggagaaacatactgatgaaacttaatatcatccaaatcaatagtttttccttttgttgttcgaccttgagcttccagtaacactctatcattaaggcctaacttatactctatcataccactacaagatcagttcaaccgagtaagctagattaatcaacaaaaacttgaatgtatagaggaattttaaaagcgttgagggaaggaaaaaaaaatgagccctcagtgtataaatcacataaatcttcttgagatcatgacacagtacagaagttgggcaatactgaaaggcccaaaacaagaaaagattgactaaagggaaaaagtgtccttcaaaataaattagaagttttcccttggtattgctcataaaaaataaataaataaattacattatttataataccatattgaataaatgtaggacaacaacatatcaaggttaacattacttaatatttttactaaggtcaattgtaattacatatacctggacaccatctaggaaaatcctaataaatagtagttgaaacaacattctaaaataacattctaaaaaatatttacgctcattggtggatgatcaattattaatttttagtttaataaatagtagttgaaaaaacattctaagaaatttatacaattggacaccatgaagcctacttgttttaaatcataattacaatcaatacctggggagaaaaaatctagtacctcaaatatgtcctcatctttaatgccccaacaacatcagaagcgtattatttggctattgttgttcacaagtatgtttacactttggaccacatctaagaaacctgaaacaaaaaggaaaaaaaaaaagcggccacacatcacgactagtccaattaacataaaaaacaatgagatgcaatcaccgaacacaataaacctacttcattcttcttgtatcgaatgccttcacttcaccaagaaactacatttaaaataatatatataaaatatcagttcaaatataagttcaaatattaatgggatttgttttattattattttattatatataaataatattttactattt

SEQ ID NO: 120250 - DNA, 573 bp, Cannabis sativa
tcattaataattttgcagcacgatggataggagtagggtctctttcagcctataaaaattatacaaatattgaaagaaaaaaaaaaaaaaaccatgagtagcatataaatacaattggcaaacccacatagaagtaaggggtgtatatataatttttagttaattataatatatattgatagcacaatgctaatggttaagctaatttatatacatcataatatatagagaataaggatattttcatttttaatatttaatgtttactttttgaacaacttttttattctttgtctgtttgttttttttttactttaatttatatttaatgctataaaaatataaatttgtatccatatttaatattttatattatgtagaaaacaaatacaccccatccttaaaaaaaaataagtcacctacactttaaattctaagtatatatatatttggctaattaattttttttttccgacatgtactaaattatgccccctgaactttttggcctttaaaaattctccttgaattattgagattgtttatgtgctaaaccatgctccccagactttg

SEQ ID NO: 120251 - DNA, 1555 bp, Cannabis sativa
  modified_base (63)..(68): a, c, t, g, unknown or other
tcttgatttgtttgttttgatttaacttttgtttgtttaagtgtgatcttgaatctggaattnnnnnngttaattcctatgtatcagagctaaaattcctacataagaatatttgaatgttgtattttgatcaatatatgtctaaaaaatatattttcaagattgtatttgataaaaatattaaaattatttataaaaaaaaaattatatttattgaaaaatgtattttttaagtaaagcttaatattattttgaattgtaattattagcctttataattttggagtctttattttatatataaagtaaattttggacatcatgttttgtgaagctaaaattttaactatatatattggttgaaaataacaaaaattaagattttattcagaacttttatattttaaaacttttaactgtgatattcgtttagaccttttactattgaaaattaagattttttaaaagttaaaagataagaatatatattagctgttctttttttggtagtgggaaaaaaataagatagataaaatagtaaatttttgtttaataatattcatctatacgatcatgataaataaaaaaaatgatgaataagagtgaaaaaagatggtgtaaaagtattaattgatggattttttttttgctaaaaattaattaataatattataagtatattcacagttagtagttatacccatggcacatatatttattttacatttgaagattttttcaataacttaatatttataaaattttatataataaaaaatagaaaataattaaaaaaacgagagagaaaatatataaatagggtttaacaatttgtctaccatgcatactaataatatacatttttatttgttttgaaaaaattaaatgaaatttaaattcaaaatatccatttaaaaaaaggagagaatagataaattattctcttttttagttaataaaaataaattgaaaaaaattagaagagaaaaaaaaactgaaattcattgaacatagtttagattttattaaaaatgatgagagttagttttagttctaaataaacactcatatttatgttctttttaaaaaataagtaataaataataaaactttatatgtttaaactcattcatttcctttacaaaaatcatctttatatgaggataaatattgataatgaaaaattagaacaaaatttgtgtgaatatgatatatgaattgaaaaaataattatatttttattgtttgactcaccattcttgcaccaattaattgttaaatttatattagtattacaccatatctcattagtaagtcaaaatacacaccaaactcttaggttttatagacttataatttatttgcagaaattttctctctaaatggtaagagcactctttaacatacatattcttttatttagagagaaattatttattaaaatcattgatctcctatatttatttgcagcatacaatacaatttaaattgaatatattgtattttaccgtaattaaaatagaaaaagtataatatatatgtgacagtcagtagt

SEQ ID NO: 120252 - DNA, 1026 bp, Cannabis sativa
aattaagtaataaatttacccaaatacttatattaaatatagcctagttgaaatttaaactatctccatgtttataagaacaataatatatacatataaaaaataatagaagacagtaaagacaaataatttgttaatttatttaattggaaaatgggaatgtcatgtgagaaaattaaaatcccttgccgtccaaatgtgctctattagacatgggcacatgatagaaacgttaaccctataattcacatgatttgtcaactccacaaaatttcatgctttttacccactttctatatatagctacttattatataataaataaataaacatatatttatatacatatttattatgggttggtgggtcagtgggtcctcattcaagatatcaataatccaaattaattttgaattcttcatttcatgatcaagaattatacatacacatactaataatgtcatattctaattactctttatgaatatatcactaataatgactaaatattattcatgtgatagtatcatgaccaaatagatttacgttagatatatacaataatgaaaatgatctcaacctcatatatcaacattaataatatatgtattaggattttgttgtgggaacaattagattgccaatcagattctatatcatgctatatttatatattgtacagattatatgaaaatattttacaagttttatattagaatgtctaacagtaataaatgcaatcatttgaaaattgcattaagaattttgttatgcttgcataccctttaatagatatatagattattaatttctctaagaaaacaaaagggtatgtagattttttacttatatggcaactataagaatgcttatatattctttaatagtttaaacaaattaattattataattgtttcagcaagaaataaaattataattgagacaagaaattcattatttaggtttgtttaaatgtaagtagtaattattaggggctttttcatttttacacttcaaactagtttt

SEQ ID NO: 120253 - DNA, 1915 bp, Cannabis sativa
cggcccaaagtatttttgtaattttttttccttttttgtatttttttatttttttcccatatataaattcaaatttgttttttattatgcgtaattagattaaaatttaatagtttattatttttaaaattaatatttatatttatatatgttttgtaaatatcaatagtaatgcccaactcaagagtgttcaatatattttagtatatgttcatttatattgtgtaatattattcttttcgggtaactactagtctattagtatactggcctcatttcttagtgtatataaagaattaaaatataaattaattatgtagaataaaataggtgtccactcctcctaaataaatatatataattatatttatatgttagattgttttaatattttgttccgatcctcacatcgattctaaattcatttctttgatttgtttagttatacatgtggatataactcatatatacaaatataggaaattatgaagtcaaaagttatatcgtgataataatgacataaatataatagcaccatttattttatatattgagcgctattttgttttcttgttagttatgtcataatgtgaattaacgtcttaagtgaaagagagtatatgaatgcatattaagactcagcgttgtagtctacaaaaaaaagactgagcgttgtagtagcatgcgttgtagtcaacaaacaaaagactgagcgttgtagctcatgccaactcaataaattcttgcatttgaaagctatttaaggttctattaaatcatgtcccacacctccgaacgtaatttgaagctatcttcatcaaaatttactctaagagagttataaaaataagcttcggataactcgcaacgagacccaataggcaccaaaaattaatcttcaccaccaaaagctaatttataccgttagaacattatcaatgatgtaaaacaacttatttgtatattttttttctatttttgtgttctccttcacctaaagatagttcattggattacattcaatggatttgaactcaaccgatccaatccaattatttattagatattgaattttgtcatccgatccaatccaatcgaattgagtcatccgatccgatccaatccgatccaatagatgtattggattggatcggttcaccattgaatgcattgactagttttttattggattggattagattcaatctattttaattacatttaagttaatttcattaaaaaaatatatatatatataaaaaaaaacataatttaaaactttataatccaatatacataataaatattagtttaatccaacttaattttttttttctttaatctcatgtgttaaatgtatattaaatcaattaatatatatttttaaataaaacatattaaatatataaaattataaatgtattttaaaaatatataaatataattgaatgaccattggatgataattggatcggtttggcaggttatttattggatcggatgtcccatccaacaactgatttgatccgattcaatttttaaaatttacatccgactctatccaattatgattagatatccaattttattggatcagtcggttgtaattggattggatgactttctgcacttataaaagaagaggtccttagctcattttttacattaagaaaactacctacaagatcagagtttccatctaaactttctttatttctctagagtttggagtactttctgatacttagtcggttgttgtaattatcatcgcgtgagaaataaaaactcgaagtagacgtagccccattactatcgcgatattagggatgaactattataaattgttgtgtctttcttattaattcactacaaaaaaaagaccacttttagtgacaatcttttagtcacaacataa

SEQ ID NO: 120254 - DNA, 1841 bp, Cannabis sativa
tagtagcgccattttttgttgcatataattattaatttgaaagttattagctagggccccctttcttttttgcattaatgtaacttcgataatagtaaaagatgagttcatattggatagtatgtgaaaaattaatattatttataatagtatgacttactccattcatgatcatttcaattaatttttaattggttttgacataatttttgtctaacatcctataaagtggcatatattcttgtaataaataatgtgcatttctttttcacaaaaaaaaaaaaaaaaaaaagcctcaaccacccaacatcaacaaatactctaaaacggtgtgggttagaatttcttcaaaaatagctgcatgatcaccaaatcatactacttacttgcagtcaaaccaagtttggttaaagcataagctaacactattaataaaagacctcttacaatgaataaaattaacaattttgagcctattacaaaaactaacaatatcattcaacactagacctaaaaaagtaataagagagatattatttttaattttaaacgtaacactcaaacaatcaaattcaataataatactgtcatactcaaaagaaagacattgggacaaagtctttctaatcgacaaatcttcggccacctcgggcacaaattgtctctaataaccatgccactacaattgagagatgaggagcttttcatttgggagctcgagctgctttgggagagaggcactactagaaaaatagacttcaagaacccacggtgagtactctaaaactgcttaattagtgacccttttactgtacgtcactaatgtgaataactgaaaagacaatatataatgaccattcagtgtaattattaaattcttttagagtccctcacccctcaccgtgcgtcactgtaagcttttagggtccgacattatcaatctataaaagtagcagcaacccacaatttactaatgattattattaatattttcctttttatacaaatttgaatccaaaaatattgttgtatattgtatagttgcaaatgtagttctacaaatataaatttttttttttgctttgaattggagatgatgttttgtttctgttatatagaatttttaataaatttaacattaaaaaaacaaaataattatgagaaaatgcactttctattagttgcatgataaaattttgggttgagaactaaattactatagacaacaaaaatcatataccatataataaaaaatatatacatataataaaaaataaaacaatataatataatattattaaaaaaaatgtatataccatattaacaaaagtatgtatcacttttatatataataaaataaaaaacatgcatgatctaaaataaaataatatacaataaaatttatataccatataacaaaaattatatacattacaatagaaatatatataataacaaatgaaaataaaaaatataggatgctaataaaattatatatcatgtcaataaaagtacaataaaaaatagaacttaaatattatttaaataaaataatataccgtataacaaaaaatatatatataacattcaccaaaacatatatactaacaataataataatgaaaatatatattcctgatatatatatgtatactatattattgtataccacaattatatatatataccgtgacaataaaattgtatactattgtatataataaagggattttttcatttctacacttcaaaataatttattttgtatttttacgaaattctacatataaactcctattgcaactagcgctgcaacctaaataggaacccctattgcaact

SEQ ID NO: 120255 - DNA, 767 bp, Cannabis sativa
gatattattaaaatactcagccccataatcagttcataaaatattgattctagtttgaaattagttttcaattattctaaaaaatctatgaaaatttgttcaacttcagatttcttacacattgaataaacccaacaaacatgagtatggtcgtctataaaagtaacaaactatttttttccaaacttgtagtaacctttgaaggtccctaaacatcactatgaaacaaataaaaaagtttggaagattgataagaatttctagcataagatttttgttggctcttagcaaataaacaagtttcacattgaaaagataaagaaatcaatttcttaaataatactataaacatatgttttaaatacaaaaaactaagatgaccaagtctataatgccaaactattatttgatcatgaacagaaagagagctactactactacacccttgagcaatttcattattagaattcttatctttaaaatagtagagattattaatcaccttagcactaccaatcgtcttccccgaactctggtcctgaaaaaggcaataaaatttatgaaaaattacacaacaattaaaatgtcaagatagtttactaatcgacaaatgattacaggaaagttgagaaatatggagaacagatttaaaatttatcccctcagaaattttaattaaacattttcctgcaatagatgagaaattaccatctgctagcttaacttttttactacctagacagggtatataaaagttaaaacaattt

SEQ ID NO: 120256 - DNA, 1813 bp, Cannabis sativa
  modified_base (1755)..(1778): a, c, t, g, unknown or other
gtgctgccgtggccaccgccgtcgtcgtgggcgacgtcgccggtctcggagtcgccattagagatctgaaagctcagaggattcgtttttggttaattattgatgtgtttttattttgatacgtctaagattttatttaattaactaattttaatatttttaatgtcgcttaatttctttcttcttctgccgcgaaactctggcgcggaagtaagatccgtaaacaagaggaacggtacggtttttttttcggtgaagttgaaaaatcggcccgaatatttgtctagaccgggccaataacttcggtagcttgttctaaaacttgagatgtttttgtttggtactttttttatttaaaataaaaaaacggaggatgacttcatacattaatcaacattacaaggaggcaagtcacacaccattacgtgaccagcacaagggaaatcaactccaattttcatagtactaacattcatagacaatgcataattagctaaacaatttgtcacttgatttgcatccttaccaatatgaactaaatcagtgactctcgtttcctgcaacaactggcgaatttcttgcgctgtctctgcagttttcctccactgtggaaatgagtttcgcagcttcaaggcaatctgtctccactttgaactgcaacaattgacgttgtattcctaccagtatctcatcacgaataccctcaagttcagcaaccaatgaggaagggccaccagtacaaaccttagttgctgcaaacgtaacagctccttcttaatcacgaaccaccacacctccaacatatctcaaagcttgatactgaatcttctggacagctaccctatcatctggcaactctctagaatctaggaacttgtgtatgtggcctatccaggaagttgaatgatcaatgacgcttaccccagggctattgtgcttagaacaacaatattggcgatgagaactagttcacacttctctatttctatatttgttgttagttttgctaacatataagtattttggtcccgagggactttcttgactgtatatcttttgaaactttggagcaactcgtgagattttgatacataactagccattttctcaccatttgtttggtattcgctggatatctggtttactaccagttgagagtcactatagagtttgatgttctgggctacaacttctttggctaattacaagcctgcaatcattgcttcgtattctgctttgatgttgggggcaaggaattcaaaccagagagcactttgaagttgatgcttttgcagagagatcagaatgattccggctccataacttttttcatttgatgctccacctacataaaccttctagacttccagttccagagttggttcttccagattgttgttaattcttgtgcattatacaatgaagtctgctaaagcttagctcttgattgaaactcttggttgatagtgaatattgaactggctgagctttgttacccacttcagtattcttccgaatggctctggtttctataacacttggcggagagggtgatttgttagtaccttatggcatgagcctgaaagtatggcattagcttccgtgaggcaattagcaagcaataggaaagtttttcaatcattgtatatatggactctacacccaagaatcccttaattacgtaatacaccataagttgtatcattccttctgttggataatatttcattaagacttagatttactaacaagtannnnnnnnnnnnnnnnnnnnnnnnatttctaaaataatgaaatttaaacacatataaag

SEQ ID NO: 120257 - DNA, 1096 bp, Cannabis sativa
  modified_base (589)..(589): a, c, t, g, unknown or other
ttatttttgtgttgtttctataaaaatataaaaatgtaaaaaaaattaaatgtaaaaatataattttatttttttacaaaaaatagtgttttatataataaacccaaaattttataccatgataaatatcacttttttatttactattattttgtcactcattaatgtaattaataattttttatattttatttatatatttactaatatttttatacattctcaattaaaatttaatatttttgttgattttttacacatttttatcaaaaaatgaagttaattttacttttaatgcattaaagctaatataatattgactagttaagttaatagtttatagagttataagtaccattttggacctgtgttttgtaaaagttactaattgaattctctgttttgttaaatgacaaaatggaccctgtatttttcaaaattgtacaaatttataggaccctcagctcaatttttcaataattttatttttttaatataatcaactttaagacaataactaatacgaacagatatagaaatataaccagttttgtcataatatctctaaatcagattattattaagtttnattttaacaaaaaatcagttcagattcttatttgtacaattttagaaaatacaatgtctattttgtcatttaacaaaacagatagtctaattaataatttttacaaaatataggtccaaaatagtatttaccctagtttataactaactagctactaatgagtaactagtacttagtaaaattagtaactaattagtaataaaacacatgaataggaataaaaattagtgactagctagttagtaaattagtaattagatactagctagtaaaaaaaatatgagtttaaaatattttttaaaattcaatttctagattttttattttaatactcttctatctcattcgaaatcacaattaatatttaacaaaactcttaatttgaaatatgcaattttaatgttttaatacatacactacatatgcatacaatatatatatacatatatataattgttgtgaaaaattgtatacgcaagtgcacgcaatcgtaacaagtaataaagt

SEQ ID NO: 120258 - DNA, 570 bp, Cannabis sativa
tacccagttgttgctgttgggcctatgggtactgagcttgggcctgcgttgggtaacatttagccgcaccaatcattagaaaactaaacaaaaacaaaataagttgattctaaatgcgaaagtcccaaatgcactggggcaaacattgggagagttgaggaggttctcaacttctttaaatggattcaatccgagacgagatgcatgttcccatcgaaccattctgatcattctcgagcatagtccatccgccatgtctaggtcgaattgccttaacacctcttcatccttatcataatcctctatttattaaaaaaaaaaaatagatcacattaaatcaaatcaaccagcatcaaactctaaccctcataagtattctaagaaggagattatgagattcatgataataattaaatagtatcttgaaggtgaacagaggctggggcctgggagagaaggaagaaggtaacttagttttggagttggtggtggtgtctcttttctttctctgccagtagaaagccttcatctcgatattttccaaatcgtcatctctctctctctctctct

SEQ ID NO: 120259 - DNA, 1002 bp, Cannabis sativa
gatttgttaatttttttgaacagctctaatatgaacaaagagaaaaactcatattgagcgagatgaaaccttacacatcaagattaaatgtctaaagaataacactaaagagcagttaggtagttataagatattatcccatatatatttaaatgaaacttggtaatatccacgtttctttagcagttctattttaatcaatcctaaaaagactattattcaaaattagatattgtattctatactctaaaaatatccctaataataaagactcgtggagtatgtatgttttaactacaaaaccacataaaaatatctagagttattctatcatttattatttattaatttctgtacataatttcttactaaaacgatatttatttttatttcacgaaaatttgcgttaacaatataaagtatgagaaaccttacattggttgcgacagaattaaatgactccttcagctcagatctctaacccatgtttctttctacatcagagtatgatcaagatctgagctcgacactccttcaaatgtttggactcttaacagtgttacatactataattgaggacttacttgctatgggtgggcatgaactcaatcactaaaggcttcaaaaatttaatgaagaacactctaagatttcgaaaatacgaagaagaagaagaagtctcaaactctctagttgtctgataagatgtaaactaggtatagagtcattatttggattgtgagactatccttttctttttatactaattcacttagggttaggattgaattatatagaataaaaaatgataaaataataaaaaaataacatttaatgaccgtccacaatgtgggccctacactaattatatttttgccatttttcttaattatttgtctataatttcacaaatgccatatatccaattctaatcctataaatgccaaaaccatttatataataattataattaattatcaaataaaattgtcatttatatta

SEQ ID NO: 120260 - DNA, 792 bp, Cannabis sativa
  modified_base (50)..(58): a, c, t, g, unknown or other
  modified_base (754)..(757): a, c, t, g, unknown or other
tagttttagtcacaacaagtattgtgagtaaaaatacatttagtcacaannnnnnnnnatttttgtgactaatatctttagctacacatattttagttacaatataaaaataataatttataattaattacatatttttcactattagtcactttgttaacactgattttttttttgttcgtagtgacttaaagtggacataaaacggcccttcaatttgagtttcatgtgcattgcaatactaccaactcgccaacctgttcgactgttttgtacggtaagtatcaatgtatccacttactaatattctttaattaattgtgtaatttggatgggtgactctggctggctttataaaatgtatacgtattaaatattaatttagatgccgtttggtaacacttttgtgttctaattttttaatcactaattgaaagtaaaatttttgtgtttaaaaattttgcttttgaaaaacaaaaatgtgttctgtaactacttttgttttttaattttaaaacagaaaacaaaagtgtgttctgtaaaattcattttcatttttattttcattttttgattatttacgtcgcgtcaaggtccggggtcagatttgggttcaagtcagagtccgggttcagcgccagggccgtggggagatttgggtccgggtctgatcgaagtccaagatattgaataaggaaaaaaaaaaactgtttaaaaaaatattaaaagtgattttttttatttttaaaatttnnnntctcaattaaaaaattgaaaaataaaaacagtttt

SEQ ID NO: 120261 - DNA, 1646 bp, Cannabis sativa
cttgatttttttataacaaattagaggttattcttgaatagagtattcggttctactgtatttctatttctattacaattatattcccttaaaccaaacaccacctaatataataaatttggtgactaaaacaaaagaaaaaataaagagaaaatagatttgaaaaatgagtggaatcagttcaacaatgcatgaatctaaaaaagggtcagtagaagctattaaaatattgggtatttattaataaaaaattactacactcaaatgtttaacgttttccacaaaacctgactatcaatagtgagttaccaagagtcacataatatatactagcacatgttagctcttaattattactgtgtcattattagttttattttattttttttatacaaaagtgtaattaatatttgaatgtgaataattataagacaaatatcatcgttagatcatacttctgaatcacttgggcgtgatgattttactttttatggataattttaagttatatataaagccttcaataattacacaatgaaaatttaacaactattaggcaccaatcgtgcatgtcgcaaatttacgattggctagcgatacttcctaaataatattatattaaattatatgtgacccgatacttagttgaacaaataccgatattgacacataggagggtgttaaacaccactagtgccctttagcatttctcaaaataaaaatagttaagagaatgtaggatatatacaatgaaatttgtgatgtacactagtaaacagggctcatttggtacaccgtataagtgtcgtattgtattaaataataaataacactatgtttggattaagtaatgtattgtattaattattacgaccaaattttttttaatacaatgtatgttgtattatttaatacataataaataatctgtattagtttgtataataatatttacaaaggatttggggtcaacaccaatcttcgacccgagcccgagcctggacccggactcggacccagtccccggacccgaacccgggacccgagcccgaaccccggacacgggacccaggacccgggacctgggacccgaacccggactagaggtggcaattcgtgttcgcgcgtcgtgttcgtgttgcgtcgagacccatgtataacaagtacatgcttgacccgaacacgacccgtttaataatcgtgtcaaaaaataaaacccaaacacgacccgtttataaacgggttgacacggcatgacccgtgtaacccgtttataagcatattttgtttaaacatgtcagccaataacacgtttatgaagtatttaacacgtttataacccattcatgacacgttaaagtactaaaataactttaaataggtcattaacgggtcaatatcgtgttagccgtgtcaacccgaacacgacccgtttattaaatgggttatacgagtcaacccaaacacgacccgaacccatttaaggataacccaaacctgctaattctcgtgcgggtttcgagtcgtgtcatcgtgtctgacccattttcccggccctaacccggacccgtagttggtgttgggatcaagtgtattaaaaatatattataactttacacaatcaattaatacaagtcaataccaaa

SEQ ID NO: 120262 - DNA, 1964 bp, Cannabis sativa
agatggcagcgtcaagttgtgaagcttgcctacaacaaactcaatgttagatttgaccatgtcctctgctaactggggtgagatcataatcatactagctacctgaccatgcctcaaagtttttttgccaagctacatgaaatagatttcctgaactcaacaaaaaaattatttctaattgcccaaaatgaaaagcaaaaatattcttataaagaagttcttcagtactttcatcatgactctcgaagtcatgtgcagtagcaataccgaaccaaatacgacgagtagtggggtcttgagcccatgttgtggcaattccatctagaaggtaatgggttactcttgcagcacgtctttgaaaatgcctaaggctcttggctaagtagtaggagaaacctttaatttattatgagcccaaacgatgaatttattaagttcttgccaataaccatgctcgctgaagagaaacaatagactaaaaatccgtacaaaacgggcacctaggcaaaaaggaccatacgcaaatcatgaaggaccatagggctgaattacctgggatgcatgtgcccatacgaaattgtgaagccactcattaatagtaatggaactctgcgtaaagttttacggtattcgttaccattacaatatcatacttgattttttttgaaatattttaaatagtttaccatgcccaaaataattttgaaattttatgaacacgcgttgtaaattgaaatatcatgaattttgttgtcgttacagtattctcccttttttaaaaaattaataggcttaatattgtaactttaatgaacatcgtcatcaaaactaattagaaaaaaaaaacatttggtatgtgttttcaacgctaaggttgaatattaatttaaaataggaggttgacgatagcacttatcatgtgtaaaggatatctatatttttactttgggaaaatgacggttgtatttatataaaagaaaaggaacattttaactttttttttaactataaactactaatttttttaaaacaaaaattaataatttatcctatattaacaaatatgatttataaaattataataaataaatacgaaaaaaattcttttagatactgaaacaggttgaccctaaaaatttaggggccttagacatatttaaattttgggtcccttttaaaaaaataattaatatatatacatatatattatatgaaagctaaaatttttttgtgagcttaaattaatatgtaataagatcaattcgtttcaaaaaatatactacttcatatgattattaacttgattttattgtatcatttaaatataacacgccttgcctttttagatgcaaaagtactaatagaatttgtataatcaagtttttcaaccatatccttttcaatggacagcatcgctaaaccactcaatctttcttgagacattgttaagcggagatataattggatcaatctcaatttagaaaagcttctttaagcattggcaagagtgacaggtatagttagaaaaattctataagcaatccaggcatttggataacaacgatccacttcttttatatagattaagacatctatagttgttttggtatcatttggtacactttgatgcatcataaataactcttggtataagtcttcattgttaagattagaaatctcaccgtacttcattaaatttgtaacactaatacaaaaaactcttcaagctatccttattcgcatcttttagtttctcaaaatcaaactaaagtccaagattttcttcaaaattctaaaattattcaaacctagtttaacaagaattattttattaataagataggaatagtaaagatattttttaatgaacaacatgaaagtattcatacctgattttaaatgatgaaattgttaggttttgtgccctaaataaaactcatttcactataatcagatttactaat

SEQ ID NO: 120263 - DNA, 1083 bp, Cannabis sativa
  modified_base (877)..(889): a, c, t, g, unknown or other
ctcaattctctaccattctaccatttattaccatttatttcatatttcatgtgggacaatgtccacaatagttaaagatggatagagtatgtgaagacgacaactgattaggttaattttgaattgggacttatcaccatagaatgatttatttaagattgaaagttttgattgatcttgagcatttgatgttttgagattgattatgtaattggtgtctttaatttttggacaaacaattgttttcttaagagtgaaaaagtacaaacattcaggtttgaatggggtaaaagttacaatcccagctaatctcacatattcggtcaagattctttattctacaagaaatggaatattttttattaatcttgttaatttgtgtccacaaacataagattaggataataatgataatttacactatattaaacaaaagatcttaagaaaaacaaaacatgaactttacaaaatccttccaacacagcaccgaacccttctaaaaccaaatatattatataaaaaaaaataagaaaaaatgaaaacaaaaaaaaaaaaaacaaaaaacaaaacaaaaaaacaaaagcctccacaatatgattacacacggcaacaatcatgtgcaaccaacttcatttatgtatggtatactaaacaaaaccaatcacaactacatattaaaagtcttgtggatagggccattttaaatcctcacactataaattttctattattttttatacgaaatagtgaagagatatttcatagtgttaaacacttaatattagtataaatgaaaaaccatcacatataatttactttaatatatatatggaacatttcttaatgggtattaccatgaatagttactaaacaaatnnnnnnnnnnnnnttaattttaaaaatatcaaactatcgaattttaatctaataacaaataataaaattacaaatttaaatttttatgcgtaatttaactacttaattaaaaaaatatctaaaaatatctacttttacactatatcaaaaatatgttcatataaaaatatttaactcaaactcaactttttcttttcttatttttct

SEQ ID NO: 120264 - DNA, 1015 bp, Cannabis sativa
gtctacctattagtaacctgctattacaggtcaaagaaaataaactcaaacttatttcaatttgtgtaaaataaattgaaataagtttgagtttatttttttctctaaatatatagatttgtttaagtaaacttatttaaattttctaattttttttttaaaaaaaattagtttatattttattacatttttaataatttttctttacttttagaaaaaatttcaaaaatacccttctcttatattctatttagaaatttacggcctaaatttttaattataaaaatatacttgtaaatttttaaaattacaaaaatacactttgctaagtaaaaaataaaaaaaaaaaaattacaaaacaatgagaaatcaaccttatgacaactatataaataaactataaaacaaaaaaatatatatatatatatataatgacaactataaaacaactaaaaaacagtttattttttaaaaaaaagatatatatttttgtaaataaaaagattcaaaactttaaaaatgaaatattttcagtgtaaatatatctttgcaatttttttcaaattttggatctattatctaatttttttcttttctttaatatatgagtttataaatataaataaggttgattttttcttcccaaaatcttaatttgtaatatctattagattttgaataatttttttcctttttattttttaagatacgtgtttttaaataaagaaagtttaataatatttttgtaggaataatttagattttttaagtaaaattaatttaataattttatcaagtgtttaataattcattttattttatttttttagaattaataaaacttataattttaaaattaatttatttaataaaagggagtaaaacttagtattggtcaaaaaatttatgaaaaaactacaactaaaaagctaaagttggtacaacccaatttttggaaaaaactgttttgactaaaagactataataaattattttttggagtttttttattttt

SEQ ID NO: 120265 - DNA, 1900 bp, Cannabis sativa
  modified_base (1305)..(1319): a, c, t, g, unknown or other
aattatttacatgaaataaattatgtcttttatttaatgataactaagtcttaaaattgtatgaaatttaaatatttttaatttttcatagaactcatagaagacgccacgtcaccactatatgtttcatcatttatttaactatatatagataaatataaaatactaaaattaacaccatttgatattgatgttaatttttttattagttatatattttttgatttttttagttttatgtaaaatcaatgttaagttttgacataaaaatctaatgataagcataatgattatgataaaagtggtcatataaattgtgttttgctttatagatgtataaatatttataaattattgtgcatatttatatatttttttaaatatttgaaacattgttataaattttttagatatttattaaatattaataaaagagtgtttttatttttcaaattcaaaatatttttttttgtatttttacggaattctacacaaaaattcctatagcaactaatggagcaatctaaatcgcaattaaaattcgtataacaacccacacagaaattaccaaagaaactacgggaacaactcaaattgtaaatataaaaaaaaaatagtatataaggtaattctcctaaaaaataaaatttaaaaaataaaaaataaccaaaatttaataaaatagttctatttgttaaaataattaaagaaatttgaatttttgaccaaatttaaaaaatctaataatatatgttgcattcatctaagaaaatataactaattataagcaagaatcatcaattacacataaaaaaatacaaaaaaatataaaattaattttgcacaaacccaaataaaagaaatagtgatctatagactataaataagctctaactgcatcaccacatatattctaaacaatgtagatttttttttcaaaataactcactaaagagtaaaatcaataaaatttgaaaaattaaataaaaaaatataaaaaaagagataaaagataattggaatagattattgtcctatatttttcacttttatatagatatataagctataatcatcaattacacagaaaaataatgtaatattaattttgcacaaactaaagtgaaaaacatattgatctatacatataaataaactctaagtgtctcatatttatttttaaataaaataatgtgagactttttctaaaatagctcactaaaaagtaaaattaattaaatttgaaaaagtaaataaaaatatagaaaaagagataaaagataaatctatatctatatatctatnnnnnnnnnnnnnnntataaatgagaagtatgagacggtaaggtagcggtctaaaaatactttaaagtcatctttcttttttcttcttaattctctcttctctttaattttttattaattttatatatattaattaatattaaatatatttttttcttaatttatttattttttaaatatattcaatagttattaacttctctttgccacgttgtggcttctcttttttttttttaattaaaattttaaaaaataatatacaattaatagttttgtaaataatatacaactaatatagttttgcttattttagtttttaatgagtgtgcactgtgatatgagcatatagaaagcagctcttgctcttaatttacggtcaatgactttagagatgtaaatctctaatgaacttttttttgaactctaataaattatttggataataacttctataattttaaaatacaaaaggtgatttgtcatcataacaatgcctctgaactatgacatgtaccaaatcatgttccttaaactcttgacgacctgaaatggtaaataatcactgaaatagtacataaacaatcactgaaacagta

SEQ ID NO: 120266 - DNA, 3330 bp, Cannabis sativa
  modified_base (2413)..(2417): a, c, t, g, unknown or other
caaaagtctagctcatattcaaacacaataacaacaattaaactaacataattatttcagtacacacaattacaataacatttaaactagattaattaaactaaggaaaaagagatactccctcaataattgggctctccaccaccggagtccctttctttgtcatcaccgggacaccaaggttcaaggatttcctccaggaaagctgggaatgcagctgttgctctatgctagttgtggtgaagagctcgcatcatccatgtatctcgctccctctcgtaggtccaatgagaatgcaggcgctcacacatttgcgactaccgctggagcatttgttgttgcaaggtctcttgcttggccaacctctcattcattgggtcactcaaagtggaggctgaaatagtggatgtggtggtacgtttcggggcacgagcaggcccaaaactaaccactccttttcttgggatagtttcctcttcagacatcatcggcacaccgacccatctacacatctatgtatttaggcatgggaagaacattgattttcttgcctttcacaatgtaatagagcatccatattctttcccgactcaccgtggagtcatgtgaagtaggtagcacagtggattgaacgaaattatgtggacattggatgtcgtgcttatgatcagtctgtttgaagcgaaacaccccatgttcatctatgtcccactccgcttctggctttgcaaactcgggcacaatatcatgcatcagctcatcagtgagcttgctactacctttggagaactcacaagtcacattttgaagtaggaagaaattattgatcgctttgtcagagaatttcaccttgaattctcgcactgtaatatctactggccattcattcgccagaaaatttgcattcaactccttgactacttgacaaaccgctgaagcaggatcttcacacaattccaacaattttctctttttttatattctctatcaaccatggaggcatgcttccaaagttatcgtctcccactatcattccccgctctatgtagtattccttgtagcgaaccgagtcacgatattttgcttcagctgcttctgaaataaattttctcgcttcccatgcatccttgcgtggaggtttatgagcacactgcctgattttaagcattttgtcctctgatttcagaaaaatttagcccatgattctttctcaacacagtcccaaatcacaccaatgcaactcatagattaagacacacccaatactaatccaccacaacaactattcagaactcagcagtcaaaaattaattatcaagtattcttttcacccaaataaattttaaacagtacttcaacaaactagaaaatggtctggcttggccaaaatttgtggagtctgattccttggctctccttaacttgctgctgagttatgaactttcctccgtgagtggcttcgggtggagctattgggctgagcttggtgcttgatatgaaaatggtgctgtacagtttctcgcagctggtgaggtagtgtaagatggcagaaatggggctgttgatggtggccaaaggttggaaacagacggtgatttgtggttgctagttattggtgtgcgaaggtggactgtggtgtttcgtggtgatggtgattcaggttagggactgatggcattgaagcttcgtgttgggttttaggagtggggtaaatggtgactctatgtgcaaaatggggtggattgatggtggttgatgtttcagactgtgatgaggaggatggtggttcgtggtgttgtgcgggtatggaagaagaaggtggttgatggcaacgatcggagatggttgggatggtggttcgactagggttgatttgctgagagtaatggttgatttggggttttttttaagtaaagaaaaaataaaatgcaaataaaataaaataaaaatagaacttataaaataaaaatgaaataaaatatgtatttatttataataatgtatattgatatatgctatatatatttatgtaagtactaataatatatatattgtttttcagacctctgcatcaatgagactgatcttcaaactccagtatttttattaaaatcccagtactcccagtagttacagctttactacaatattgctttagcaattcatttttttatccatcactgcttcaaaatgctgaagcgatgctgatgcaatacagtaacaagtgggacttacgactttagcacacaaatccgcttcacaccatattgcagcagcctagttttttttctgtcattccataccttgctcctgcaataaaaattatcacatcattgcaaaaattcattagtaactaaggaaattgaaatcatatatatgtaattatataggtatgtatatatttatatatatnnnnntttttctttttttttccttttttttttcaaggggtggcatactccaaacttgttacatatatatatatatataactagatgtagtcttgttcctctgctcccggattgcccaaatgtgatacactaaagccatggcaacccgatgtccttcttcctcaagcctcttctaatgtgatggaggtctttgctcgatcaacctcccctccaatatagtattttagtcgctgcccattcactttaaatatcctcccggactgttcattcttgacattcatagctccaaaagggtacaccttgacgatggtgaatggtcccgaccaacgagactttaactttctcgaaaacaacttcagccttgaattgaataaaacttgcagcccctcttcaaatactttgtgttgaatcctcttgtcatgccatctcttggttttctccttgtacaacttgatattttcataggagaaaaacctcatctcttcaagctcatttagttgcagcattcgggcttctccaacaacttggagaccaaaattcagcttctttatagcccaaaaagctttgtgttccagctctaccggcaagtgacaagccttcccatacaccaatcgatatggagacatacccaaaggtgttttatatgctgttcggtaagcccaaagaaagtcatctagcctttgagaccaatccttgcgactaggattaacgaatttttcaagtacacccttaatctctcagttagaaagttcagcttgcccgttggtttgaggatgataagcagtggcaatcttgtgtttgacattgtatttagataacaaggcaacaagaattttattcacaaaatgagtaccttcatcggttattaatgcccgtggtgttccaaagcgagtgaaaacttgcttttggaggaacttca

SEQ ID NO: 120267 - DNA, 802 bp, Cannabis sativa
atacttttagttacggactttttagtcacaatataagaataataatttataattagtcacaataaaaattgtgactaaaagtaagattttttgtaatgaaaatcgaaaagattatcaccatttgatcaatacggataggcaccaggccaccaaaccagatggcgttgaccataggctagggcatctcacaaaaagatgcaagagactttcagcggcaaaccaagggacagttcatttgcaccaccaaattgtcgtaagttggcaaagcaccaccaaccgccctccaaagcatcatactctggtagagatggattttataattctagaaccacttccaaatcgtactcttatccgcaaatctcttcttttgattatccaagtaagcattcttgactgtgaaagtaccatttctgcttgatcattttgttgtgttttttctaatttctgtttgatcattaattcatttattatttcttgctcctccttattctattttattattttttattggtgcatttgcgcaccacaagtgcacgtacgcacgcacatttatctcatcattttaaattttttactaatttttgaagatatgggatcggtaaaaattaatggcacgtttactatacaatattttggaataaattaatcgagaaatgtaacggaataaatgaaaaataatcggaatcaatatttgtaatatgtagtttactaaagttttttagaaattgaatagttgtgatttatcttgtttactttattaggaaacgtaatcggaatgcttaaattgactaaattgcccttt

SEQ ID NO: 120268 - DNA, 1388 bp, Cannabis sativa
ctcttcaacctcatgaatttgctcaaccattcaccaattaagctttatgtcatgcaccttgtggaactcaccgaccgttcctcctccattatgatggtccgtcgatctcgcaagaatggttttcccttagttagccgcttatgccggggtggtcctaagttgcatgagtacccgaaccaaacagccgccgcatgtgaggcctacagcctagtccatagtcaagtcactgtacgccatacaacggctgtgtcagggctatcctctatgcacgaggacatacttcatgtggcgcgagccaaaagggtgtcgatgataattttgccgttcatggaggtttcgggaaatggctggggaggggtcaaccagcgggtactgaagacagcaccgtgctcggtcggcatgtttgtggaccgaagctttgatttaaggtcagagtgtaatgatcagctgcacgttgctcctgcatcaaccatttcctcaaagatgaagaaggtgtgcattttgttttgtggaggaccagatgatcggcaagctttggaactggctgggaggatggctcaccatgaacatgtcatggtgaccgtaatgagatgttatcatgagcatgatcatgaaagatacagttgcacaatctccatcgtcaacgaggataagccggagaaggtacctatttagctaagtatataaatatatatatataaaattttaataaaacataattgttttttatttatttaaagggtgcatgcataaaaagtttaagtaatttagataattataacttggaggactaaaacgttgaaaaggtttaccaaaaacttaaaaaatttataatatgtggtgcaattcattattacttattattatgattaatataaaccaggagcttgatgaggctgcacttaatgagttcaagaggaggaagtcggcagaagtagagttgactgagaaggtagtggataatgacataatagaaactgtgaggagcatagtgaacaatatggagtacgatctggtaattgttggaaaaggacactttccattgaatcagacttttgttgatgatcaagccgagttgggacccataggaggcgcattaacttctgctcaacatgaaattgcttgttcggtgcttgttgtacaacaccatgcggcaccactcttactgcccaatgaggatggaatcgtaatggtctaaattgaaataccatctcacttgtgtgaattgctatttctttctctcttgatattactcgaagtgcgactgaggttttaaataaaattcttcatcaattcaagaagattctgttggaaatttatagatgcttcaatagaaagatcaatgtcaaaatacaactcaaaatgaaaaatacaagagcaataatatt

SEQ ID NO: 120269 - DNA, 2309 bp, Cannabis sativa
  modified_base (2160)..(2166): a, c, t, g, unknown or other
aaattatttcggatgctaaaacagataagggtgcatcaatatatctattttaagggtgtgcattgtaaaattttccaaaattttattagttaacatcatattaataatttaaatatataaatcagaaaaataattttaaaaaataattaaaattttaatatatattttttttctttctttttcttctcttcttattcttttggcttcatggaaccacgatggttcccttcgcttccttccttccttccttcttcttctattatcaccatgccatccaattcccgaccgaagaccgtagaccgagatcccagaatcccaaaaccctagatctttggttctcatcactccgtcgatctctttgttctctctcttttgctggcaaggaatgcacatgcgaggagtgcacatgcagagctccttcccccaacgacaacctgcagagtctagggcagtgttcgtcgactcttgaaaccacacatctctctattcactttgtcttctctctctctctctctctctctacccctctttattctttttccttttcttttacgtcctgctcgaccccgaaccaccacctctcgccaccatggcttgagcgaacctccgatcaactttcagatctggtatttttgtatttatttattttaatcgattttgtattttggtttggagtaatttctatttcagatctagacttgacaatggaattaatcctactaaactcaaaaatataaataatttagcagtaaattaacttattaatatacattatgaatataagtttaccaatttctaatatatacctcaatgagagatgcccattttcgtgaaaaaaattaagcatttgcatttgttggtctcttcgtggaagccagcagtgatccagtatattttgtggagtactatcagtagtcattggtatcagttcttcttctacatttgcagtctttggaagtaaatctacctgaatcgtgtatacataaaattaagaaaacaagacaaaaaatttaatatacaaattttgaaaaattaatcaccgttttccccatatgtaagtatacaatatacaaaacaaatggtgactaattttgttgttattaagagcataacaaatatacgatatagttttgttctttattttttatttattaactatgttcattgaattatagtgtattctactataattagttatatatgctctaagttgtgagaaatttcaaatataaaatatccaagatagtttaaaacgccaattgcaaggttgcatttatttttcatcttttttaaaataaactattgtagtgtaaataaattaaatttagagttttttaaaaaatagttgaatgattgttactgttaagtattttttagtaaattagttgataaaatattttttaattgatatgcatttttattgagcaattaaattaattttattgagataaattcgtgctttagttgttttatttcttttatgaaaaaatttattcccagttggttgtaattatttacgaagtttttttagcaaattagtttataaataatttttaattaatgtgcattttaatgtataattaaattgattttattgtgataaattcgtgccctagttgttttatttcttttatgaaaaaatttattaccagttgattgtaattgtttaggaagcttttcttgcaagagaagaaattctttatttggaaagttgtttatttttaaaacatttgaattttctttttgttaattaatgatttcggttttgctttgattagagcagatcaaataaatttcatttgacaagtttaaagttcaaattcgtgatcttagtccaatttagaaagtttcttttttggtctagatatgttgctgcagagtccgattatgatgttgcaaattaggaaatattttaagaaagttttatactgggaaattatttttgtggctgtctccagggttgctatattctataaataggacctagagagcagccaaatgattttatctcttctagtctcatattttcatatctttctttgtgagaatagtgtttcatttttaaaaacttagtgttcaactaggttttggttttcttattatgatctcatactattcatagaatagtttgaagctaagctttgaacaagtgtgggtctnnnnnnnaagactttttcaagtctcattttgggaggaagggatagcataaatcttcgggagaagatttatttaagctttacttcggaaggaagtaagcacacatcaatagctgaagggagttcactacttggtgtgtttcagagatcaga

SEQ ID NO: 120270 - DNA, 749 bp, Cannabis sativa
  modified_base (188)..(199): a, c, t, g, unknown or other
tatattctatttatattctttaataaagagcgataactttaaaattacatttttctaaaaaaaacacatatgatttttctttttttctttattatctattttttttcttccaaatatcacataattttaaaaatgataactcacacatttttttcaaccacttactaattaaactctctctctctctnnnnnnnnnnnnatatatatatatatattaaactatttctcttagacctaacttatcatattattcagagaaaaattatataaaaggttaataatgttaactcattgcttgatttgttttttggtaaaccaaaataatagcgagttagtgagatacggtaatgacaacaggtaacagaagagtgttatatgaactatattaggtttctattataaaaagagattttgtaattacatgtcaagctgacctgtttgtacacctaaattatcatattattcaaataaaaattatatgaaaattagtaatgttaaatttttttaaacatccgcagcgaaccgcggatagttaactagttaactaatagaatgatccatactctctctttaattattacaaatttaattatatcctcctaatatattattaaataaaatatttaaaaagataatataataatttcataagtaaatactcttagggggcgtttggtacgagatgttcaaaataatttgattatagggaatattatgaaggagaatatgattatagggaaatgtgtaaa

SEQ ID NO: 120271 - DNA, 1083 bp, Cannabis sativa
caaaatcacgtaaaaaatcctgtgttcatactttcatttttatagcttttattatttttgtgtgaaatcaatattgtgaggctcaaatttagttaacgaaaatctgcgttaacaaaaccttaaccaagcagtgcaacaaggattttgggagccagtgggacattcaaatcgtgtcttttggacgacagtttgtggaaggatatagtcatctctgattaattttacttgatgttcagcaatggtactaaatacaaaaggtctcaacttaaaagcccagtctctcgggtcatcactctcaacgatacctttaagaagctcaattgccattactttcccaccacgcacctggtctaagttcttagactttggaacattcaacttagctctattgaattgaggcacgtgggtttcatatttatcaggaattcttctgcttctcttcatctgaggcataatcacttcaaaggtcgattactaacaacttaagagaggtcttttagccttggaaaggtaaatccaagttattacaaggaaattttggatagtggtttagaatttttaaggtctctacaagggagttcaatgatttttgggagttctaggatccttggagcaagcttaaaaaaggagaagaagatgcaaaatttttgaatgaaaaaatttgcgccgaaacaaaatctaccttgatggatgaagcgcacctgaagaactgatgaagatgaaaatccaagactctcagtcaaggacttgggtgcgggaaacaagaaggaaattatgaaaaatttgattcaaagctctcttatttataggtgagttaaataccttaatcctaatgcagttgggagtataataattttaaagcttaaaagaaaaagataaaaaagaaattatcttctcctattttctttgtaatttcaaaatttctatgaaaatcagaataggaattctaaatttaaaaggcaacaacaattccttatgttattaagattaaggtaaatctagagtttaaaaagaaaaagataaatgataggggtgttcatctgatccaatccgcacatttttagtcaaacaacatccaatccg

SEQ ID NO: 120272 - DNA, 1640 bp, Cannabis sativa
  modified_base (1377)..(1388): a, c, t, g, unknown or other
  modified_base (1435)..(1436): a, c, t, g, unknown or other
  modified_base (1498)..(1513): a, c, t, g, unknown or other
cccttatgtgtttattttcattattttagaaaattcatatttaggatgttaattcaacaaactttttagtaaatcttgatcttggtaaaatattcccaacagtactaacatccctggccggccaacagaatcctataggtcggccagggtaagcatataggctggccaagatctggcacaagctcgccgaccaaaaagtgacatttagacaaagggagcttttgtttgaccaaaggaacctaacctctacaaggaaacagtgtacaaagctgccctccacttggaaaaatctagcctccacatccaaaggttggtctcctcttggtaaagctatagtgacatgtaagatccagacagacgcatgactggccaggtcctacaggagcatggtcagaagaacctcaacctgcagaccttggctgattaagggggccaacattatctctaggtatcaatacaaccaaaagaggagtaggtcattacccgctaattaagggggccaacatttactttattgttcttgttgtataacacgtggcgaacatcaaatttataagaccttattgtcggttgatcacttttctaggtcaatagtttggggctttcactaagagtgtggattcgaatctcatcaagtgccatggttaacatgagaagaaccctagtcacactatctacatctttgggtctccctcaagacccacagactacaatcctaatgttcatgttccagccataactagaattttcatgaacacatcagatgtggtcaattctactgccatagcaggcaccacgaatctagccactatggttggctaggatggcataaacatccctatgtccagccagaaaggagcactccctccccgaggggagcaagtcacccaaagattagttttcaactaacaaggactgagagcgggtggaaacacccaaaacaacaatttgagaagtaaaattaatcacttcaaatagttggatatactaaactccagtaattagtgtgatctatcccatgtacaaataccagactcagagctggccggccttgaatataccctctcccaaggtatggtcggccaggctttcgccaatcttggttttcaaagaaggctaatccatcaggcccctacaacaatagatccttctgtgcaagcatagttggatcaaatacgagacatgcttaaaggcctagctggtccaaaaccttcagaacttgagctagacaggtcaaggggatcaccattctcggcatacattaatgccttacccttgcccaagttgaagattccaacttggaagatgtacacggggaaagaagatcacctagttgttaggttctgtgccctaaataatacccatttcaatataatnnnnnnnnnnnnttaataaagattagaaatcattttatgttgcatggtacacatgattnntttcatgattatatttaatatatataaaaattctattaagcccagaacatatgtatttgttnnnnnnnnnnnnnnnntcaacacagtggaatataatcgtgattatatgttcaaaagtttaattccttgatttgtctaaaaaactagatttagactggcatgataatcagcgataggtatacttacaccttggataagtattat

SEQ ID NO: 120273 - DNA, 1054 bp, Cannabis sativa
  modified_base (989)..(1014): a, c, t, g, unknown or other
tttcctttttttttttttttttacttttcaagttttcttcaaagagatctatctttagctctctttatttttttattttctgtgttttcatttaatttttaatttcgaaattattttttaatctcaatactaatatgttggactcaaaaaaaatatcactttgacctattatttaagattattattttaaaatatgaaaattatatattttttcatcaattaaaaaatatcaaaaccaacatttcaatttattttataatttttttacaaataattactaaaatttaaaattcaataaatattaactaacgttttatatatatgaatatttattatttaatatttgctattacactgactttgtggattatatttcttacctactcattataattgtttttttacaatctgaacggccataatcatgcaaaaattcttttgaaaaaaaaaaatcatgcaatttttttttgtaagatatatatattttattctatataaaatgtgactatgtaacagaaattttagtttaactgtatattttgatttcctacgttaactttaacagaatatcctattacttaatagaatattctttaccaattttataatattattacatatattttaaagtacaaattatataaaaattatatagatattttatataagaaaactttcatttaatttttaattttaaaattatttattgacattaatataaatatgttggactgaaaaaaaaaatattactctgacctattatttaaaattattattttaatatatgaaaattatatattttttcatcaatacaaaaaaaaaaaaaaaatcaaaactaacatttcaatttattttataattttcttcacaaataattaccaaaatttaaaatttatataaaattctataaatactaactaacttcatgttttatagtaaatattttacgatatcactaaagaagactgctgtaacaccctaactatctnnnnnnnnnnnnnnnnnnnnnnnnnntactgtgcagctcgttgctagtcaacgaggtttatggaaa

SEQ ID NO: 120274 - DNA, 4181 bp, Cannabis sativa
  modified_base (751)..(755): a, c, t, g, unknown or other
gagggagtctatttatgcataagctaattactttttatttttaagatctatctaatgaatcttatctctagatgtggtcccgtggactagtaataatcttcaaggattattgaaaccatgtaaaaaaaatcttgtgtgtttttacaattctgcactgtttattttttggtttattttagagttacatagttattttttgtagctacaaaataattatttcatcaccaattttattattctgtatttaattaaaatattaattaaataataaattggtaattttaaatacaaaatttcaattagtatcagagtttgtcactaaattcttagtgagatcttgagattattgtatttggtttaatttatttcatgtgagatgttgtttgtagaaggaagctccattactcgaccatccctgttgaatgactcgaattatccagattgaaaggtcaaaatgagagcattcatttagtcacaagatgcaaaggcttagagggttgcacttgtaggttggtctcgacctactgaaaattatgatgaaggtaatgctaaggtaaaacctaaactaaattagactactggagataaaaatttgtctagttataataataaagttttgcatataatttttaatagttttggtgaaggatttatcaaattaatatcatcttgtgaatctgcaaaggaagcgtgggaaatccttctaactcagtttgaaggtaccgctgatgtaaagagatcacgttttacnnnnntgcaaactagatttgatgaattgaaaatgtcaaaaactgaaactttgtctaatttttatgaaagattatatgatattactaatgattttcttggcttaggaaaaaaattagatgaatctgtgttggtttgaaaaattgttcatttgcttcctaacagatttgacacgaaattactcgcaatggatgaggtaaaagattttggcaaaatgaagattgaagtaatcatggtttcattaagaacttttgagttaaatcaacaaatcaagaaaaagagcaagcaaagagccttgagtgagaaaagaaaaggtattggctttaaattttctaaaaatgatatttctgattatgaaaatgatgatgaaatggccttgttgacaaaaaaaaaaaaaaaaaccaaaagtacatgaaaactattagaaataaaaagaatttctcaaaaacttcaagaggtaacaatcccactaaaccttttgttattaataaaaaaggtattcaatgcaaggaatgcaaagggtataatcatatttaatcgaaatgtgctaatactttgatgaaaaataaaaagggcttcaatgttacttggagtcatgattctgaaagtagtgaggatgaaaatgaaaaagttacattaacaagtattttgtcaagtgatttgctagaaaaaggaaaaatcaaatgtttgaacaatacattgactgatgacaatgacaaagaagttggatcagattcagatgagtcagaacttgatgagaactctttggcagaatcgtataaggtaatatttggtaagtggttagaaatctatgctgaaaattattctttagttaaaatcaataaagatttgtctcacaacatcagagagcttgaagagaaaaataaatgttgtgaatctgaattgatttcaaaaaattatttttataactaagaaacttgaaaatcttaaaacaaatatcaaaaatgctaaatccaagttccaatatttttgaaaaaattcaaaattttggtcaaacaagtcatgttggtttgggttttgttaaggcttaatctaaatcaaataccaaatttgttagattagaagattttgttcctagatgttctgtttctaccttgcatggttctattgattcaataaaatacattgttgatacagataaagcagcatggtaagatagataatttcaaagggaatagaagacgattcattcctatttactatttttgtggaataaaagctcatattcaacctaaatgtgttacaatgtaaaacatattttattataattattttagaaataaatatatttctcaaaaacaaaaataggatgtcaaaaataaatacttggttggttcattctgttttaaagctattgcttctcacatgtggtattttgatagtggttgtttcagacacatgacaggtgaaaaaaactatcttgacaacattagaccaatgcagtgtggagaagttacattcggtaacggtctagttaaaagagtgataggaatgggaactctcaactttgaaggtcttcctagacttaagaatgtcatgttggttgaagggctaaaggctaatcttctttgtattagccaaatttgtgatcagggttacactgttaactttgatagtaactattgttatatttataatatctgtgatgaaattttcttgcaaggactcagatctagttataattgttacactctcactacctatgctacttgtcattctattgatttatggcataaaaaacttagacatattaatttcaaaattttaaaaagattgaaaaatacagaaattgtttgaggattacctatattaggtaaaaaaaattgtgagaaaatgtggaccatgtcagtttggtaaacaatcaaaaatttctcacaaaagtgttcctaatgtcaatacttctagagtccttaaacttcttcacatggatttaatgggatcaatctaggttgaaatattgaatggtaagagatatatttttgtgtgtgttgatgatttttctcgttttttatgggtagattttttgagagaaaagtctaacacttttaaggctttcaaatctttatgtttgaaattaatagttgaaaaagattgcaacatcggtaagattgttcgtattaagaatgatcatggaaaagaatttgaaaatactgtatatgatgatttttgtaaatataatggtatttctcatgaatttttttctcctaaaactcctgaacaaaaaggaatagttgaaagaaagaactgaattctaacataaatggctagagtgatgttaaatagtaagaagcttactaggcatctttgggccgaagcaatcaacattgcttgctatactatcaatagagtgttcttacgtctaggtactcacaaaacaccatatgaaatctggaaaggtaagaaacaaaatgtaagtcattttcatgtatttagttgtgtttgttatattttgagaggtcgtgattacaatggaaaatttgatgaaaaaagtgatgaaggtattttattggatattccattaatagtagggcttatcatgtgtaaaacatgagaacccaatctgtaatagaatatgctaatgttgttgttgatgatctaaaggatttctctggtttttaataaaagaatagattgaagagttgtggaaacaccttttgtcgtgacaaaggaaattgacagagccacagaagttgttgctaagaatcaccgcaggactctgtagctacagatgttgttttctagaatcttcaatagaaaaaaaatttaagtgtccttcaaatatgatcactgatccaatctggaggaaactatcctcaagggttaaaaagaaccatccttctgatctcgtccttggtaacttggatgaaatcatggtaacaagaagaaaaattgctaatataatttaattcttgtgttttgtttcttctttagagttgaaaactattaaagaagccttgatggatgaagattggttcttagcaatgcaagaagagctacatcagttcattcaaaacaatgtgtggacaatgattccaagaccgctgtttgtgaatatcattagaacgaattggattttcaaaaacaagtgtgatgattttggcactatcatttgaaacaaagcaagattggttgcccaaggatacactcaggttgaggttattgattttgataaaacttttgctctggtagcaagactggaatccattaggttacttctttccatagcttatattcttggctttaaattgtatcaaatagatgttaaatctgccttcttgaatggtttttttttgaaagaagaagggtatgttgaacaacccaaagggtttgaggatcctcattatcacgatcatgtatataggttagacaaggctttgtatgttagactttttatttgggcttacattaaattt

SEQ ID NO: 120275 - DNA, 1293 bp, Cannabis sativa
acctttttatcctaaatcttgtgcttatactaaaattaattttatgtctaatttttattttacagggaggtacccaaattttgactgcttctggtgaccaaacggtaagtgatcaagttttaattcacctttttaaatcttgataattcacaattgaagtcggggttcgttagttaatgtacattgtatattatgaaaaagcgtaaggtatacacgacttttctaaaaaagggtacaatatttttattggaaatgaagaaagctaatactggggacaccaatatagtactcatgtataatctagctcgtgctactgataattcttcctcccagtcagctcatgtcttgctttcatctttctacagatgaaggtctgggatgttcaagaaaaaaaatgtactgctatgctgatgggtcacaccggaagtgtgaaatctatgtctcctcatccaatcaattgtggtgggcttacattttaatctacaaatcacacattcacacattttcatatcatccctattttgtgctattttgtttatttactaagaaagtagtgtttatcataacattacagagattattgcctctggttcgagagatggctctttcgctctatgggatatgagatgtaatgctaaatctttaagcaggcatgaggaaaggtgtatcaggtgatttttatcatacttaaaaccgagtaggcataacttttgtgctgtacagtttttctttttcttcctcaagtcattagttttaattcaattcaaattacttcagctcaactgcttcggtcaggggtgcccatctgtcctctcaagcaaagcgtgtcaggcgtcgcaaggtttgtggctaataatcttctcaataaattgctttatggtttttatttttgtttttactgagacttgtgcactttcagacaggttcaatgagcatcacatcagttctttatctaaaggatgggttttctattgccactgctggtgccgtggacaggtatgaaagaaatgttggcaattatacttgtaatttgatattttattttcagatgcgagtcacatcatttcaatggtttggagtgcttattaactttttatgtggtcatttcgctccacttcagcattgtgaaattttgggacaccagaaatctgaaaagtgcagtcacacagacatttcctcctctcaactcaatggagaaggttagtaaacattacattgatgctacttgagggcaagttgattgttttatgctctttaatccatgctgcaatgaaccaagtgtgtgtgtgtgtg

SEQ ID NO: 120276 - DNA, 1002 bp, Cannabis sativa
atgaatatgaaaaaaaattagactaaaaaattcttctagatgccgaaataaattaaaggtgcatcaatatattttttttaaggggtatattgtaaaatcatcctataatatatatatatatatataatttagcaaaaaaaaagaaatgtatatagatgcatatgttttttttttcctactccatgtgagtccgaccatttcaaaccttaagacttatagtcttactttgagggcgacatttttgttctctgttcattgtaactctatattataaataattcatattaattaattaattttttttggagaaaatattaattaattaatttaatcaaacttaaaaaaataaaattacttttttgtagatcttcatgtctcaacaatatatggttttgtcgcctcataattattttaatcaaactaaggaaaaaaagtaatccgataattttgtctcttattattctcgtgccaagaataattaaatttttgagtataaaatttagttattttttatcaagtaatttactttgtgatattgtgagaacttctctttaattagtttcagttaagcacaacatctaatgatcatgataaatttctatatatggttataatgattttttattatatcgtaataattaaaatcactcataaatttatgatacagatatttacatataacgtaggaacttctttcaacctagatagctcatcgtctaaccgaaaaacatgttttgtcaaactatcaactactaaagtcaacgaacaacatgagacaaatttactcctaaaaaattagacaataaaactataacgttctcaaacaacacacctaaagaactagaactctagcttgtatcactgaatactacatgacaactcaaagaatggtccccaaaatatttacaaaacaaaattagataaaaaatgaattaatcccctaacaatgatattaaaaattaataaaagaaattcttagttagaagataaaaacggccaaat

SEQ ID NO: 120277 - DNA, 1026 bp, Cannabis sativa
gccgaggtcaaggctgctctcaactccaaagaaattcaaaaacatgaagagaatggagaagattccaatggtaaaggtctctttgtcaaaggcaggtcagacaaaagggatcacaagaatttcaaacataaagccaataatcataaacccaattcaaaatatacattcaaggtagggaagaattgctactacggcaagaaggagggacattatagagatgaatgcaagttattaaaggccaaactcaacatagacaaatccaaagaaagaggaaaggcaagctttgttacaaatagatatgactttgctgatgcttgttgtttcaagtcaagaatctggccaataatgaattcttgactcagggtgttcatttcacatgacaccacacaaacacttgctcaataactttaaagaaatgacaagtgggaatgtactcttggaaaacaacaaatcctgcaagattaaaggcattggatctgtaatgttcattatgcatggtgaatgcaccaagattgtttaatatattagattttttcatgaattcaagagaagctagctagcaatcagtgaacttgcaacaaaagggtgtgtcatcaagatagaagactccaagaaggcttcaaagggatcttaaattgttatgaaaggaaacatcaggaatgacatttatgttttagatggtaagtctgttactgggaaggtagatgcagtagttaaagatagagttattgaactactcaggttgtggcatctaaggttgggccatgtgagtgaaagaggcttgcaagaacttgataaggaaggtttgtttggtgataaactaagaggtaaattagaattttgtgaagaacatgtctttggtaatagttgaagggcaaaactcccaactggcattcattgcacaaaagtcactagttccgctaattcctgaaccatcctgtctatcttgtttgtggacaacgagccctagtgagctctgactacaacaggagcctcatccttagacatcgaggttgggatgaatct

SEQ ID NO: 120278 - DNA, 1132 bp, Cannabis sativa
taacataaaaggaggcaatgggggtcctctaaccgctggaaagaggccccctctggatgtctgccagaaataaatctagggattttcctaggcaaacatcaggtgtaaatatcccaaagacagtgaaagtaggagaaaagggaaaagataaaaagagaaagggacataagtttgagagccatgtcatactcttaacaatccctaagcaaaaaagtatttgcaaaatgaaaaagaaaggaagtagcagaacacagatgaaaagatacgccattcgacgaccttcaccaaaatcattccaccgtaggaatcaaatacgactaaaagtttaccaaatactctgccctaacatgcaagtgaacaacaaaagtaaaatgtacacagaaaactacataaaggtaatgaactttaagttgatcaacggtagaatgcaaactggcaacaacggagaaatagcagcaagaaatctatggtttctgaaattttctttgagtttcttgggtcaaaatagcgagatatcaaaagtaacccaatgaagagaaaatgttggcttttatagaccataaggggtgcaaggcagctatgatgagacaccatcgtacggtgggaattgtaatcgatttgcattcaacaaatctaacgggtgagattaatgggtgctagggcagttgaaaacgtttgagtacttttctgaaactcaggttaaatgcgcccatttctcaataaacgggaagcgaatcgttgcctctaaaaggaaatcaatagtaatgatgaccagcataaatgcaggtcacgcgcttaaagcacgtgccattatatcaacaagcaaaccggaggcatcaaacaagcctcattcacccttcactgaacgaggcttggggggtaaatgatgccttggaattttcccaaaatacatggatgtagataaaggtgacacatggatatgaaagaaccatcactcacgaaaattaattaagtcttacacaaaagaggaacaccacagggaaggcgcctctcagagaagagcataggacacattcttactctccgggaggctagagccatgataaggcatgttcgggaggtaaagagattacctgaacaatcactttgcatttaatgtcgcatgggggaa

SEQ ID NO: 120279 - DNA, 1491 bp, Cannabis sativa
ccaaaaaagttcaggggacacgatttagtacatgtcaaagttcgggaggaaaaattgctattaacctaaaaaaatgtagtaaaaaataaatggaaagaaaaacaaaataaaaatgatagaaaaataaagtgtatagttaaaaaaataataagaaataaataaaatgataaataataataataaaaagaaaattaatgagaaaaattatataaatataaagatgtagggtactcaagtttacaaattaatatagacttctaaattaagttttttaaaagtataataaaataaataccataaaaaatataaataaatagaaatgccataaaatatgtacaaagaaaaatatctcatatatttatcaaacaattgtttaaaatctcataagtataatttcctctcatttatcaaattgaagaatctattttcgtatatcagtcgaacaataaaatactaaaaattatatatttatatattagtcaaacatttaatcaatagtacgtatataaataaccaagtagctagaagtgatgaaagtagttgtttcaatttgtgtgatgtacaagcttaattaattaatgtacaacatcaaaggttctttcaatatattatatatagctgctggttttggttgctttctcagagggaaacaacgtcgtttgttgcttagctgagtgtggatgatgcacaaccactactcctttgtatactttctcccaaaataactaaccatttctgcatgcatccaaaacttatatataaaacattatcaactactcctctatatatttaatattataataatgttaatatgtatatatattacatttagatttaattcccttattactaggctagaatgcttatcttgaataggaaatgcttattcctactagcatgatttttgttttcacaattctcatatttctaaggtttgaaaagataatattatatattagatgtctccaatctatttttttaattttaagatgaaatgacatgtgtatttttacatactcactatattttattaataaaattctattactctatgtagaaattataatttaaatttttatatatatgacaatgtatatataattatataatgtattctactaatttttaaaaatattggaataaataaaataatcagtatataaatatattttttattaattagttttttaaaataatatataactgtatcatacaactatattaatatgtatttagtttaaaaaggagtaataataacttttagactaatatattaattaattaaaaagaagtaataataattttttttaagtatataacatatttagttttgttgcctcgggtttttctcaaaatacgttgccttgaccacatatgactagggctgaacatgggttgggttggccatgttgaggctattttaatgacccaacccaataacatcggcctagaaattttcaacccaatgacatcctgaattttttctaaccc

SEQ ID NO: 120280 - DNA, 780 bp, Cannabis sativa
ttattattataattctgaaaaatttattatcattattatttttattttattatgattattatgatatttttgggacggttcttaaatcccaaccactcaatatttcctatttctatttttttcatttttaactagcaaataaattccttcaaaaactaaactttggttcataagaaaaaaaaaatattcctacgaaaactatcaaataagcttctggtgttataaattgataaaataattaacagacctttgaattttttacacacctaataattgtatcatttattccaaaaaaaaaagtagttattcgcccaagtatacctattacaaaaagttgaagaatccttttgtttttacattaattaaatttactattaaataaaatttaattcatatattttttataagtattatacccaaattatctttacatactcacatacataatttcaaatataataaattttttattttttttttggagatggagctacagatttgtgagaaagttagagaaaattttaattagaaaagattagagactatcgtaaggtgattggagtaaaacctggtagaataaataaaaaaaaaaggtaaatataatagattttgaaagacaaggtaaaattaaagtgatcaatttaaaaaaagtacgtgtaatttttataatgggtcaagtcaccattcttattaggaataattacataaggcaccaaaatttgtaaaatatttacatttttacgttcaaagaatatttttttacattattacggtttttca

SEQ ID NO: 120281 - DNA, 857 bp, Cannabis sativa
tttcacatcaacatgcctattagagggagaggcgaggccttccaaatttttgaagctctgggacaatctagcaaggcatgggtgacagtttcagtagggtttctacagattgaacaacaaggttgaggaatggttttcctaacaaacaaattaaggcctacaggaagtatgtggtggtaaactctccaagaaaagtttttaaccttaggttgaatattcaagttccaaagagttttccaccaagcagtgaagaaagaggagttagaggaggaaggaggaagagaagcattattagcaagatgataggttgatttgacagagaatgtacccgaagattcatgattccagactaaagtatcagccctttgagtgcccccgattggaactctaagaatagacaagactgaataatcatcaaagtactgagacaacctgtttctattccaaaagccctgctcattaataaagaagctaaccgtatcaacaggaggcaaatcattacttctcgggcaaggaaattttaattcaggaatccaagggtcctgaaaagtcctgatagagcaaccattaccaaccttccacaacaaacccctttttacaagatcactaccccataaaagactagaccaagtgtaagaaggagaatgccccagtttagcctcaaggaaaccattatgcctaaaatatttagcttttaaaatagtggtcaggagggaattgggatttgaaaaaatacgccaaacttgtttagcaagcatggcctaattatgggaaagaagggacctgaaacctagaccaccgaagaacttcgacgaacaaagagttcgccaatttttccaatgaattttagatccttt

SEQ ID NO: 120282 - DNA, 1401 bp, Cannabis sativa
tacttctaagataaaataaaggacacttatcaaagtatgtaaaaatacctcataggaagtaatagatacatgtcaaagtaaggtcttgttaagttgacacctaaaggtaaaagagttatataaatagagggggtagtgtaagagaagggggcctttttgaaccagggaaaaactaagaaaagatcaagaatgaacaggggtaaaaggttcccaaaaaataaaaaaattcttaactggctttttttttttacatgatcactttaattggttagagaaagaaagcacaacaaagaggagggttctctcccatctaagaaatttcattaagggcatccttagtcaatctatgaatcgcattataaaattatgatatgactaacataagagagagataccctaggaaaactagataataaaaccttaatgtctaaaaataaaacacattgggcccatcttagtcctaccaataaagcaagaacttctgcaaaatcatcaaaaatagataaaactagtaatttttttaaaagatattaaaataagtaatttagaatttatgccatgtataagtttaagagataataaattttaaaaataaatcgtaataaaaacttatgtcatattgaaactccttgatccttgaataaacaagtgagtgaagtaaaaaaaccacatataaaaatatatgaaattcaataatgtcacattctattgaatgaaaatatgaatttaagttctagtgcttgaaaaacattctagattataattgtagtaaataaaaaacttattttagaaatcccttaaactgagagtgtcactgctaccgcacattatttttaagacgagcccaaaaatactttaaacgtcaaactaccatttatgacaaccaccatacatagtacctaacaaatcatagtgacacataaataaactaccacaatccatacaacataatacacaacaactatgtaaaaaataaaataaataatttttatttatcatatgtaaaaataaaataaataaattttatccttgattaaataatttttggtcaaaacacatattatcatatgtttttttatcaaattcaaattgcctcacttatgaaaatctacaatccatcattttaatatggataatttggatttttgccacttaaattttgatatatacaaatcatgcttcttgaacttttcaggtcgttaaaaattctcctcgaactattaagatttttgaatttaaggatttttgtctaattttactaaaaaaatctgatgtggatgaaaatttagaggtcacaattcggtacatgttaaagttcaggaacaataattttgtaaatattaaaattcaggggtacaatgtagttagcggtgaacaaaatatgggccaaactattcaacc

SEQ ID NO: 120283 - DNA, 1441 bp, Cannabis sativa
ctgaggattaatccattcggactcggaaatctcaaccctagactctcccagtgcttctgtcgatatgttgtacctctcatctctttccctcaccagctccggcttcactatcccgggactcaccgcctgaggcgacatcatcagtgccggtgcacccattggaagcggatcacctaacacaaataaaaagacaaaaaaaattaaatactctattttaagcgtataaaataaaataaaaaaaaaaacgtataaattgtttaaaatttatttttgatcttttatttcaattttttaaaaaatttataaaattaatatatacacatcaaaatttgttaaagaaaaataaaaataaataatttacgacataaatattcaaatttaattctcaattataaataaatacttaaatttaatttttgataataataatctctaaattatatttatgaatttccgtaagtaaggtatcaagtcactatttatgttttacttttttataattaatatatttaaattaatttttaaataaaaatataataatctagttggactaattaataagactcacacgtaactattaacttgacgattataagtaaataaatatattaaaaattaaattgagtatatacactgtaactaaaaattaaatttaaatatttatattaaaaattattgaaaataagtatacatatcataatatttatttttaaatatttaaaaaaataataattagaatagtatttataggtaggaaggtacctctatcggtctgccacgtggaccagaatttgccataagttttggtcatattttccagctcagattttcctaacatttctggtacacgtggattcacccacagccctgatttcacctgcatttccattattaattatttatttatttactcaataaattaagaatattgctattaattaaccattactctaatcaccccatatcagaggtgtacatgtttaatcaacttatattatatttttattaactcaatataatgttaagatataaatatttaattataactatccaataaaataataataaaaaaatataaggtcaagttaactcgtttaaataagattaattaaaatttttgctctatcaaatgtaataaattatgtctctaaatttttagaattattaaaaatactttttaaattattgaagttgttgaatttaagaagttttatctaattttaataaaaaaaaatttaacatgtataaaaattcaaagagcaaatcaaagttcgacatatgatttagtgaatattaaagtctagggaatatagtttagtacataaataatcactcaaatagtaaaattgaatgaaaataataaaaattttaaaaaattttaacggtcaaaaaatttcagtaatataatttaatacaaagacaaaaatcttaattaaccttt

SEQ ID NO: 120284 - DNA, 1157 bp, Cannabis sativa
ggggggggggggcaatcgtgcgttaaaaaaatcagaaaaatatatattaaaattagttacgatatatatttgaaataaaaaatgatatttataaatatattattaattttagtataataattaagttaaattgtatatataataggggttaagaatttaaattctaccaaaaatacttttaattttgagttcaccactgatagtagggttaaataatttgaatattactaacatttgatggttgttaatttaataattattaaaaaaaatggagaacgacaataacaaattccaactaaaactctcaaatgtaaatatattaagggcaactattgtaagcattattgatattaaatacagtttaacactatttaaatatgatgttttatgattagttaactcgtgcctagcactctcttatgtgttaatattgttattggtccaattaagtatcggttcctatataatttaatataatagtttttagggagtatcgctagccaagcgcaacgcgacatgtcgagaaggtactaagtactactagtgcctaataacaatgctctatacgaaaatgttgcctttaagtttatttctattgtaagccatgtttttgtgcagtaattaattttagtgacctgtccaagaaatagatatttgaaattagttaagtgtttgtcttaaataatatttggtacgaccaattaattacctctgctcgggaaagaatatacaaatatacacaactctctagatataaatttaatatacatttttggaaattgttataaatattaaataataatgtcttcttatattcctttagagtctcatcaataatacttaatttgatgtattgttattaggtactgttatgtctagtactttttaaatgtgttttttataattagttagtaatattcgctaaaatttattatattaaattatatggatcatgatacttaattacatcaatagtaatatgacaccgataaaagtgctagtcttcgctgatattttttaacatttctcttaataatgattttagagaaatactaattaaaagatattattagtgtctagtactatctaagatgtaatactattgttagtgtaattatttagtattgagtctcaaatattttaatgtaataattttt

SEQ ID NO: 120285 - DNA, 1597 bp, Cannabis sativa
actttaccaatgccctagaaaggtcataccacttatccaagtgtaagtaaaactttatcgttgattatcacgtcagtgtaaatccagtgcacttataaatcacgggactgaaactttgaagcatataatcaaaattactttccgctgtgaagaaatcactataattatgaatgactacatgttctaaatttatcagaaattgtatattaaactataaagatgaaaataatatgtaaacttaaatgacttttaatgttctattgattgtaaataagattacattgaaatgggttttatttagggcctaaaatcccaacactaatgaatgcgagcaagccttccaagctctcaaacatcacctatccaggcctcccatcctatccaaaccaatagatggtgaagacttgatcatctatttcgctatcatcaagcatataacagtgctgctcttgtgcatgaagaagaagggatacaacactcgatattctacatcaataagcgtctcattggagctaagttaaggtatccccttattgagaagctagcctactacttggtactggcctccaaaaaaataagaccatacttccaagctcacacgattaaggtgttaactgaccaactagttaggcaagttttaatgaagtcagaagtatcagggcgcctacttaagtgggtagttaaactaggctagtttgagatcacttacaagcctcgcatagcaatcacaggacatgcattagcagacttcattgctgaatgcactagcctcaaagaagatgaccccatggtgtgtgaagactaggtccacgcgcctgagactactactcaggaggacactggaccttccctgaaaatttatgtagatggatcttccaatgagcacgattctggtgtagaactcatcttagtaactccagagggttttcaaactcacagtgctttgcggtttgagttcactacaataaacaaagaagcagagtatgaggtactcctagtaggactacgattaacactagcaatgaagaatgaatcactcgagatttatggtgattcaaaactagttgttaatcaaagtctaagggagtatcaagctcgaggatcaaacatgatagcatacttatgcaaagataaagacatattatacaatcttaagtactactcatctaacaagtaccacgtgattaaaatgcaaacatggattttgtaactatgctagctagtacaacagattcttatactctcagtgtagttcctatcgaatacctagcaaagtaaagaaattttgctaccttggtgagatttttcctttagtggatgtttgtagaattgtgttcatctatttatttgcaaaagaaattggatttattgattaattggtaatagctagaagacaaaggacatttagaaccaaaaacaatattcttaagttatatccttctctctctcgactgacgcaaaactaggggaaacacttgtggttttcatctaatttctagattttcatcaaagatttgaggaagttctaaccaaggtaagccctagaaactcttacttctagaattctctaagttctagttgagatcggaagagcggt

SEQ ID NO: 120286 - DNA, 1693 bp, Cannabis sativa
  modified_base (269)..(271): a, c, t, g, unknown or other
gctcttccgatctttaaatatttatttataactaaaagttaaactaaagtatatatattacaaattactctatttttatattgtattatcatcttgatatgctttgtgcattttttgctctaaaaatcattatttatatgagtcaactaactttttattcaccttaaatataatattttaaaattaattgttgatgaatgtggggatcacatctcattcatattatattctataactagatattaataaatttaattattattattatnnntattattattattatttgaaaatagaacaataagaggaaaaaacttaggtatagacccaaaagatcaacattatacatttaatattcttaatattgcataaccgcaatctcaacctaaatcataaagcaagtataaatcatttcagattcaacatttattatatgaatgagccattagaaatagtgataggaattaattgtgagaaagaagcacaacacaacactattaaaaataataatatgtacacaaataaattacacataaattaacttatgtagtaaattatttttgataaatatgactcattttaaataaatatattaattaaaattacttgacacataaaagcatagtatattttttaaaggtaccaaaaatctccacatcatttaaaaatatagtatattatttcttccatatcatttttgacactcttaatttttaaaaatataactaatagtataacactttttaaaaatactatagttatgatctcacacattatttttttaatatattatgtatttgagtaatttacgacgataatatttaagtttatcttttgattgcagattaatacctaagtaatttttttgacaataaaaatactttctgttacacttttataggtaactgaccattaataaattatgtataattttattttaattatgttttttttactaaattatgtttaatttcttatatatttaaatgattttttaaataacttttttaattttaagataatttttaaatacaaaatataaattaaagatgtggaccaatcaaagagtgacatgtggatactgacatgatacttacggccaagtacttacagatgcaacaaaagtttaacaggagatatttttaccgctaaaaaaattacttaggtattaataaacaactagaaaataaacttaggtattatcgccgcaaattattttatgtgctttaattataaatattgtcaaactatttatttacctttattttttttttttttaaagggatagcatcaatttcatgtagtgacatcaacacattatgatatcacctatttaagcctaatggtatagcatcattgggttttatcaaataagcaatctacataaataaatatcttccaaaatttaaccattggagatgctctccaatggagtgctaaatatgtggtgcattgttatttttagcactttttaataaaaagcttttccaattgtgtgttataagttgtgccaaatttgacacatgttaaaaattgggtcaaatttagtacaagatataacattgtgataaatttaacacacaataaatattatttttttaattacactttccattaattattaatgaaatactttaataaatacattttataatattgtcattagtaatttttaaaatatttaatttattgt

SEQ ID NO: 120287 - DNA, 4800 bp, Cannabis sativa
caattatataactaaatgaatatatacattattctaagtaaatatattacacaaatattttaaaattagtctaagtgtttataagttatctaattaaacatagaaaaataaaggaaaaaaattcttatacaattgttctacgcatcaggattgtgaatcactataagcaattgtgctttccactctcacacagtaacgaatcagtttttgcattatatgtaatattttccccaaattgtaaaagtaagtaaatattttattagtatatatattaaactttttgttaatataataaataagataattaataattaaaatttacagcttttgcatcagttatgtatctgctaggatttgcatgtgtggtgatgtcactgatgtatttcaatacataaaaactacattcttgtcttttagattgttttggacaattttctaatgatgtttagatacgtctcaatgaacacatttgactcccttaatttctcgtatgccctgttttaaaattatattaatatttcaattaattaacacataggacttagctaatgaaactatttattatataaagagtaattaaattattaccacctcaatatcgtatcaagttgttgaggaattttgcagccgcttatagggtctaaatgtataatctttcctggcgtagtgtcctctagcatccaatgtgcacttaaatatatatatatatatatatataggatagtgtacaaataattttaagtaataataaaagaaataatttttatttatctcttaagtaggttttaccaaatattccaaggaatgaaaaacatttggtattggcttttcatcattgataaccaacgagtcaacttatttgttgcatcctcacacttttgatgcttctctatatcaatttatagtgtactacaagaagctttgggtcataaaacttcaaaaactgttttatatcaagtaactcctcccaaatgcacctacattaaattgttaaatgttaaagttttataataatttcagcagaaattaatatatgaagttaattaggttacaaaaagtatacctcattccaaaaagcattcgttggtttccaatgaaatcacacaacgccacctgctgtacatcttccccagttatcatgatctaggtaacgaggctttatgaattcacgtggtaacaaaatttgaattgtaccatttttatcttttattctcaaaaagtcttcagccatgtatctgatcgacctgaagatttgtgtcataatatttggagtgaataacagatcaacacgatcaccgctgactttttgacaaggcatagggccttttctgttcgacataacactttttgatggtggttgagcaagtggaccctatacaaaataccataatagatcaaaatttgtatatataatttgtaatggtgatttttaagaaagaaattttacttctgatgttataattaaaatgtttaggccaatggaggattgtgttcatcgtttccataacatattttatccctgaagtggtactgtgatttttgcatcttcttgttgcagcatttctgaaattagaaagaacgcgtgcatgcgaatcatcatagagcatagtatgaactttgatcacactctctttttcataaaaataagtttttggccattctgttactgatattgtctgagcagacaaatattgtctcaactgccctttgttcagcaaaattgtacatgggggttgctcatacaggggaacatactcttgagcatgttcttgtggaacataaaggggaatatactcctaagtatgttcttgtgaaacatactcctgagcatgttcttcttgaacatacttctcatcatcatcttgctcttgtttgacaacaattttcttctttttaagggatctaatttatgcttttaatttatctatctctctctgtttctaagccacagcatgagaaactttccatttcttcctgtaaaaaattttaggtgccttcgcaataaacctgcaaattaataaatgaagttaatgaatatttattttgtgtaactaataaaataacataaatcaaacattagcatactcagcatccctaacacatctaggatgcactagtatccctaacgcttgcgtcaatatgtcatttggccatggaccttaacttgtccctggctaactttcttctccagttcaacctagtgcacatcatcaagaaattagtatatgatatatatgtatgtatattgactcattattatgttatcagtgattaatacttactatcttagtagcaatttctatgtcaaaatcagtgacaagtttcgtattcttttagtgagattcaatccaaatattatggtgtgggggatcttggacatcaagttcctttgtctgcattgttttacaaaacttaaatgagtactattacacatcttgttgtacattgctagaaatttattttattaattatcatttacttactacaatttctctgaggttaaccattccactttgaccactacggtgtctagactggtttttcattgatcattctctttggaatttactattttttttacaatacaaacataataaattagctactagtacttgtatttaaaattttatcttaacatataaaattagtacctgaaattgacgagttaggcgacttgcaacaaatttcagccaatcttcttgatctatttcaggatacttttctgtgatgttggccaactgttgcatatcattttcttctatacatggatttatgatgtcatgcgtaattctgttcttgaaatctttcattaaatcttcttgaactataaaacccgcctagttatgaagtaaacaaatattgttagagttacatttgaattaatcaaaaacacaaattaaaatactaacaaataaattcttacctttacgtcattccaaattttgttttttagtgctggcctgaccttcctccaatcttcataggaaatctcaatctgcctacgacatctaactcctaaagttgatatcaactggcaatagtttttgccatagtattgtcctttatcattgactaggaggggcaatctttttccttggtccatcaacttacttatattgtgtatctccgtttaaccttgcctaggtatcatcctaggacactctgctgctgggtctaattctatgtctgtacctgaacctgagtttgacatatctacaacagaaacgaacataaacacaagatagctataatagagtaactacataaatacaaatagagtaactacataaatacaagttagctaaaattgtgtttcacatatctaccaattagatacgttttcttttcatttttgtttaccttttgttgaatcacaattgacccatattccctttgatatcatttctaatgtatttgatattttcttctttaaggttaagatccatttccacaacttgttcatgcattggttgcccaaaaatgaagtcatcataacataaatcaacattctcctcatcctcttccttttctaagaacttcctttctagtgttgataaaataaaagatcatttatcatcaacccgatcagaaatgtaaaagtctatactatttggctagccatgatgaatggatcgttctggattcatctcttacttaaatcaaccaaagtaaaaccaaactcgtcaatttttaccccaatattgttgtcaacccaagaaaatttaaaaagtggaactcggaatgctaaataatttagttcctatatttcttcaataaccccataatacgtcatggtacctaaaacaaggttattatcttttgcacttgaaaaatgcatggtttctgcgatgatacttatgctactatgacctgtccagcatcaacttgactttgtatgaaaatgtttcccccttacaatgtaagcttcatgatttactacctcaaagtttgctccaagaataatacggctcaactcatcggatactccatgatttggttccttcaacttttctagaaaggtattctttaaccatctaatgaaagttttgcaatgctcatcgtcaacccatttttgtttatttttataatattttagaaacattgattgtaacaactccgtatgatcacttcaaatcataattatcaaattagaataaaaaggtaatgttgatcaagttattgttcattgtgactaattaaggttaatcaaaggaaaaacttgctgtaacctacgttatatatggctgaacctctgaattattgttcatcgcgaataattgagcttcatctaatccaatcttggacacattcaccattgttcctttccctccttaattctttatcaacctcatctagatcagttattaatttgctaattctatttgcctcaacttcggccatctactctaaacaaaactccacaacctcttcaaatacaaaacactcaaccatagatgctttcggtcgatagtggttacacacatgacttttaaatatcttcatatttatttcaaatagatacatatccatctcactcatactgatacgcacaaccttccttctctcactagatgaaccattaaatgtatcatgatgtcaaaaaatgatagcagaaaaaacttttcaaggttgcacaaggtttagactgcatgttcatgtaatgcatctaatttttcttcgtaacttattaaagaaaatgaaaacatgtgtcaatcacactcgaacttttttggaaagactgatccaattgcaattggaagcaaatgttgcattaacgcatgacaatcatgtgattttata

SEQ ID NO: 120288 - DNA, 870 bp, Cannabis sativa
agaggtaaaaatgatagactttaaaaaagagggtaaaaataaaagagggcaatataaaaagggtatagagtataatttcctcaaaaattaactctcaatttgggccagttataaataagaataagctctaaattgtaatttattacacatttttttaaggggataattacatgagacaccaatttttgtaaaaaactttactgttttgcgttcagaaattttttttcttatatttttacagtattctacaaaaaaacaagaaaatcatataaaagtaacaaaaaaaaatcaaaataacaacaaaacatccaaaacacataaaaaaataattcacaaataacaaaaattaacaataaaataacaagaatacaacataaaaatacaccaaaagaccgtattttatgtaaataaaatctaaaaaattgtaaaaatattgaaaattccgtacatactttatttttgtaattttttttttgttgtttttgtttttgtttttgttttttttaaattattcctgttttaagtcccgtattttgaaagtatacttttataaaaaaaaaaaattattgttgttacatttaaacctttttgagtttaaatttattttttctgatgtaactctatctaattataacttttctcaattagaatataatttgtttgatatcaaatctattcttagatacaaattttattgtataaagaaagtagtccttccattggaatatagcaatattgtcaaaatgagatccaacgaataaatttaaaattgcgattttttatcaaatatataagggattatttcataaatatacaaaaataataagaaaaaattataaaaaaaatagttgtacaaaattttaaatattt

SEQ ID NO: 120289 - DNA, 1186 bp, Cannabis sativa
  modified_base (704)..(706): a, c, t, g, unknown or other
  modified_base (1113)..(1118): a, c, t, g, unknown or other
ctcaagtaaaaagccccactccactcgatcataagccttgatcatgtccaacttaagtgccagaaacccctccctccccattttcttcctttttaaataatgcatcacctcgaaagagattaagatattatcagttatcagtcttccaggttagaaggcgctttgagttttagaaataacactaggaagaacaactttcaactgattggccagcaccttagacacaatcttataagccacattacacaaagcattggtcttagatcggttatgctttcgggtttagacttcttcgggataagcacaatattcgtttcttttagatgattaggatattcaccaaaagtaaagaagtgttgaactaattgaatgatatccttactaacgatatcccagaacttttgataaaacccaggattaaatccatcaggaccaggagatttattaggatgcatttgaaagagtgctttcagaacctcctcagcgccaaccgaaatagtcaaactcattcatagtagtcgacacccgattatccacacaagccgtgaccctaccgcaatcaatctccgaagttgtgaacaactctctaaaataatcttcaacggcaaccggtaatcaattttcccaatccacccaaatcccacttctatttttaagagacaatttctgattgtttatccgcctagtactcgcacaagcatgannntacttagtgttttggtcaccagattgcagcctcaaattgtttggatctctgcttccagaagacctccttctgggcgaggacttcgaacaaatgatttcgagcctccttgtacctgttaaccaaatcaacatcccttctatttttcaaaagcttgaggattttatgacaagtatttattcgttgcttgaaattactagtgatatccttcaatcatttggctaaagcagtactacaacatttgatttttgagctcaaagaattcgactcatgaccatcccaattatcatacacaatttggcgacacataggcccacgcacccaagtattttcaaaccaaattttcttgaaactaaccacttttctatataaattaagaatcaacaaaataggacaatgatcagaagcannnnnntctaaattttctaaccttgcatccggaaaaagatcattccaaccatgcgtgacgagagctctatccaa

SEQ ID NO: 120290 - DNA, 810 bp, Cannabis sativa
ctttgaagaagtccttcacctcagtagttaacttgttcaccaatggattgagcaaagcagagagaagagctcctccaaccaattcagccatatcaaatcttcagaactcagaaaaggattgcagaaaagattgaatgattgatgaacacaaagcaataattcaaaaacatatatgaatttgattattaggagtttgtttgatttaactaattatatgttaattgaatatgagtggtggtagctgcatggctaattataagtaattacatgtgccttcacgtctttgattatattatataaataaatagaagagatcaaactttgagatttgatcattttaattaatatacataaatttgatagtcaacactatttaattatataaataataacagctattgaatcaaagttttgcaatctttgatacaatatagatagatacacacacaaagatagcaatggtggttagaaacaagagcgagtgaagttagagaagcatcatccaagtttgtatgtagcccagcaaatccaaggttaagacagaagcctgacgattctgaacatgatttagagtaagagcttgtgttgtgtttacaatatgttcattcacattcacattcactttaaatggaagctattcatttgaaaggccttaacaagtagagtagagattaaccttttgatcaaattaataagcactccttcaccagcttgagaatggcatctttccctttgaagaagtccttgacctcataagtgtagaggtaaaaatttgcttaatatttatgatatttttgagaagtccaatat

SEQ ID NO: 120291 - DNA, 1548 bp, Cannabis sativa
acccataatataaatataaaccctaactatttaccattaggcttatcaggatattacaaatatcctgtatgagtttggtgccaattagaatggggcaacaccaaggtagttgcagaagtttttaaaatagtcttcgagagggagaattgccctagctcttatatgtttgaggctctaagcgcctattctggatggctcgttggtgctacaaccttcatctcgaactagatgtttagggggataacagctgaattcccccttagcaatagacctaatgcgacatccctactcatttctgatgccgcttgaccttaaaacgtccccaacataaggtctaatggaccagactttggattctattaactcagcttcaaaagtgactataggatcttaaggggtcttggatttacgagctttctgagccattttctcaaaatttaagtcacttggtgaaaagcaacagcaactagaggtaaaaatatgggcctcattaagggtataacaactaaattggaatgttcaggccaagctacttctcgtaaatacttacgcctaccctcaataacctcttacaaaaattgcttataatggctagagatttcttcttgactagatttaacgaggggattcctaattttctcatcatttatttcaagtatggtctagggtcttcgaggtttgtgcttatattctatggcatgaaattgagcacaaataaattctaaagattctgggattgtaaattcagggataaactggtacatgctaataaaaaataatgccccaattcctggaaaaacagagcacaaataaaacccaaaaactctgtgaatcttagaccttaaatttcctagccgtagaattatccaaacactcaaaattaaattacccaagcagcaaaacaatgcagacaagaaaaatacataccgagaaattaaaattgaaagcacagatgaaaaatcaacaataaagagtgtcacttactattttgatgagaaattctgggcagagaaaaacttcgcgattgaaatttcgaagatcgaagaattgggttttgatgattttaaagaaaatgagtacaatcagatgtaatctgcaggaaaaatgtgagagacagagagggcatgcaaatttaaaagagagggtggttgagatttttttgaagcttgaaggttcgtgggctgaaaatggcaaaatgatgcacaactttaaatttatacataaaaggtggtaactgtttgattaaatgaaatctgatcaaacagatgggaactatacaagaaaagaacaatctgagcattaaataagaaatgatgtacctcgaagttttaaaccgccaaattctaagcatgcaaattttaaatgggaaaaataccatcatacccttaaagacatttaaaaagtcctttttaattaaaaagcactttttagggagcaattattattaggcatgtcaaaaaaatctatttagttggagcgggtaggaactccgatcagacggatcacctctgatccgaaatattctgatacttattggatcttggatca

SEQ ID NO: 120292 - DNA, 1164 bp, Cannabis sativa
tcttcacccgccccacacagagggaaagttgtgtcttcaatgttcattctccgagagagaatagcacgagtcggcagggcaccagagagaatgctccaccaaagaactttatgcctctccagaatttttgagttccagagtttgttccatctagtaggggcaacaacacaatcaagatctctctctaaagcttgaagcaggtaagcggacttagtagtaaaatgaccattagcctcttttgtccaaatccacttgtctttcccgaggccactcggtctcccccctttaatgatgttggcaatagaatttgaatcaaagagggtttggagaagcgcaatgttccaatctccgttatcaagaataagatcagctactttagtcacccctccttggttgtggctattggccttagggtagaaccccttgccgtgaataatccacgggtcagtttagatatttgtttctttcccatcggaaatctttttacacgcacctttctttaggatatctttggacttcaccacattcttccaaaactaagagtccgaacttttaaaagagcactccaagaacggctttcctcttaggtacttagctttaagaactttacaacataaggattgctcatcattgaggagagcccaatcccacttggccaataacgcttgattcatttcaagagtcttccgaaaaccaagcccacctctagattttgggagccaaaggcggtcccaagccttcaagcataagcctcgatttccttgttcacaaccccaccagaagtctctgatcatcccatcaattttggatgctagtttttcttttaaagtttggtcatttgcatagtgtaaataggcatagctagcccaacagacttgataaaagtagcccgccccgcttttaagaaagatcttagcttccaaccatgaagctctgcgactaggttattaagaatgaagttaaagtccgcatccttattcttggattgaaatagtggtaggcccaggtagttaatgttggaagaggctagattgagtccaagatttttcataatgcctgttttcatgccctccgtgttattgttactgaaaaagatagatgtttttgttggaagttattttaccaggaacttagatctactcacacgtatgttgatttaacaac

SEQ ID NO: 120293 - DNA, 1374 bp, Cannabis sativa
tcataatgatgatcaattatagatcgacctaaatcttgagtaatcatgaactcttattcttgttaataggcttttcgattcactcgctaaagtttctcaaagaagatgactcttataacttttgttttggttttgggaatctaataatatgtatggtttggttgggaacatgatctacaattatagaatcttgactttttaacggatcgaatgttggttccctataaatgttaattttaaaacttaaaagttatgcatcaatttagactggaattaaattatactttcactagtgaattaatggtattagttccctttaagtattttcttttctaatcaatggtgttgtttctgatttgattacaccttaacagggtcttcaccaaggtaacctgctttctccatacttattcctatttttctcaaaagaattatcttgcctactacaatatgaagagtctattagtcaacttaaggggatggttgcctcttgtcgtacttctgctgtctcttttctactttttgtagatgatagtctcttattttgttaagctaacaatagatcatgtgaagttgctaagcgtgcctcagatatatataccataaagcttttgctcaacaactaaacacgcattaatttgtcatgtctttttcaccaaacatgtctgaggtagtgaagctctcattcaaaaaatattgggtatgccaatctgtgagtgtcatgaaaaatacgtaggcctccctccatattttgaacgtgataagaagcaattatttaataacatcaaggagcacatatggaagttgttgcatgcttagacaaataagcttttttttttccatcggagaaaaaaatgttcttttaaaagaagttattcaatcaaaacctgcttatgcaatgacctgtttcaaattttctactaacttttatcgacaaattaagtcagtgatgaaaaatttctggtggggaaccactacggataagaaaaagatttattgaaaaaaaatgaaagttcttttgcaaatctaaaatggagggatgaatgggttttcgagattttattcatttaaaccaaactttattagaaaaataagcgatgaattctttagaatccagattctcttctcagccgtctattgaagagaatatattttaccaataatagtttcatggaagggaaagtggcggtatgttacctttaacttggcacggtatttgttggggtcaagatttattattgaaaggaataaggtcgtgttagtgtttatgtcgtgaaaaatatgtaaagatatttttgattattaataagagatgaatattttgatacatgcatgaatgttaaattattaatattttatattaaataatttata

SEQ ID NO: 120294 - DNA, 1443 bp, Cannabis sativa
  modified_base (1390)..(1412): a, c, t, g, unknown or other
aaaatacatttagtcacaacatatataagaaaaataatttataattaattactatttttttacttttagtcacaaattttattatgactaaaaataaaattttttgtagtgagtagtaaataaaattaaaaaaataacaattaacaaaaaaaaaaaattgtaatttagctcatttatttttaagaataaattacatatatttaaaaacaaaatagcattatgaggacttgaatcattgcctttaagataaactcaagataacacaaccaccacacccaaaaatcttataattcttaacttgcttttaagttaaaatatatacaaataaaatttggagatctcctcattatattagggaattatataagggaataagaggattataataaaaatatttaaaatacaaataaaagtattacatcaagactccaagaaaatttgagaagaaacaacacatcaagatcattggcttgaccaaagctaggacctttgtcttaaaaattatttcttcttttaaagaaaactctagaaatgctcttatggattttcaagcctcatatgctgagtttagtgtctaaagatgaggatatcttcacaaggttctaattaaaataaagtgtattccacaaaattttcaagtgaacactacaaactctatttatagagttttcactctcatttgaacatgaatgaccaccataattatttggttgttagcaatgtttgggagtttatggacataaatgagtgatatgggggttatggtacctcttagccaagcataatgttcataaaacgttaaaaagtccatgctaaaatttggccaagcgacatgtcgcctgtagtataaaagttcaaaatttaataactagtaatcagttaccaatttttttttttcagcatttagcaaaataactccaaacagttcaaaacttctcacattaactttatataatttatacaccttatacattatagaaatagcttctcaacaactatatttctatagctaccattgaatcacattcaaatacaattagtaactcaatttattaattaagagtgataatatagagaggagttgcaaagttcgttattattatctttcaaggattttcaactatattttatgatttatgttcaaactatataacttcctatacctatataattcttttcttaacttttttttttcaatggggcaaccgccctctgttgtcttcatgtgagtgcgtcggtgagcgtggttagcaactacttaaacaatattaatttgtagtattataaattatttaatttttttttaaaaaaaaaataagttaaaagttaactaatatatacactattataaaaaaaagggtaaatagtagcataagtacccaaagttttnnnnnnnnnnnnnnnnnnnnnnnaatgtttatttttagcggtataagtacctaa

SEQ ID NO: 120295 - DNA, 953 bp, Cannabis sativa
tcttcaaaccggaaagtgaagaaccgttcgtatttgtgggtacggttcagggatctcggatcccggtgatctcggctttgtcagcgagagaattattgcacggtgggacatcagcgtggtttctggccgtagtggtggacaccactcggccagacaccactcctcctttaaacttagcctcacgcttaagttgaatgagctccatctcctgctcagaatgttcttgagcatgctgcacgactcctgcatctcccttcaacttagcctcacgcttcagttgaatgagctccttctcttgctcagctcccgcagcccgataagcactggacttcctcttactcgccttcataggctgaggaataaagtctactggataaagctcatactccacactgttggcctctaaggtcaacacagtgatatttcgagctgcatccagcagttggacaatcctctgagctctatccctaagagccagtgtaaggggtggacggtaatatattgggatctgttgaaattgagtataggtggtcttcataccttccacaaaataatactcattaacaaaacccccaagcttgctgacaaccttgtccacagtgcctgtcaaccactagaaatctagctgagagaagtagaagtaccccaacctgctttgtatgggggtagacttcaggttaaagaaccaactgaactcgtgcggagacggcacaccccatttctaaatggcgtagaggatgaacatggcagatagatacttaatgaccttgggagtaaactgggtcggacaaaggtgaaaataatcggccaccttcctgaagtacggtgcacaggcaacattgccccttgcctagggtgggcacccgaccaagcacacacccccttccacaggtttgtggctcggtaagttgaagaaggtgttcggttttgtgccctaaataaaaccctttaca

SEQ ID NO: 120296 - DNA, 3027 bp, Cannabis sativa
aaataaattatgtgaatcatgcaacataaaagcaattttttatctttattaattagtaaatctgattatattaaaatgtgttttatttagggcacaaaacccaacaaaatattctctctttagacacattgagtcattgttgttcaaaaactttttgtttaatttcacttatatcccttcttttgttttcttttttaacacgttagttttggttcgtaaactaattatgctcattctttttatggtaattaaaaataacaatatggtaaaattttatggaaacatgatgatataattaaagggtgaagcaagattaaacaactaacaacttattcaaacttataaggaggagggttcgtgataaactgatggtgatgcatggtatgtaatatatttcttttaaaatccaaacaattttttagtccacatgagaatcgcattgctcaatatcttgtggttaaaggaccacagaccaaatattaagccactcttagacattttatttggacttaaattaacttttattggtttaataaaagggaatttacaatattactgtataatgtgaaaacatttacaaaaatactcttttttttttttttacattttttactgtactaactttacaaaaatattgtgtttgaggtttaaaaattagaaaaatactatgtgttgacctcatttttagccaacgacaatgagtcttaataataagaaataaaggatatgatttagatataatatgaaaagataaataaggaacacaaggtttttaaagaggttcgaccccgagcagttcgctagtagcctactccccttgatttgtattgactcaagaacgaagaacacagtgttttctctcttaaagctcttacaataaaatttctgagtatacactcttagatctctttcaagtaattctttcgatccttttaccagtgagaatggatcactatttatagggctacatgcttgagggaaggtttcgattttgcttacaatgtctataattggtaagaacacatattacatatttagaatacacagcttgtgggatttggacagcttgccatatctctatgatacgaacccagatttataggaattgctcttctacttcacgatgcaaattctagaatttttaagtgtggatgtcttgctcagattgtccactgctcggttgagaagacctcgcccgtgcaggtatatgttgtgttctgctcgaaacatctctttctggaagatatggagaatcaagtccacttgtcaccagcatgtgatgccaggtcatagtgtgaaaattaggataacatttgctccccaagtctatatgggacttctgaagttgtgtgtagacttcatccgagctgactttacatttgaatgggtgacacgtgtggagtgcgtctgttcgtgattcgatgtgagtctgaccaggcgtcccttcagttttcggctaactaatgctctaattaattagtatcccgagacatgttttcctttacacgcctttgacggttatcttttcttggcacttgatggcatttgatttcccaatatttacttttgaggggaaatcgaagcatctaaagatttgaattgattaccccttttcacaagttagcttataaatagggctgaaacttttcataagttacttttaccattttcttcacgaaataaccttagagcaaaaaaggagttttctttcaagtctgtcgtggaatttctagcagaagtatccgaagagcttcatctgaacaacattttggcttcaaacagtgagtaagtttttgatctttttctcctctgactttgtatcttcaatttttttggtttccattgtagaaaatacgactgttcttgacttgttgttggagatatgtagaaaatctaggcttcaaattttgtaattttctctataacagttcgtacaacttcattatttacaaaattttggctttagtcttgtaatgttcgattctcaccttgctcattcaaagcttcgtgaaatttaacccttaacccaaaaattttaaactcctgggttatgacttaatctttacgcgttcttcgtctttttaatctattgaatagtcctggtcagcatatttgcctgttttttgttcgatatcccagccaaatagtcatctcgtgtattgtcttttgtagatgaaccctggtgagttttggggaggcaaacaccataatgagatggatctgcatcaacttctgtacgaggaccaacctcgtcttcgcgccagtccatcctcttcgagtgacacactttctagcttgagttttgaggattgggaagtgagtagtgaatgttctcctactccagctggacttataatgtccgacctggtgtagccgatacctttccattagggcgtccaagttctggtaactttggtattccaatagttgtccctgctgtaactgttgcacgacatacacaccagtatctgtccaagagaagaatgatggtccccacaaagtagacgatgcagagagttaatgcttctgatcctcacgtggcctagcatgccacactgccaagtgctgaacaggatctgcccgccgcagaggaggaagattatgaggatgacattgaggtctaggagatagaggagcaggacgacgtccgtcttgatagtcctttcgaggctgaggaggaaggagtggtcgggcctctacgctttggaggatataatgaggctggggagtcagtatccgagtagggtgacgtcttggttgagggggaagactatgtcatcgaggagtttaccgaagcggtcccccataagaggcaaggtgccttaggtgccagatgggtgtgtcctccatccaacataatcgaggtccgattgaggaattcggaaaaagctgggtacatgggtacacttgagtgctatctcccttctccaaatcacggggcaactaacccaaagaaagcgcaccgtgcctggtcgggtgcccacacgaagcaaggggcgatgctgcctttgttggaaattattttac

SEQ ID NO: 120297 - DNA, 682 bp, Cannabis sativa
ccatataatgctatagataatatgatatattttttttaagttagagatctttttacaacaaagtaaaaggcgtttaaaaaaataaaggtctttttaagtagggttgtaacttgtaagtacacatttaccgacctatatttaagatagaatggccttgctcatcacttattataaggctattttatttataacttttatcccttaaaattaggatttatgtattattgtactcttaaattttttagtcagttaataaacttaacatttgtgtaatatttagttgaaacaaaaatgtaagtttttctaattaactcaagaagaataatcatttcaattagatttagttactaaatctcattgctaactctataaatacacacattacagggttggccctagacataaataggctaggcctgcgcttagggtgcactcattttatgtgcccaaataaaaaaataccttttaaaaaatatataatttttttttaataatttttaaaaataccatttattttaatagtaaaagtctaaaataaaaatacttatctttattatttcaactgaggaccggccatggttacaattatgtaattatctttattattgggaaatttacatggtctacaaatttttaccatttttttacaaacatattatcagacagtattttttactttttt

SEQ ID NO: 120298 - DNA, 634 bp, Cannabis sativa
tctctctctctctctccttttgaaaatttgttttagttttttagaagaattgttgcaattgaagtgaattttggtgtgtgatgggctaagtttagtaagctatttgaggtattgatttcttctctttatggttttaatttttaaaaatctcattctagggttagagtttgtttgatattcatatgaaggtattcttgatgtggtttttatgtttattccatgaatgaaagcaaagagttatttgagtttgtatattctgagttaatgggtcaaatagcttggtgtttttggtgtcaatttggtaagtttgagcatgaaattctacttggttttcctatgagcttgatagcatgaattttgtgatttttgagcttagtaatatgcgtgtttaggtatatatattttgatgggacttatacctatttatgccttatattgggcttttgagccaatttgatatcagatgtgaaagttgagttgaaatggtgtatttttgaaatggtaaaaaaagtgagccaatttgatataagatgtgaaagtcgttgttgataatcgtttttcccaacgaagtattcccaacgactttttaccaacgaaatgtcctcattgatgcgcaatactgacgaaaacaggg

SEQ ID NO: 120299 - DNA, 2902 bp, Cannabis sativa
aaagtcacatttagtcacaaaaatattatgttgtgactaaaaagtttgtcactaaaggtaacaattttttgtagtgttatatagtgacaaatttttaattacaatacaaatttttttataattaaatgtgacttttaattacaataaaaattacttgtacttaaaacatagtattttgatacaaattgtcactaatttattttagccacaataaatattgtgactaaaaagacatttagtcacaaaaaattgtgatttttatgactaatatatttagtcataaattttttagtcataacataaaaataataatttataattaatcatatatttttttttagttacaaattttattgtgaataaaagtaaaaaattttgtagtaaattgtatagtaatactactgcattaattgttattgttcacacatgcatatatatatatgagagtatagatattttttttttgaataaatcatacaattttattaataacaatcaactaaaataaaagcctgcaatccaatcgagacatctccctcgcttgaaacacgactaagattaaaattttaaaaccagacaaataatcagctgcctaattcccaaatcgtttgacaaaaaaattaaaaataaaattaaatgaaaacgattgcagcatcacagtttaccttgataatatctatattcagtttcatctaccactcaaaagatagacacaatagtagaaatattattgctgcaggttcattcaacctcgtagcttgagcactcaactattgtgcaatgtatataaccacacaacaaccccagtcacaaagaccttgttattccactattttccaaccactaacatcgatttgatggtgagctatcgaataacaaaaaagaaccaacactaataaaaaaaaataaaaaaagaaccatgtcacacagacaagactaaaacactcatcaaaattatgttccaaaaagataaataaaacaatcaaaaccatgtcatagagacaagactaatcacagtagtaaaaatcgaatcacaatagcgaaatacaaccctgaccaagccgcacgctcagggaaagccaacaggcctagctggagaagaaaaacaacctcctgtagctaaatttaggaacaagaaaccctaaggtagcgtttggttacaaaatgaaaatgaaataggaatgatgatggtaataggaatagaatggaatttgaatttaattcttttgtttggtaaagactatgaaatcaataactgaacaagaattgtaatgtttggtatagtatggaatgaaatagaatttttattgttttgactaaaatgtcctttactattttaaaataatttttgttttataaaattattattatagtataaaagaaaatataatatatatttatgtatcactctcaaattatatttttttagatctaatgatcaaataataaaattatatataaatatttactttaattatttatttttatattaaatatttaaaacataaatattatttatataatttactcatcacacatcatttatctatatataattataataatagtgttgcttttctataattttgtaaaaaaagaaatatattaaatatattaaatatattattgtaatattaaatgttatatatatgttttaaaataaaaaaaaatatctatataattataattttaataatttgtatataaaagaagggtagattagggcaaaatatatataatttttagctggtatgaaatgagtttttcaagtcattttatttaaaaaaagtaattttctaatttatctgaattacaatttttattgaaatgagtttttcaatcacaataatcaaactaaaccttaaataatctttctttaagaataataattctattcctacactcattcatgtaaattaaatactacctattttttttttaatgttgtttaattctaacatagagttatcaatatatttttagatttaattaggtaatgtttacgtgttatattattaaggttagttagaaaatatttttttaattaagtatgaaatctaatatatactagtgtctttatatatataggcaccaaagtctatgcaaatattaattagctagttagtacatagtatagtactatactgtatgcatgcatgcatgcactttatatataaatatatagtatttttttcactttatatatgcaaattatcaattaattatattgactttgatcaacaattgatggtttgttttgcgttgtgtgatataatttataaatgataattacaatgatattttcgacaataatctctaattttatatttttaacttatttatatagatgatggatcttaattaatagctatctctgcaactaattaatcaagtaatttatatatatatatatatggttttatatatattagtacgttgagagagattattatatgtatgatgatatataattaataatggcatgtactgtaaatatatataggaaagaatagacagaactttcatgggtcagtagtctggacgtacttatagacagagtactgcatgcatatattatatcatttatcacatcactcaattaattaatatcctcttttaattgatcaattaatgaagtctacaaaattaatttaatccacttatataatttatgcaaatgttagggcttttcttcttattattctatatgattctgtttccactaaaactcatttaatatcttctttttatgtgcagcaaattaaattactctgggaaataaaaaagttttcagttttagacatatttttttagtatgtttaacactaatagacatgaaaaataaataaataaaggacagtggcggaaccagacaaaaacccgaggaggggccaaataggaa

SEQ ID NO: 120300 - DNA, 744 bp, Cannabis sativa
cactagcaaatcttcctcattaacggaatcctcatcacctccagccatagttgtttgagcccccataacatctttgccattaactacaccttccctttccacaataatgcctttattcttgcctaaactcatgggatcatgattaactctagagtcaaatcgatcaatgtccatgattctaggcgaaattgaatctcttccaacgtctttcatccgcctggaaaagctgccaccaccatcggctccaccgtccttcttccccgttcgaagccactaagcaccgatcaagtaattttgcttcttcaattgagctctcatcccaatcccataaggcttagcaatttgttccagaggttgatcaaaccttcttggacaaaatctttcggagttcccgattatgccacaagcaaaacaaaatgttggaagatgttcatattgaaaatttgcccatatccaatcaccattctctttacacaatttcattcttcttttcaatggtttgtctatgtcaatcgtagctctaacacgtagataatccctccataaaccattgaaatttttagaatccgacttaacaaaccttcccacatattcaccagcacttctcacaatattttccaacataaacccagtttttaagccatgaatctgaacccaaaaatcaatcttattcaaaacaacagattttggatcctctccttttttcagacgatgaaacacaagagggcacttgttgaacgtcca

SEQ ID NO: 120301 - DNA, 2452 bp, Cannabis sativa
attgatgttgaataaaatagattacattgaaatgaagttttatttagggcataaaacccaacaggaaaaagcctttcaaatactttaagatgtggaaagcacatccaaagtatgatattggcttgagggaagtatgggacccgaaaataaagggcactaagatgtttcaggtcatatctaaaatgaaacagtttaagatcggacttaaggagataaataaggagggattctcttatttacagagtgttgtcagtaggactaaactggaattggatacactgcagagccaaatacaacaacaaccacttgactctaatcttcacttgcaggagaaggaaatcagagagaaattgattagagtgcaaagtgactattcctccttgcagcagaaggctaaaatagcctggattcaaaatggggactgtaattctgctctttttcatgcttgtattaagcagaggttgagacagaatcgaatcctctcaattgggaaacaagatgggagcagagtgcatgatccagcactaatcactgaagctttcttagatttctatacaaggttgcttggcaccaaaatggagaatagaagacatgttgaagacaacatattagccagagggcctacggtgacacaagaacaggttgatttgttattataaggattttccaaagaggagttgaagaaggctgtgtacaacatacctgggaacaaatctccaggtcctgatggattctctagtagcttttttcaagataattgggaggttataggggatgacatatgtgaagttgtgctatcatttttggagccaggtaaaatccttaaagaaattaattctaccataatcactttggttctaaagattaaatgtcctaactctgttaaaacttttagaccaattgcttgttgcaatgtcatctataaggttgcaaccaagctcttgagttctagaatcagcaacatcctccctgatataatatctcactcccaaggtggttttattaaagggagttttataaggcataatatactgatttgtcaagatttggtgaggcattatggtagaaaagctaataagcctagttgcatgatcaaattggatctccaaaaagcctatgacactattaagtgggattttttttttggaggagatgctagcaaggcaaaattttcctagaaaattcatacagctaataatgaactatatcacaacccctaaattctctctcatatttaatggaacccttcatggtttctttgaagctaaaagaggacttagccagggggatcccatgtcccctatattatttgtattgggtttggaatatttgtctagactaatgaggaagattggagagaaagaggattttcactttcatgataggtgctttgagcttaaactgaatcatttagcatttgatgatgatgtgctacttttctgtcatggagatttcaaaagtactatatacatgttgtaggctctaaaactattttccctcacatctaggttgtaacctaatgcaagtaagactgcaatctattgcagtaacatgtagcaagattatgtgaatcagatattgcagttttctggttttatgaggcagttcctacgtttcacatacctggggatccccatctctgcaaagaaaatctctgggaaagaatgtgagttgttggctgaaagaatgacagctagaatcaagagttggagctcaaggaacctttcatttgttggaagaattactctaactaactcggttcttgttgttattcaagcttattggagccagatgatgatcatgccaaaaaaagtgctgaagtccatagaggtaatctgtagagcttttctatggaaaggtcaggctttatttcatggagctggggctgtagcttgggaaaatgttgtcaacctaaatctgcaggtggtttgggaataaaaaagttagaggaatggaacaaggcagccatatgtaagtatatttgggctatttcaaataagcaggaaagtttatggcttaggtgggtgcatagtgtatatatcaagaagcaggaggtggagctactctgcttctgtccatctagctggtactggaagaagatggtggctcttaaagatcagataaaaaacttagcagattgtgctaaattccagaggcaaagatacaccattgcagctagatacaagttgttcactcatcctcaaaactgactgttatggtgcaatgaaatatgggctagactgaacacaccaaaacacaatgtaatattgtggttggcaatgctcaatagattaaaaactaaggaccagttggtcaaatatggtatccaagtgaatgagaaatatagtctttgtggtgttcaaaatgaaaattgacagcatttatgttgggattttacgccctaaataaaactcattacaatccaatttgatttgttatcaataagagatta

SEQ ID NO: 120302 - DNA, 736 bp, Cannabis sativa
cactctttccctacacgacgctcttccgatctttgaaatgagttttatttagggcataaaacccaacaaatggtgccagtcagcacattaaccaaaccaaccaatcattgagaaagccaagcgcttccgtacgtgttcgacaggttgggaaccactcattatctaagaagcgatctaattggagaagaggagtagacgatcagcttgcacgccaaacgtgcagcccggaacccgtgctcaaattcccgcccagaaagatactgacgtagctcagattggctaaaatgtcgaacaagttagtctagctatgcaagcacatctaaatgaactaaagagtatgttccaagggatggccgatcagagaaataatgatcttgagttggaccgagcgtgcggaacccctttctcccccgagatcaatctcctggcgttgccccacaagtttaaaatgccaacttggaagatgtacaatggaaaagaagaccctctttcccacctcaagtatttcgagatgcaaaatggatctgcagggaatatgaggagacgtatgttgtagaatttttcctgctaccctctcggaagacgcccaacaatggtatttcaagctggcacctggaaagtttaactcacgaaaagctttctcctcaggattccatgcacaattctcctcctctcgccaactttcgctgcacctaggagacctggtcgaagtcaagcaaagaccaggcgagcctct

SEQ ID NO: 120303 - DNA, 1044 bp, Cannabis sativa
aaaaaaaaaaaaaaacccacaaacgataaggacaagttgtttcactttgtttgattcaaataacatccattttttttgattcaaataacatccatttatatataaatgttattgatgaatatgatcatatagcttgcttgctttcttttcaatcttcgtcttttgtcctatgtaatttcttagctatatactaaccgtattttttcttcaattcaattatgtgaattggtaaaagttattattagtgtttagtattttactgagggttatattattattaatgtagttaagcattattaaccaatcgtggagcactacttatacaagattagacactacactgatactcaatagcaatacttttaaattatatatatatatatattttttgggaagttgaagtgtcttaaatttgaatttcctttagagaaatgctaagaggatctctaatggtaatattttgaaaaatacttgatgaggtagaaagcttatgtggcaaaatatagggattctatactattagagataaaagaatgatattgttgaaatttacattgatgccacataatggcattgatgctatatttttttatacaataaaaaattaaaagtgtaatatatatataatagtttaataaagaaaaaaaattatatatataataataatgtgtgatattataattatagcattttaaaaaggtattataccattggagtgtttttaaaagtaaatgtgtcaaaaatgatgtgaaagaaaaataaaataaaatattatattttgaatgatgtggagatatagaacatctttaaagaatgctaccattggagatgctctaaaaggcatcaatatcgctattgctctaagtaagtatcggcttccatattgtttaatataataatttttagggactatcgttagtcaattgcaagacgacatatctaaaaatattagacagtattagtgcctaataacaatactcttttctttaccaacgagagagagtgatatatatatatatatattgagagagagagagagaggga

SEQ ID NO: 120304 - DNA, 1683 bp, Cannabis sativa
  modified_base (63)..(65): a, c, t, g, unknown or other
  modified_base (1632)..(1634): a, c, t, g, unknown or other
aggtattgatatcagacacaggtttgtgagtgatttttaattgcttaccaagttgacatggtnnncacttaccaacactttctttaccaagcttgggtaaattaaccttgaacacactactagaaaattggattttagtgacacacattgagtaactctaaaagtgtatagtgacacttcaatgcgcgtcactaatgaaggtgactggaaatacaatttttagtgacacttcacacgtgtcacaaaaaccttttgcattcattttctgcgtgtcactataggcgtataaagtcagattttgtcagactgaaaaggtaacagccacatacatgaagtgtcactatatcttttttttcttttttattaatttttttggagatatagtgacacacaaaaagtgccactatatcaaatatttttctaaaaaaaaataatttttaatttgatttaatatattaagaatttaaatgagtataattatcaatttaaattacaaattatataaagacattcagattttatttaagtaatataaatacatctaaattaataaccaaaaacatacacaaaaataattatattataattaattacagtaatacaatataagtgattcaaaaaaaacaatacaagtataatttaaatagaatacataaactacaaacccaaaaattggtatgtataagaaacaaaaaaaataatcaaatccacctcttcaatcccggccagaacactatcaaaaacccttaaatcgccaccatcaaaaataggaacaaagcttggccgttgttcgtcgttattctgataatttcacctatgcttgataaatcccccaaaacattcatctataagtcacttaaaaaatccctaaaaccagtttacattagaacaaaagaaagacaatttagccaaacaatcataccattagttttgtaacttactcgaacaaattctaatgccaagaaaactcccaaagccacaccaaatgctagatcaagaaatttaggctgaaaatcaaacatgaagagaacatatctaagaacaccacaaaaaagagagagaataacatcagaataaatacattaaaatcccttaatatcacacctggaagactagagttgggagaaatattaaaaaaaccataagatggtggtactttcgtagaagaatcctctcaattttgctattttttgagatgttatagaatctcacaacagaaacacatatgaaaagcacccagtagatgcataaagataatctttaaaggggttctaaaaagacaaatgaaaaaatcatgtcgaaaagaaaaacaccatgtaatgatttttttttaaaaataaagattatcaggatattctataacagcccataacaaaatgtgcttcaaacaactcctccttggtctttttttaaaaaaaagaaaaaactactaactcacaataacagaaaatgctcaatcttcttaattcattctctgtgcggcttccgtggcttttgtttttgcttgtgatttacttcccatgatgccaacaccccacttctttcggaactcatcaaatttgtcattaaagttggccttaatagcctcgaggattagagagtaatttgataaaaatgttggaaattattttnnnaggatcttagatctactcacacgtatgctgattaacaccctaaatatga

SEQ ID NO: 120305 - DNA, 842 bp, Cannabis sativa
  modified_base (41)..(73): a, c, t, g, unknown or other
acccttatgtttttatttcattgttttagagatattcatannnnnnnnnnnnnnnnnnnnnnnnnnnnnnnnnatttagatcctggtaaaatattcccatcacacacgacctgtaaaatgcacaaggaatggaactataagcttcgaagacttccgcaaaaggaaaaaaagtcagccaacttatcgaaaaaatatcgaaaaactatcgacaaaattattattccttaaaaatcaaaacccatacaaactatcgacaaaccattgataatagtcgataacctatcgacaaaaaaatctttcaaaaatgaaacgaaggaaaactgtcgaaaaaatattgacaatatgtcgataattttaaaatctagaaaaataaagcataagcaaaattattgacaaaacatcgatatcctatcgatatgcaataaaagaaatgaaagaaccagacaagctaacactatcgactgtcccaattgatatttaattgatttcctatttccagcaatatcctttcgataatttatcaatatgactgcaaaaaaatgtacaaaccacatcaacagatctaaacgttccaattatcaccagaaaaatcacaaattcaacaaaaaatgcaagaacaatcaacaacagacaaaacttcagattttattttaaaaaattaccttttgtgccatgatggtggcgtttgaccaagagaagaaatgtcaggttgagctgtggtggttggttgtgatgccgttcaggaggaaacgtcctctaggtggtggtgtttactcaatgagggagcacacgagggagaggaagagattaaagcgagagtgagagagagagagggagagaga

SEQ ID NO: 120306 - DNA, 668 bp, Cannabis sativa
ttacgcatcatttgctttgttcgagccatcatcttatggctggacagatactgtggtgaataccgagcaactgtggcgacagggacaacaatgggaatgcctaagttccccgaacttggccagccagtaggaaaagtctcagcaacacctagctgaacaacgtatgtccagttggatggtagatagcgcctccaacctttatttaaatccaaaatgaagcggtcgtatgcctcttcagcgatctgctcggagtagcagtggtgttgtatttcgggttctggagtagaagagtgttcactactcacctcccaatcttcagagcttgacttgaagagtccgttacttaaagaggacgaattggcacgaagacgagggtgatcctcatatagaagttgaagcaagtcctgttcaatttggtgtgttcgcttcccgttcgcttccccaaaaaaactcactagggttcatctacaaaagacaacatgcgagatgagtgtttggtcgagatatctaacaataaacagataaatatgacgaccaagagtactcaacatattaaaagaatgaaagtattcgaaaaataagtcaaaacccaaaagtttgaaatttttgggtttaaggcaaaatttcacgaagctttgaataagcaaggtgaaagacagacagtgtgt

SEQ ID NO: 120307 - DNA, 1916 bp, Cannabis sativa
tatttatagtgtttttctggagtgatccctaggaatgaattacttgtctttctgtgttagcttcataggggcacatattcccagcagatacaaaattgtagatacatgacctataccataggtatcttaggagttaggtggatataatcttttatcccttcttgattgatgtgattcctcataaagtagctgtcactagccttattgattatagcataatagctgaaaaaaggggggttacgccatctgtcatgtcgtttatggagattttaatacgtcttcccccatgtggcattaaatacaaggtgaccgttcaagagatctctgcacctcccagaactgctttagcatacctccggcctcccacagagtagaaatacttcttgtgctctcctccgggagacacctccctgagattcttccctttcgcctaggacttagacgattttttatgtgttgattctcacagatccacgtgtcagccttatccaggtccacgtataatgggagaaaataagggcaacagtagtatattaggggcgacatttatcgcccctaaaaatattgaaatctatacgttagaaaaaggcggggtttttctcgcccataatccttaaaagtcttaccagttttcattaaaacaaaaccccttgacccccttctcttcttcatttcttttttcttttctctttttttaaacacaaaaaaaaaaaagcttctctgaagtaaaagcccgaccctccgcctcccgcaccgacctctcgaccccactgaccgctcggacccacctcgccagacccccacctccgttgttttcttctttattttttttttttccttcacagttggaccggccgaattttcttcacagtaattatttgtgtattcatgtattttttctttaaatatctaatttttttttttatgtttttgaaaaatctgatttgtgtgtgttttttaatgcagagattatagtatgtttaaggaatataacggtaatttttatatttttatttttgtgtaatttttttgtgttatattggaatgaaatctgattatgtaaatgtatgaataatatttttgtagaaaattatataaaataaggttaataattttatttttcttttatgaaaatttgatttaatgttgaaaattatgaaaaaaaaaatgattctttttattattgttatttatatgtgtatgagtgtgtatatatatatgtatatgtatttgtgtattttttaacaagaatatatttgtatatatgtgtgtgcatttatatatgtatatatactagaaaaaagttaagtgcaaggcaaacatgtttagttttatattaggtgatatataatttaattataaataatataagaaataattatatataatttaattttgaattttttaatataaagtgattaagacaataaaaaataatataattattttgtgaagttatttttatgtatattaaatacatgtaaataattaattctcggatgaagaatattctgtcattctttataaaaatgtaacttctaatgcatataatatgttgtttgccaagtaataaaatgtttattctagtgtagtaatgttttaaatgttctgtctaaaaagaaacacacattatttcatatttgtgcatatatatttatatatatacttttaatgaaacgtattgtaaaagatacctagattgatgttccgtgcaatacacatataattagtttttttttttaattaggtgatattagatgcaatacatgtatgtttaattttttttaattagataatgtatttttttttaatttttaaatggggttgagatttttaatttaaaatataaaataaataataataaatttaaaagttaaaaatatttataatattttaaatttattttttttataaat

SEQ ID NO: 120308 - DNA, 2011 bp, Cannabis sativa
ggcctaaccagtcatgccaaataacaaataaatttttctggtttgtgaacttctcgttcacaataacatgagtttctattgtattatcaaaccaaaagcatactttgctaccaaacaccctttaaaagagtccttgcttccacctgaccctaagactacaacagctgctttataagatcccaagtagtttgcctctatgcaatatgaatttaatgctctaaaggctgcaaaaacatggactctagttccatatacttcagacatgcttgttattacttacacgtggattcacaaaataaaatttaaagttaatggcaccctggatagatacaaatccagattagttgcaagaaggtacttacaaacaccacgaattaattatgaggagaatttctcacgagtggtaaaacttgttacagtaagaacaatacttactcttgatgtgtcattctatttgggggtgaagcaacttgatgtgaataatgctttctttaatggggagttacaagaaattgtgtacatgcagcaaccacaaggctttgtcgaccctcagtatcctaatcatgtatgtctgctagaaaaggctctttatggccttaaacaacctcctagagcttagaatgacaagttgaaggacaagttactgaaaaggggttttaaactatcataatttgatactttcttattcatttatggatctggttctactcttatctacttgcaggtatatgtggatgatattttagcttcaagacctaatttcaactttattcaacaactaattttagatctcaacacttcctttgttcttgaagacttggagaaattgcattattttcttggtgtggaggtatatagaaatgtggctagcatgtacttaactcaaacaaaatacataattgatcttcttcttaaactgtatatggaaggtgccaaaatatgttctgatcccactagtactaccactaaactgtctctagctgagggagagtcgtttgaagatcctattctttatagaagtttattgcgagctttgcagtaccttactcttacaaggccaggtgttgtctttataataaacaaattgagtcagtttactaaagctcaaataactcttcattaggaagcttacaagtggcttctgagacatctcaaggaaccttgtttgatggtctacaccttaaacaagtaacatccattaacttgcacacaaattcaaatgcagattgggccaattgtgtcgatgaccgaagatccacatgatattatgtgctatttttaggaggtaaccttgtgtctttgtctgccaaaaagcaacaagtggttgctagatcgagtatagagagtgaatttagggcactaacaaatgttgatgttgaagtgaagtggttagtgtccttatttacttagctacatgttcctttgtctcattgtccaattgtgtggatggacaatcaaagtgctactgcataagctaccaatcagatgtttcatgctcggtccaaatatattgagatagatctccacttcgttagagatcgaattctagtcaaacaaatctcgagtcgttatgttccatcaatggatcaagtagctgatctacttaccaaatcactctctacagaccgattttcctatcctaaatctaaacttcaaatggctatgatcccttttcatttaatggggatgtaaaccaacctaactaaattgattatattgttatttctgttagtttgtttttgattgtagactcaaattttgagcatttttttttaaaaaaaaaagttagcttgtaatgctttactagtataaataaagttcagctcagttatatgagttaagcttctcatagaactcagctcatagcaactcttctctttgttcttgattctgttcttagttctgcctcacaaatctttaagctttgctttatgaatttttacaaatgaaaatatcaaaaaacaaaattattcttgaaaaaccgtatttttgcaaatgtcagttgtatata

SEQ ID NO: 120309 - DNA, 2277 bp, Cannabis sativa
  modified_base (126)..(127): a, c, t, g, unknown or other
  modified_base (1192)..(1192): a, c, t, g, unknown or other
  modified_base (2231)..(2236): a, c, t, g, unknown or other
ttttcgggttatttcggtttgtaatttttatcggtttttttggttcggtttgggcagtttacaaatttttttgtacagccctaatacgtatcgttaattactagtagactcacaaagagtgaggtnnatcccacaaggattgtagttaattactttaaaattaaacctttactactgtttggttatatcgaaattaagagaaaattaaaattagaaaactttaaagaaacaatgaaaataagaaccaagtaaatcaataaggaaattaacgatcattaaaagttagggctttcgatttcaattgcatctattgattatggtttaacatgattccatacctattactaaattctatgcaatagcaggtttcctaaggtaatttatagtcttctcagatatataaacctcaattacgtgcaattttttctactctcgtgataatttaaacatgtaaaaggtattaaacacataagccctataagatatccaaaccatacaggtactctcgtcctatatcaaaatttggttctatttcactgtagcataattgacactaacttctcaaattttgtattaaaatcataaacaactaattaatggccaggcaattaaaagtaattaagtacaaatgaaatagaatatatagaaattgaaggaaaattaaattatattaaaaccaaaaattaatgtcaatcaatatccacttaaaccttaatatactatttagctactcttgttcatcgtagcaatttcacacatattaatttagaatagaataagaaaatagagaagaaaagaatgctgaaaaccctattgagaaagccttcaatattgattttgctctctaaaattcgtactccttgattacttgttgaaaactattgaagtccgcttcttttacgccaaaaaatgataaaaaaaaaagataaaaacgccgaaaaacctatttttttttcaggattagaaggggcgggccgcagcatggatatcctatgtcgtgacataactcccctttatttgggcagtgtgctttctactgcgtcgactgatagtattttggctataactctctcgatattgctcagaattggacgattcaagatgttcctaaaagataaaagagagatatagaactttatgttttgactttctccaaaatatgatcagaacatagtctaatttaggcttgaantttcagctttattttcttgcataattttctctattttatagatcatctttttgtaagatttgaccaatttatacatttcaagtgtcgaaataaaaaattaacgaaaacaagcataattatattctgacaaatgataataaagaagaaaattaactttaaaaataacataaataataggctaaaaatatcctaacatttactttccacttaacttatcacaagacttaaaggtaaaatagccaagcaccacaatcccgtataaacccgatattccaaatattaaacttatgtaccccactataacaaagattttataccaactcatgtgactctaatggtcaaaccgtcgcatttctatcgttagctagctaaaatcacaaatatatatatatttttacatatgtcacatataatattactaaagtttaataaaatcttcagaattgagaaattataaccctaatacttatttattgaaaatagtagcataatataaaataatcacatttaatcataaaacctaattaattaatgctaattgccttactaatccctattctaagtatgcgaccattacatgtaggatttgttttcttcacagtattattttctcgaggagcaagctcattaggaatgttttcttcaatagcctcatttcctggttcaatccgggcatccaatcttgctaaagtttctcgcatttgaccagagaattcttcctattctgccaattgttttttttttttggttttaacaagttccttggccattcgaataacttcgggatctggctccaaataatactcttcattaattttttcatcacccttaggatcatcgtcttgatcttttgggtcaccttcttcatcgatgcagtttttaccaacatacttgtcattatgttgagctttcttggcaggacaactagttacctcctatgtatcaccaacaacacctgttttcgcgtgtgtagttggagggtctacatcatccatgagagttgtaacaccctaaataattaggcacattacccaaaatnnnnnngaaaccctaatcccctaattgggattactaatcaaaatagc

SEQ ID NO: 120310 - DNA, 1570 bp, Cannabis sativa
gtaatttttttttttttttatttaggttgtatatttgtttatttggaaagctagaagtatatttgtaataatattattatttttttattaaaataaaactgaaaaaaacttaaaaaattattaataacttatgatttttttaaaagaataacttatgattttaattgctatatatatatattaaattttgtttatgtataaagtttgattaattacgattaattaaatagaaaagaaactaaaatattaattttaatttaagccatcttcattggcatcaacgaattaataaataggaaaatttgtggcataaataccttaattgttaggtttgttgctgataagtacccaaattttaaaaatagtggcaaaaatactcaaattgtcacttccgttatttcataggtgcccattctgttaaccttttttagtgctaagtaaaaagacatgtgttgctctatcattggcctgaatttttttttttaaaaaacaaatcattaacatttattttaaattaaaaaaataacataaacaaaaaaaaaaatcttcaaaaactcaaaaatgaaaaataaaatgaaaatatgattaacaaaaggaaaataaataaataaaagtatatattttatattagaaaaaaaaaaaattatcgcactcctcgtcttcttcttaatcgcaccaataccaccatgatttcatatgaaatcaaatcacacactcatcataataaaaatcctcaatcaagaagaaatccccatgaaaaaatttttgcacttagaaactcatcaaaaaaattttgaataatactcttcgtctccttcaaaaagttttttttgcttggtaagcgcttatcatcaaatcgtgaaactcatccactaaaacattgtagatctataggagcttttgagctaaattaattgtgtttttttgtttcactggccttcaaagcttcgcccaaaagtcgaagtcgtcatcccataaattgaactcgttcgtctccaaagctctgccaaaagttgatgtccccgtcgagattcagtgctagaagaagaacatcgatgaatttagggttcgacgttttttgggtttttatgttttgaacattttctaagtttggctcttttgggatctggttggggaatgagagaatcgttgaagatgaatactttttttctctttcagatttagttatgtttttctaaattaaaatattaaattttaaaatgtaagtctttttatttgtaaaaatttaatttattacatttttaattaatttattttagcttgataaattttttttttacacaaaaagcaatttataaattttaaatttgttatattatttatttctaatttaaaatacatttgaatgatttttttaaaaaaaaaatacaagttggaccaataataaattgtcacatgtacttttacttagctttaacagaagttaacagaatgggtacctatgaaataaggaaagtgacaatttgagtatttttgccgctatttttaaaatttaggtatttattagcaacaaatttaacaatttgagtatttatgccgcaaatttccc

SEQ ID NO: 120311 - DNA, 1003 bp, Cannabis sativa
aaaaattatctctttttacactatatcaaaaatatgtttatacaaaaatatttaactcaaactcaattttttcttttcttatttttcttgctaaaaaaccttttttaaaattttttttttaaccaatggaacaatctcaactcatatgatataaaaatgagagatttttttaattagaacccattaaaaatacacccatatatatacatttatatgtttcgtttctttgaagaaagctaattgtttcaagttacaacactaacatacattatgtggttacaaattacaatgtgatttcatttctaagattttcatgattattattattttgatttctacaatttatttgttgcttttttgtcaagcaaggtcaaggtggccttacacgtgtcgaaacgtctaatgtgttagtgttcgtatttatgtatacgtgtcatatttagactataacagcttttctttacgctacaatattacacctctctttttttcacaatatattcttatctctcacgaatattgttgctttatttattttttatattttagtctcaaaatgttctcactttcatcaacatataataggacaaatattattttaaattatggattgaattttttattttattaaataataaaataaatattatatttttaaaatagtgtaaatgagattttaaattagttttttgttataataaaaattaatatataataacttaatttagaaatgttataactaaattttaatcaaattaattatatttttttttgtatttattcatgttaaaaattattatcttaattatattaaaaaattatcaaaaattaaattaagagtagttctatttatatcattttattttatcgtttatagatgtttcattcaataatttttgcaaaacacagtttaaaatggtatttataaaatggttaattatgatttttgcctcctgaactttgacatgtactaaatattgccccctgaacttttaagatcgtt

SEQ ID NO: 120312 - DNA, 2215 bp, Cannabis sativa
gggaaccatccctgagagagagctccgagacatggccagtatgtgcgttgcaagaaattccagcccatttgcagcaatcttcttcttcagaaatattccaagacaccaatttgttataatcatctaccaaatctttcttgaaactcagaagagcctgcttctctgtttcatggcagagtatgttggattctccaactccattgccaaaaacattccccataagagctacctctgccagaaacatgaaaaacataatcattgttgtaacatgaatagtcatatgaatagtcatggatactgataatgcagctatggattaattataatggcatgcatggaaggaggccttctttatatggacagacctttgttgtcatgttcttcattgccctttgaaagttttttaaaataataatatgggaagacagattatgattggttcctccatatatatatgtatatatatatatatatatatctttgttgaccactacacactatgcactaagggaactctacgtgttcttttagtgcttagagataaggaaaacaaaattttaaataaagttctaatatcttgttcaaatcataatgattcctactaatttacaccatatatataattttttttctcttgctatatatatatacattatattactgtatatattatatattataatatttgtgtaattaatcttttattttaatttttatattatttttgtaattaaattgtaatttattttggtttatctttcatttatatattaaatttctaagagtactatgtgtaatgtgcaagtctacttattaaatatatttagtacaagacattaaataaatattatttaaaacaaagaggattaaaatgatattttactaaataaataaattcaatcatgtcaacaatatttttttttttgaattaaagaaaatgtcaaaactaggttaatgaatgtgagggttagaagaagtaatacattctagaagtaaaatagaaagcacacacatgtcactacatggctagaattatgtatataatacacataattgatattaaatttatttatatatatatttatatatatattttatgatcaatgactccagccatgatgaaagatatgaaatatagttttatggtagtctttcatcttttcaaagttaatttttcaatacgaaaaatattcaatttctagagtaagggcatgcattttgtcctttagtactataagttagttaaatggtgataaaatatttattaagaaaaagatgtacccctcatgactcaattcttataactttactctgcttctaatatatacaagttagaaaagtactattgaactttttattaaaaaatttttagttattctttgtgtattcaaaaacacatgttggagtatcttttttaatttttttacaacaatatttgttataattataattttatttttataaatttttaaaaaagtttaaatataccacagtgttaaaaataagtagttttttttttttaaacacactgtaaattggaatatgaagaactttatttttagtattataaattattcaaaatttttaagagattgtaagtgtattttacaactatcattatatattttttcgaacttcaaaattgattaagaaattgtaatatatatatatatatatatattgatatagaggatgaagaaggtaaagaacttcacttatagtatagctagtaagcaatagagaaagaagaaaagaagaacacaggagcaagaaatgaacgaaagcattaactcaaatgagttagctacgtcctttgtttatagtaacaaagattacacagtcaagatccaaagcagaaaatgtaacataacaactcgagcctaatacactaaccaacttaactactaactgacagaacaattggttaagtaactgttatctaattttttgtaccttgacgtggcaatgagactagacgtgcatgtcctatacattttcgatacctaggcgaagggaagtattcctagcagcccggctatggttgcttaacatctgtaacactctgatacccgaataggatggttgagaaaatgcctaaccaagatacatacatactgttgaattaaacctccacttacactgatattggacttaatacaaaggacagaaaaggaaatacatgcaaaatccctaagttgaccttcggtctctaaaa

SEQ ID NO: 120313 - DNA, 1135 bp, Cannabis sativa
taaagtagtatttccaaccaaaagcgtagttactagtgtctcatataattttggtaaaggtgccaacaaaataatagtttgactcttcatcaattttgacctatacacttaacaattaatttatacacttattaaatctatttatatgatccctgacatctcctccttaaaccatttttaattcatataattgcttctttaaatataatttatttgttcatataaagctattctaactttttccataacttatacagacatgtttcattcaatacactatactttaattcaagagccaaacttaaacaaatagtgcttatcgctttcccctgtaactcctcctaattttcaatagtcatactctcaagcttctttctttgtagtgcctttaggagcccttgttgtaccaacacatcgtttaccatgctctctcataaattgaaattattcttcccattaaaaagttcgatctcaaattttttggaagacaccatctttgacattgttggtgtagatctaaacctcagctctaataccactttttgggaaaaataataaatttcaagcacaacgaaataacaaagaaacgaagcaaaataatttaagtttggtaaaattaccgaacctacaaagagagatatatttcacttatcacttcaaaattacatatgctctctatctcaatctatccacctaaatctcaatacaccttttgcttcttcacacacatacctctctcacacacacaaaacacatatttataaagttacaaaacttggtcatcaagacaacttgtggaccaaaacattccaagacttccttaagaagactcatcaaaacttagccactaagactttctttttccacaattaataattacccaaaaataattgcaatttaacaaatataaataaataatttgagtcaagcttcaacacctaaagagtcgtggcccttggccaattggcgaaacactctctctataagaaagccaagaattgcaactttccctagagagtcacagtgctcgggtatttttttgtagtttcctttgggaaatttgaatttctatgcttacattagggaataattttttccctaaacttaaaatagggaatattggtaaaatgggata

SEQ ID NO: 120314 - DNA, 728 bp, Cannabis sativa
gcatcacgagtgttcatcaaaaaaatctttgacacctaagtttttacgtcgaactagtaagtggcttctgttttactaatttttttttatttcttttcgtttttcttcctttatatatgtttcttttatttttgcatcattttttgctagagagggttttatatgaatttttaagtaataatttagggctaggaattttaaggttatctaattcacaagtcttgggttttaacgatgctctatttttctaagaattatttttggggaattatacttggtgacaataccatgtaccattctaatctagaacttgcacacccagaccctttagaatcaaattaccctcaatttcaggcagtaatttgttaacctaaaattcataaaccccagtccttactcaaaattaatgatgaaaaaaattagaaaacacactattaggattaaccaagaagaggtatccatctactataggtgattcttacatggagtcataaagggtaggtgtcgttgtcttcgagaagcagcttggcttgagtcacctaacttagcaaatattcccttagcaaagtcattatttttaccacaagtcactgtttgttttcaaccaagtgatttggattttgacattatggtgttagattttgtgccctaaattaaactctatttcaatgtaatcttgaatattcatttatcaataaagaaaaagatttatttcattacttgtttaa

SEQ ID NO: 120315 - DNA, 4737 bp, Cannabis sativa
catctagattattatcactcagatcacagagcacttttggtacaaataaaagatgaaatggactagcaaaaaggttccaaaaagagaaaaagattcaaatttgagaatctttggcttggcgacgaagaatgtaagagtctaataaagaattgttggaggtctgaggaaaatacatcactaatatcaactattaagaatatacaacaatgtgctttacacctggatacttggcataagaataagcatggatctttatttagagaaattaaagatacacagaaaaaagtagttcaaatgcacaatttgcaaagtaaaggatgttccagcgaaggatctttgctattagaaaataaacttaacgatctgttattaaaggaagaggtcttctgaaaacaaagggcaatggtccaatggttacagactggtgatcagaataccaaatatttttacaaaaaggcaaatgcacgaaagaagaataatacaattcgaggtatttattattacaatttacatatagagtgaagtatagtatggataagaaatttaacataaatgcaattgaacatagtttaatgtgctttaattagggcaaatagtatatcgaacatttcaactagtgattttttcaagagtggttcagaataggttgatgcaaggtgttttcaaattcaggtcttaatgtgactgtttatgtataataattgtgttaatatgctttttaatataggttgtgttctaaaaggtgttatgctttaacctaaatagataacaactgatggatacaagtcacataattgattgtatgtacatatagagaaactgacgcaagttggaatatgagatgttagctcataagtactttacaaatcaattgtatgaggttaatttggttttgtattttaggtttattaaatgaagatcatatatggtatacaagtaacgatactataggtgatatcacaaagaaatactattctgcactctttacgtctatgatgccaacagatgaaagtattgaggagttgttacaagttgttgagaaagtggtcacagatgacatgaatgaagcattgacgaagatttttacattggaagaagttgaacaagcagttttttgttatgcctgcgaataaaagccttggtccagatggaatgagtgccttgttttatcaagaacactgggatattgttggccctttagtttctaaagcagtgttagattgtttatcaggggtaacggatatgcatagtattaatgattcgctaattacgcttattcctaaagtccaacaacctgaattgattagtgaattcagaccgattagtttatgtaatatgttataaaataatttctaaagttctaataaatagactcaaaaacctgctaccactactaataagtgagaactaaagtgcttttgttttaggaagactcataacagatagtgttcttattgcctatgagtgccttcataatttaaaagcaagaaaagtcagaaggtgatgctatgtagcaatgaagttagatatgagaaaaacctatgatagagtggaatggaagtttattgagaagatgatgataaaaatgggtttcaagtctgaatgggtgaatacaatattgaaatgtgtttcatctgtttgtgattcttttcaaatcaatgattctattcatggtgaagtcatgccaactagaggattaagataaggggatccactttctccctatcttttcttaatatgcgcataaggactctcatcgctaattaatcaggcagaatcaaagaaagaaatttttgggctgaaagttgcaagagaagctcccagtataagtcatctattttttgctgatgatagtctacttttcttagacgcaaacgagggttcgttgcacacaattcaacaaatttttgcattatatttgcgatgctcgggacaggtaatgttcgatttagtaatttataagttctttataccaaattagttgatatatttatttagtaaataacctagcccttttgggatgtttaatcttattgtattgccttaacttatgtgttctttattttgattcaggttataaattttcacagatctattttgtattttttcgtctaatactcctgagaaaacgcgaaaactttctgcaaaagcattgaatatgagaataacacaggctatagaaaagtatttgggccttcccatgataggaggaaaaaataaaagtgcaatattcagaccaatcaaggataaaatatggaaaaagctaaatgaatatcaggccaaaattttctcgcaagggggtaaggagattctagtgaaagctgtaatccaagcaatgcctacttatcaaatggcatgttttaaattccagaaggcatcggggaagagatagaaagattaataacaagatattggtggggctcagttgacaataaacaaaaagtttattggaggacttggcataagatttgtaaaccaaagagtgtggagggttaggctttagacgatttagccagtataatcaatctcttttggccaagcaagcatggcgcatcttaataaacccatcattaatattggcacaagtaatgaaagaaagatattttagagtatctaacatcttagaggaagacaagggttcatatccatcatcaacatggcaaggaatcttatggggaagagatttattattataagggctacgacggagtatcgacaatggtacgaatactaggacttttagagacccttagtttcctagacctccttcgtttcttccaagttcacgtcctgcgtatgaggtggcaagagtgtcagattttattgagtcaccagggaaacagaatactatagtagtaaatcaatattttaatgtatctgatgtagaatgtattttttctataccattaagttggtttaatcacgaggattcgtggttctggcactatacgaatcatggtagttattctatgttattctattgggagtgggtataacctagcaatgactatagataattttcgaccttcatctgctagtgatttgttttcattatggtggaaacaattttgggggatgaaaattccaagaaaaatcttacattttgcatggaggggttatcatgaaattctacgtacgtgtaatggtttgtttagacggaatatcgcctctagtacttcttgtcagctatgtggttttggaggagagtcgaatactcatgcaatttactggtgtctcgtttcacaaggcatttggaatcttctggaattctcttttctacatgaagtaaaagaagagattaatttcaagaatattttactttatgcttttgaaatggtggaaagagatgcctttgcaaaattaattatgtgttcctgggcaatatgaatagaaatgaataagattactcattgccaacagataagacaaccacaaaatgtgcttgagtggataattaattattatgattcgatcatttcaatgaaggatcgccccaaaaaaagtctccaaactaatggaaggaatagaggagctttggctagaaattttagaggtgcacaagaagagagtttacactctaaacttatggtggatgcaacagtattgagcaccacgagcttagttggattaggtgttgttatatagtcagaagataatatagtccacgctgcattgagcaaacccctaaaaggttagtcatagtgggtacattaaaaagattattcgttgcttatttcattattgtgataatttccaaaagaaacttttgatatcctaggtatgggagtgttgcagggtttatttgttgttactagattacatatcaaatttttttttaggtcttagggtcttagtaagggatagtaatcctaatatgattatgaagtaaaatacaagggttaagttgctactagccaaagggtaattcctttggctagttctagtatttttatatggggatctagttgtttagtttttggtgtttgattgattttgatcagcttgatgattttctaattaaaatttttctggtttttttatattttttcaggtggaatttcagtattacaagctgaaactttagccctgttggttggttttaattgagcttatatgtgtggtcttccaattcatgcagtttattcagattcgttagctttggtgatggccatcaacaacgggaagatataattcaacgagttaggaaaattgtttggagatgttatagctttattgtctaaatttccaagggcaattttgtcccatgtggctcgctttaaaaatttaacggcccatggcttggcaaagcatgctttgcggttagatgatgagctatcctagttcgaggaggtttcagtgccggtggcggacgtctgcgttgtaaattcatgagtgattctaatcacttgtcaaaaaaaaaagatacactgtcaaagtgtatcagttggtacttgagtgtagttggcacaacctatcatcaggttgttttgggagatgttggttactttattttcttttcacgacaacaatgaatcaaacaatttttcttttcatgagtgattctaatcactttgtcaaaaaaaaaaaacaaagatatattgtcaaactgtatcagttggtacttgagtgtacgtagttggtgttggaaattgttgtgctccaatagaaataccaaaccaacaagattacaactctatgataaataatacaaaggacaaaatcacagattaaataatg

SEQ ID NO: 120316 - DNA, 581 bp, Cannabis sativa
  modified_base (40)..(40): a, c, t, g, unknown or other
  modified_base (526)..(552): a, c, t, g, unknown or other
attaaatgttatttctgatatatattaataagtaaatctnattatattgaaatgagtttaatttagggcgtaaaacccaacagtttggtgggtcatggttgattacgggtgatgtgaactttatcttaagtagctctcagcctgttgggtctaaaggaaaggatcagttcctcccctttatatatgatttaaatatttgtcatgctttaattgatttgcctatgaaaggggacaacttaacttgggataaccataaagatggtgaaaaccacatcaagtcggcccttgacaaggctttggtcaatgagggttggttgagtttgttccctaagtggatggcacaactactcttcacttgcaattctgatcattgacccatttgttttagtatggtgaacccgaatcttagaagtaaaaggcagttctggtttgaggcttggtggaccagggatccttgtagctctttgattgtggattttgcttgggcatctactgttgggttgtgtgccctaaataaaactcattnnnnnnnnnnnnnnnnnnnnnnnnnnnaaagataagaaataacattttatgttgca

SEQ ID NO: 120317 - DNA, 2122 bp, Cannabis sativa
aagagtagtgggttatcttaaattgaaaaaaaaattatatttttgtaaactttgacaaaaaaatatatatataaatgaaagaaaaaaaaaaacccaaaaaaagttatttgttgcagttttttcttaaccaattacatttatttgagatggaatttactatttaggaaaatatcacattgtgttatgtgttgaaacatatttatattttaggtgcatatattattactcaaaacaatatatatataattattaatatgatttttaaaaaaatggaaaaatgaataatacaaatagtttatctaattcccctaaggagtattttatgtaatgtatttgcaatagtcaatcatttgatggacgattatacactccttcataacaggttatttattgactatttccaaccatgtgagttgggcctaactaacctaaccaaatagagtgaacaaaaatacaagtaatatctattatctagttattaaaaaaacaacaattatttctatgaggagatgaaggccttagtcttaccctacaaaatttgggtaagggaacatctattgggaccctctcaaaagaacaacattgatgatagtcttagttggagaccatgataaataaatcattgtcctaaagtgacctccatcacttcctcaaaatggggctatatggagttgataaattagggcacaatcccataaaataataacaataataataataaaaaaaaagagtattgttattagacactagtgatgcttaacaccttctagacaaatttttttgtgattgtttagcgatattctctaaaattatcatattaaattatatgagatctcatacttaatagtactaattaataacgatagtaatacgtaagaaggtactactaaacatcacctattcacctgtgcctttaacatttctctaatgaaaagcttcaatacttctatttttttttttaaataatgatactaataaaataaataaaaaccctttcacatgccccatgacagtccttaaaatcatgcaactttctcctttaaaagtaagactttccttgatttttatggcagcatcttagggacaaatagataccaacaactcagcttgttgggggccccttttgctttggtggcacccgtgagaacaaaatcttaataattattactaccctagctactcattcttacacaaatcttctctttctactattttattctaacaaatttactgtaaagtttgtaaagtacttagtgactctacttatattactaatggtttagctccaatcccactattctaaggtttcaaaaagaccaacaattaggattttataagtgattcaatttttacacttattaaagttttgttttttttgggtgcatgccttggttgggtaaactgtaaagtaaacccatcacttgaagaagaagaagaagaaataaaaaaaagctttaaattactctttctttacttgcatgaggaccaccgcaccactcattcttttatattttacaattgttataaagaagtaaacgttatattagcaaatgtataaaaataattattttttgtaaaagaaaaaacacaatttcatccccatactcattgtaatcagtagattttatctttgtttgcatcatatatatatatatatttatagataaatgtcatttcgaatttttgtgttttgtaaaaattattgttttaatattttattttattaaatgataaatcaattcttttttaaaaaaatagtataaaataatatactaagtttaattttaatcaatttattttttaacaaaactaatatgaagttagtttttaagtcgaaaaataaataataaaaaatatatataatcatgtattattattatattctattttcgagaaaataatcttagagtattattttgtattatttaaaaaaataattattatttaacaaaatagagagtgcgattaataacttttgttaaatacataatccaaaataatatttaaccaacttatcaattaggtattttattattttaaaaaataaatatatatctttatatattaaaagtgcctatctaacaatatttcttggtttaacatttcttggtttaacagaata

SEQ ID NO: 120318 - DNA, 1121 bp, Cannabis sativa
ggtgaattttgttattgtagaaagtgattcgcaagtgatgatgaagtttcttaatggagtgaagtccagatgagaaattgaaaactattctgatcactgtttaagcacttcttctttatttgtgagttgtgtcttttctaatgtagttcaatcttgtcattttttggtttataatataaaccagtaaacttttacccacaattaatatgattagttagatgtcaaaaccatacctttagactttttttgtaatgaccgaagtctaactttttttaatattaacgccttttcttaaaaaaaacaatcttctcaattcattgaaatatgtcaaggctccatatatatactttggtaaaacaaatgagagctaaatggtatagaaagaagcactaactactaatttagaagaactaatatgaagttaataacactatgatgatgtgtttgcttttggtatttcctcctctaatggcatactaatctcttcttttgaaactcccaacagaaatctgacacatcaaaacaatttaattatcattacttaaaacaaaaattacatgaacaaaaaagttgataatgttacctattaccttaataggtgtagcagcaattaattgttctgcaattccaccaaaagctttgcctgtatctaaattgttcaataaaactttcaatgatgttgacataccataattctcaggactatgatttgaatcaagttcaactgtccaagacacagaaataattctaaaaacaccctacaacaaatcaaaaatcaattgtgattaaaatcaacaaaataaaaaattgtgattttctttaataaagaaaggaaatattaatgtacctcatatctgttgatttggttatagtcaccacaattaataatgtctactaaagatgttgagccattagcagaaaaaacagtcaataatgaatttggttcataattcgtagcaaaatctttcattatgctcacaacgtcctaaaaattacacaaaatattcaataattaagttatattttttcaattagaacaaaaattaatcattattattattattattagggtgaataccattttggatcttgtgttttgcaaaagttacagattggaccct

SEQ ID NO: 120319 - DNA, 614 bp, Cannabis sativa
  modified_base (27)..(41): a, c, t, g, unknown or other
aggatgttaatgaaacatacatggtannnnnnnnnnnnnnnggtaaaatatttccaacagttcagtctcttgttgattctttaatcatcgctggttctaacataagtgaacaagatgttgttcttcagatcttgaatggtttcggtgctgagtttgatccttgtcacttgatgaagctcaagccttacttatgtcacatgagagtcgtttagagcatcacagctccatgatagacatttctatgaaacttcaggccaatcttatagttggaaacaacaaatctaactcagggagatacattccaccacctgctcgaggaaataacacagaatcatcttcaagaaatgctgacagggggattcttgtggttcttttgtgtttcaaaccagactaatttgtcaattgtgcctcaaaagtggacacactgctgctgtgtgtcattatcgctttgacaaaaattttgccccttcaaaatgtacccctcctcgtgcctatctcactgaacttgacatggataatgacaatcaggtacaatacactactatcttgcctgatttggggatgacaatctctggtttgttgatacaggggcaaatgtgttggaattattttac

SEQ ID NO: 120320 - DNA, 1099 bp, Cannabis sativa
gggcataaaacccaacaggccaatggttaaaacatagtttaatctcatggtttaattataaatcaaaatagaaagaatttctatgagggataagtcgaaaagtctagccataaatgtttcccattgttttggtttaatttgatattctacagttctctacctctctcaaccatgaatctatccaattacaagaaagcaaaatcaacaattcaaatatccacttaccacaactacaaagttatccctaagtgaaaatagaacaaagaaacattcaatttcaatgtaaaacctaaaacattgagaatctaaataccaataatgcgtacatcaactacgcagtgaagaaaaaatagtgcagttctacctagacaccgtcattaagtagacattgttatgctgtataaacatgtaagatgcgcaattatcgtaatcaactgatctttcatgcacgaaaaaaaattatgtgcccgtgagggttatgttgaatggcagactttggcttttgtgaagaaaggctaaagttgcactaaaatttaagcaatggttccacgttaaagacaaaaggtggtgtgaaaacccactgggtgtgtcatagacttcaagcagtctttctcttccacgaaggagggttgaagacatatcgaacccccagtggtctttcatgcacggaaaaaaacttaagtgcctgtgagaaccatgttaaattttttcgcagactttagcttccgtgaagaaaggtttatgatgcactaaaattcaagcaatagtttcacgttaaggacaaaatgttgtgtgaaaccccacttgacgtgtgatagacttcaagtagtccttctttttcgggaaggagggatgaagacgtatcgaaccccctatgatctttcacgcacggaaaaaaattatgtgcacgcgagaaccatgttgaattttatggcagactttagcttctatcaagaaaggcaaaagtcacactaaaattcaagcaatagtttcacgttaaagatcaaatgtggtgtgaaactgttggaatatattttaccaggatttagatttactaacaagtatgtttcattagcatcctaaatatgaattctctaaa

SEQ ID NO: 120321 - DNA, 997 bp, Cannabis sativa
  modified_base (930)..(938): a, c, t, g, unknown or other
actttttgccggcgagtttgttcgccggaaaaactacgtgtaagtcgtcggcatagcttttccttcgcctttgctcgccagaaaagctaccggcaatagcttgtcggcatatcatcttttaagggtaaggttaatagatgcgtcggtaaaagtatttacactggcgcagttgtttgctggcacaaagacaccgccggtaataggtctgccggctgatgtgcctctacgacattttgccggggagttaagatgcggacagaacttttggtgggaatttagcaccaaataccaatttggcgcctactatttgttggtgaatttttgcactggcaaaacaaaattaaaaaattaaaaaaaattaaatgcaaatacgtttgccagcgagtactgcgctgatgaaacgtaataaaaaatataaaaaatagaaaaaaaaatacttttgcgagcgcacacaaaaaaaaaatatacaatataaaaataatacttttgccagcgcatttcaagcgccggtaaaagtattcacaaatttttttaaaaaaattataaatatgaaatatataaattaaatttaaattaaaagtcaaaataatatttaatataatatcaaatatattataaaactgaaatttatactgttattacaaaattatattaaacaccataaattatgtaacaccctaactaccataggtgtgttagcgtgatttttaacgtactggtgcagctcgttgctaatcaacgaggttattgaaaatcgtgataaattaaaattttgctttttaaataaacataacatattatacttataaaattctgggatcctgtttacaaaatacaattacaaaagtttactattcatttaaaaaagatttgtcgcccaccgactggttaacaaaagccttgatgtcccgagaatcgtacgctccaggnnnnnnnnncccgacatgtacaatcttcacccgttcgttctcatggctcctcagctttagccttgccc

SEQ ID NO: 120322 - DNA, 2096 bp, Cannabis sativa
  modified_base (1481)..(1487): a, c, t, g, unknown or other
attgccacatttcagcaagaaactttaaaacacaaaatccaaaaaccaaaattcagagtgttattgaagttcaaagaaaattataattaacatttgaaattttgaagtaaacatttaacatgtacagtacagggggtaagaataaaactaaatgagcataaaattgaagaagaaattaaaaacctgttctataagatggttggcctgagactctaactctgcccaaaactaaattctttgaatgcatctcctgtaatcatgtccaaacaaactatgaagacaaatttcacacattgtttagtccaaaaaattatcaacaaatagcaggacaaaacctattaccgtataaaatgtgtaacctagtttaacttgacaaagaaaaaccataatcatgatatcagaataagtgtttggggggcaagaaatgcaaccgattcaaaactccattgcagggcagagaaagttgcttaaaatttatagaaaaatataataactagagagatgacatatgggatatttctgtaattgtactgtcaattagcgaattctttgtttaaattatattttctcggcattcaaagaggacacaaaggggacaactgagtgtaaaaaagggtttctttcttttcattttactattaaggggaaaattaccttgtagattacatttgaagctgataaaggaagaaggaaggtgaaggagactaagcacgccattgaagcttttgcatttgcttcaatttaatcaaagctcaccactcagtgcacagttttactttaacggttctctaaggtgatgattctaggagccatgtcgcagagggaaagaaaaagaaaaaagaacaaaactattacggcatcgttttacgaaattcctgagtgttatttaaaataattatatcatgaattaatttttacaagaaaataataataatatcatgtattatagtacctttcaggtttgttatattgttatggcctatatggtgtttacatatttggtatgttgtattttatttaaatataaattaggtattttttttttttggataagtataaattaggtactttatatgtttaataatacttatttggtaatatattttaaaaatttagtactttaaatttaaattgttttgataaaattttatcaatataataaaactatctaaaatgtcatgaattttgaatttaaatttaattatttaattacatataactgagaactatttggttaaattaataaaattttcttgattaggttttactttaaggtaccaaatttaggggtgttcatccaatcaaatttatactattttactcatagtgcatcctatctgcactatgtgcagatttcatgggatctaatccaatccgcaaaagtgcaaattagatcggtttttttgaattttttactttttaatattaaattattcaatatttattaaaaaaaaaattcacataactagtaacaaaataannnnnnntattgttattttatgtctctaataataaataaaatagcaaataacaaattcaaatgaaaaaatatgtataaaaaatgtttaattttattttaaattgtatgtaaaaaaaaaattatatatatatgaatggaatatacatttcatctattaagttttgaaatataattgtattacatgtgttaaatttttaaattactatcttctttacattaaaatgttaattgtatataaaatttttaattttttttataaatatgtgtagattggactagatttgatcagttacttttacataacaatcaacatccaatccgcggaagtgcggattttgaattttctaatccaatcaaatctgcacaagtgcgcatatccgcacttcactggttggattagattggatcgtgcagattggattggatcagctattttatgaacacccctaccaaatacgacaaaaataaggtaccaattaagtattattaaaaatactaaaaataacaaatatgtttttcgtgaaaatggaagatattaaataaatatatggactattttcaatgatattggaaagtttattaaggttattgtttacccaaattttaatgacgatga

SEQ ID NO: 120323 - DNA, 974 bp, Cannabis sativa
agagagagagagagagagttggcgtgagagagagaataagagtgagaaaatcaattttttttttctttaactttgttaccgtatatctcaagttatttttattatttaaatagcctctaatcctttattaaaataaaaagaaaatatctaatttgatttgtaatgggttttatttagggcataaaattccaacagtttcttcatgagctttatataaactgatttttctcataaaaactaatgttggttgagcatttattcatcatataacatcatttttaagtgttctaagcgaacgatttatccattttcataaacacaccacccatatacaattgagtcaaacttgttcttattttctttagtgtgcttgcaattctctctaggatttcacattgtattttatctaattagagagagtttactttgtatttcaaaatcgggtatctattgtattgagaggtgatgttggcatcggtaggaaaataactcggatgtaggtgaggttgacaccagttttgtaaacatctcgagaagattgatattgtcactacaaccatccgagagtgagattaacacttcaataaagaggttgatagtcctttgaaaaattattagttgaggtgaacttggcaacggtggaaaaacaactaggttagtaaaattgacacttcaagaaaactattgtgagagatttaggaaaaatcttatggaaaaattctttggttgtaaggcttagttaaacccgttaacttagctcgatatatagttgaactcaaagctaagtcaatagctttgaaaacccaaagctaagtcaatagttttgaaaacccaaagctaagtcaatatatggttttgaaaaccaatgtaggtctctaaattgcaatgggaaatttgattttctatacttacatatacctaatatgttatttctaaactaatacatatcatcattgaaaatatatgaccacttt

SEQ ID NO: 120324 - DNA, 2686 bp, Cannabis sativa
atactagtagttaaaaattaaagaaatatgttgttgattagcaaaatgaaaaggagggcttgtattttcataattaggattaagggcggataggaatcctatccaattgaaacaaactaatttaattcaatttaattatatgttaaaagttagattttaattagattgaatcagttattaaatgtcaatctcaaaatttaaataaaaatcaatttaatccaattacatctaatacatataaaaaaattatttatatttatttatgtataataaaaaaatattttaattatatttttactagctcttttttttgttgaatttgtaagacttaattattttgtgcatttcttttcatgatattttgctctattttattagttggtagtattgttgttttaattatttcaaacttttgattgcattaaactttattagttgcggaagaatgagagagaagaagcagaagtagagagaatgaatgagaaaccgaactgttttcattaatgggaaaagtacaagaacaaagcatttatagagctcaagaatatagtgaaagagttagtcacactaactgatataaccgaataacaaactaacaaaccagctaactaacttctgatacttcccctcaagatggatggtatatatctaccaatccaatcttgtctttaattaccttaaactgattaagaaataaggctatggtcataatgttagctagctgctctttattagaaacatgtatggtcttgatcattccctcttgaaccttttcccttatcagatgacagtcaatttcgatgtgtctcattctttcatgaaacacaggattggctgcaatgtgttgggcagctttgttgtcacaatacatcaatgtaggtcctttgtgctctattttcaattctttgagcaatgtcagtagccaaatcagctcacttatgttgaagatctcgacaatttatgttgcttcttacttttccaagagatgatataatctccaaggaatatgcagaaccctgttgtggaccttctggtgtctacacaagcagcccagtcagcatccgtgaatgctcttcagatgttgcagacagtagtataccttgtcctgggcttgactttatgtactataggtttctttgagcagcaatgaggtgcttagatcttggaacagttatgaattgattaagtttgttgactgagtatgctatatcaggccttgtaataacaagatattgtagcttgcctataatttttttatagagtgtaggattcgccaacttgtccttctcatcctgtgacagttttaggttaggttccattagtgtgttcactagttttctccctaaaaaaacaagttcttctaggagttgaagggcatatggcctttgagatacaaaaataccgttgctagaccctgctatttccaagctgaggaagtatttcagatctcccaaatccttaagcttgaacttgtcattcaatctgaactttaaagctttgaattcagtaatgttattgttagcaagtataacatcatctacataggcaagtaagatgacgaaacaagtagatgagtgttttatgaacattgaatgatcagtagctgaatgagaaaatccctcctctaaaagggttgtggagaaatttgtaaaccattatctaaatgcttgttttaagccatacgatgacttttaaagcttacaaacaatatttggtggtaatttgttctccctcaactatacctaggaggtagagtcatatagacatcttcatgaagatccccatgaaagaatgcattgtttacatcaagttaatgtaaaaaccagccatgaacagtagctaaagcaataatgagtttaacagaaactaacttggtgacatgagcaaatgtatcatgataattaataccttcaagttggttataccgtttagctacaagtctcgctttaaatctttcaatggaaccatcaacattgtatttaattttgtaaacccatttacatctaatactatctaagtctgattcttttcaaaggcatcaatctcattatccattgcattatccatgctggaatttctttagcttgaccaaagcaaactggttcaggatgactggaaatagataaaatagtagctcgaaacttgggagatagcttagagcatgtgcagtgactgacattgtatcttgtgaaggaacaacaagattattagtagataggcagcaatgataatcattaaggtaagatattttggtaacagttcgagatggtctagaatgttgatgatcaacactaggatttgaagctaatgtggattcaaaatgaagagatggaattgtagatgacacaggcctagaaacaggaaatttattttgaaaatctggtggaatagctataaaatttacaaaaggaaacaaggtttcatgaaaaacaacatctcttgagcagaaaactctattgatatttaagtcaagcagcatataagccttcatgcctataagatatcctataaaaagacaaggggcatgtaacgcccctgcttcaagcctttattgggtctttacatccatgaaatgatggttgttatacacaagtatgttactctggctgcttcatggactaatgactagcactacagatcaacacgagtgtttctagcgtgttttgtcctcactcccacgcttcct

SEQ ID NO: 120325 - DNA, 1192 bp, Cannabis sativa
  modified_base (1159)..(1163): a, c, t, g, unknown or other
tctgtttctctgtttctctctttcattctctcttttgttttctttcaatggctaagagaattaacaagtagttgttcttttcgttttgcttagttatgctgttccttgagttttttcatagatgggctcggtttaataagttgtattagctagtcttaatcagtgcaattttttgttcttaggttcgttgtctggtctttattagtttttctcataattttgtagttctacatgaaatttagtttgtcggtattatttgttttagtttaattaagaaaatgatcctggtttcaaaatagttttatggttgttatggaatttgtttgcggaaggtgattaatagttggatggaaatgcagtaaggtgggtagaggttagtgccacgaaaagtgagagttctgcgcctttatgtggttgagttgtgtcttttttggggttcattgtgccatgctaggtgacttttgtgatatgaaaaaaaatttgttgttgttaaggtgtttggtgtaatttgtattaagttactattacttttaggagtattgaccattttaattttcttttagttataattaatgtggttttgacttcgtctagtaggataatttagttttttttttatcaatttttgagggatttctatggaattatttatcagttgtttttatataaatgctatttaatattgttgatatatagtgcattgaagatgattaaattggttggtgttaattattaaattgataattaaggttttgttttactattttagacttaaaacttttgggttatattttgttaggaagttgttgatccggtgttttatgggattaaatagttagaaaaaacaaactcttcttctgcttctagtaaagcaaaaagtaatctttcacaaattatgttagaaaaaaaattatacctaaatcctattggttgacttgatgccacaaatttcatctccaaaaacttttatttctcaaaaaaaaaaaaaaaagaaaaaaaaacttttaaacttttacatattaaactactcatttaacccttgtcttttttccattaacttattatccaaataaatattatacttttatacttgagaaaattagagcatgtttggtattgttttctgttttttgttttaaaaaattgtttttagaaatgnnnnnaaaaaatagtttttgaaatttttaaaaca

SEQ ID NO: 120326 - DNA, 811 bp, Cannabis sativa
ttcactaaaactaaacaaacaacaataaaattgaatacaatttcacactttagggtgtttaaatctgaatataatgcttaaagttcttttaaggagaataggtaaatttcattaataaagtttatatattatatatatagaattttattaataaaattaattgaacataacttgctcaaaattaaaactaatcatataacggcttcatttagctttatttttatgtaccattttctagtttttaaaattaaaaaaattatttgtttgaataaaaaataaaaaattatttttttaatttaaaagtttttttcttaagaagttgtttttgaaattaaaataataattaatttactcaccaaacatcttttaaatagtaatattaaaatacactgaaaagtacattttatttaaaaaaaaatcataatataatactttatcagcagtttaaaatagtcagaaaatctccttttttttttgagaaattttatttttcatacttaataaaaacactccttatcaaaatttaaatccctaattaatttatactaaataatttattttaaatatattttctttcccttttacctttgttttataaaaaaagccaaaaactaattaaattatactactattaaatttttatatttataacaatatacttttaagtttattaatcttaaaaataataaaattaaacaataacgagaccacaatcaacaatattatgaggtggtgtgtttgaattttaaatgtgatcatataaatactatataaaaaaaaatctttagtgctcatttgggatgagaagttt

SEQ ID NO: 120327 - DNA, 710 bp, Cannabis sativa
  modified_base (320)..(325): a, c, t, g, unknown or other
  modified_base (664)..(669): a, c, t, g, unknown or other
aggtgtgttctgacaggttggcgcggtatagtcacaatcgggtatttcgggtcgaaccgggttcgggcccgaaatgcaaattgaattgaaatacttggtattttatttattggtgataatctgaaatttatttggatttaaatgggtatgttttgacttttatgcccttgtatgaggtttgatgtgttaattggccttaagggcaaaaatgaccttttgatccttatcttacatttaataaaagatacatttttgagtaagtaaaagagaattttctgggttttgaaaccctcatacccgacctctctctctctctctcnnnnnntctctctctctctctcctttttcctcttatcaaactttgatttccttgtgggaattgcttgaagttattgttgaattgaagcttggtaattgaggaattttgagcttgcttttggattgagtttaaggtagcttttacagctttaattttggttattgtttgctgaatttttgttgtagaagagcatgaaaaagggttgtgaggttgtgatgtttcatgttagtgttcttgtatgagtatgagcattattatatttaaatcttgtggatcaaggtatgggtttgtgtttggatgaaccttaggtgacttctagggtattttttgttggaaattattttnnnnnnatcttagatctactcagaagtatgttgattaacaccctaaa

SEQ ID NO: 120328 - DNA, 820 bp, Cannabis sativa
gtatatttctcaaattttttatagtttgccactctatgcctagggttaggactggcttttgatacgaacgagttagatttgtgcttaaatccttatttaaaatgaactcattaacatatatataaatatatagaaaaattaattatctgtgcacacacaatttatacacaaatttgacataattatatgccacttatttataaaattatccctatttttataaatatttatgtataaattaattgtcatttttatgaaaataagatactcaaaaatgacaaaaaaatttataatattacgaatttacaatttttttacattcttgtgaattatattttttttttagaaaaataagaagtattggttttttaatttattgttttctgaagaaaaaaaaaagaagtaaaaatgtaaaaaaaaaaataaataaataaaattgatttttaaatattttatgtaaatttggctatgtatctattagattttgtttggaccttacaaggcaaatctctaaagcacctacttattgggaggaaaatctctaatacaaggcaactcactatatatgaattatacataatattaattatttcataaatatatatgatataaatagacattttgctactatcaaatatcaatatggcttaaaagaaaaaaaaaaaaaaaaaaaagcgttgtaatagcttttaataacacaaatggttataagattattaaagatgttttaattaattgataagagtactttttgttgtgttattatatatatatatatatgaaatttttacatgaaaaatccattttacacaatttatta

SEQ ID NO: 120329 - DNA, 2724 bp, Cannabis sativa
gtattgtattacaatagagttgtaatatcttgattttcttccattgtaataaaatctctaacacttgggaccccaagctacgaagctgataagtactcctccagccatgcctaacacttaaaccacctgatgcctccaccattttagtaagcttgatctaagaaatgacttagctatatatagattttaaggaaaagttcagattgattgtttgaatcatatagaaatgaagggtgaggatattaggaaatagagaaaaagagtgggtgggctcctgctgctctgttgtgtttgattttcgattgtgtatatctcgttgaggggacttttattacttttattatttgttgaaagtaataattcactatttgttaaggcattaatccacgctttgttgtccataacatttttgagctgcaaatccatgaaaactataagaactattttttcatattattatttgttttttttttttttgaaatatggaatgtcttgatttgatacaaatgcaatgacttttccctttttaatatatatttggtcatatgggaaaaattgattttatttaacatcttttatttgtaccttaaaatctttataaagcaccttatgttaggaattttattttatataaaatatgtatctttaattagtagtttatttttaattttttttttttttcaaattcacgttcttaaaaaatatgcatatatcaaataaaaatagaatatattttaaatattatgataattgataaaaaaaaaaaataaaaagttatataaaattctattaaaaaaattataaatattttaaaaaaaatatataaaaataaaatcaaaataagtattaaaataaataaaaaataatgggacaaatttttttaaaaaaacagtaagagtgatttataaaattatttaattttttttaatatagtgtgtacttattattttgtagacttataaatagaactcctaattattttttcataactactctgtacgagaaggaagaaaagacgtacagattcattttgggggtcatttattaaaagttaacgttattgtaattctcattaatcattatgattattattattatttattgctaaaactttttaaagagtacgtatggctcgaaattggacgagtatgttttttttttgagtgtagcgtaatgttattttacaattatatattagcttaatagcttaaaagtatttcggtcattttaacttggatgagattactttgttgccatatatgatacatataatattgccttggggcatatgttgaagtatctcaatttcatttctcaaaaaaaaaaaaaaaaatctcaatttagaataaggatacatcgtatagggacatgattttgtgctgtgactgtactttcacggaatgtattccgtaatatatggcagccgttagagagtgagttatttgatcagatggctgagattgatctagaggtaattaggattaaaaaatagtaatgtaccctgacactcatctaatgtaccttgagacccatctaatgtactacggaatacattccgtaaaagtacatcacgggacaaaatcgtgtctcgcacataaatatggtaatagggaatttgaggaaatcattcacaagatttcttcaaaataatataataattatagaatatatggatactgaatatcttaggagggtgtgttattatatgttttatccggataaagatatcagaataagacatatgattattatccatgatccatcccaaagttaactcgatatatactcttcaatgatatcttttattgatttattgatttttcttttctatttaagggacagatctttgatttttttttaaccaaactttattctaaagcgaaaattaagtaaatattgacaggggccacttctcttaaacatctaagagacataagcttctcctctcgagcccaacgggagagaaagttaaccacaagattagacaacctaagaatagacaccactgtcacaaactcatagtccttaaaacagttaatacagtccataaaaaatagaaaagaaccccactcaaaaggaattgaaccaacttggaaacccttcactcccaaaacagagtccgactcaataaccacttttttaaaaccattgattttaacctcagtaaactccacagcaataacagcttctccaagtcttggcatcttttctagactacggccacaccagtagacgatcttttaaatgacgagtccaattgaatgatcgagttattttttaagtaaatcagatcgcaatcttctacaagaccatctgcaacaacaaacaagtcatctacaccagcaaaggatgagtcaaggttatctctcgatccattggtaccaagaaacttgtccaattcagaaactcttccgcagcaatcatcataaatggcaagaaagtcaaaattctttcattcataaaaaaatgtcattcctctttccagatagtttcatagatacaagcaccaaagagtgtcctggtctttaaaatcaaacaaccacccgccaaactccagcgtgtcattctagcagcactcgtaatatcgtgaactagctgacatttcccaaaaagatggagagtagtttcagtgaagaaagggcagaaggtttggctcagctcaattagagactgagggcagatattgtatttatagaacaggggagcataacggctccaatgatt

SEQ ID NO: 120330 - DNA, 1062 bp, Cannabis sativa
  modified_base (30)..(42): a, c, t, g, unknown or other
  modified_base (99)..(114): a, c, t, g, unknown or other
  modified_base (994)..(994): a, c, t, g, unknown or other
agtaattaccaggtataccataagccatannnnnnnnnnnnntcaaacctataatactaagaacaagaagttttgttaagtccattgaataaatttatnnnnnnnnnnnnnnnnttatgtccttgtaatagaaatttctcactaaaaataataatttttttttgtatataatatgcaaaccaataatacatcgaaacttcttcttgttgtttctactaatttaatatatattcttacttattcaatatatagaaagcattaggtaaatacatacctaacttatgaatttgacaattttattaccttataattaaaatgaattatatatgtgttttttttttcttgaggagaattatatatatgtggcttggttaattaagtagaaaaattgtaggtatgttgtgtatgaatgacaacagatggttttgggttaaactttgtatatttaattttttttatatatatatatatattggcaatatatttaattaatagatatatttacttaattatattctagctttcgcttttaattttaatcatcaactgtgtattgattgattacttccaacaatttttcaactgtcaaacatttgacttcatcgaaagccttttgataaattaatattatttttacagcaaaacactctattattaatgggatttaacagttaaataaatgtggtgggccgtcaatatgatcatagtgatatatcgttttacttttttttaagatgcatatattagttaatatataatatagaaaaagaaaaagacattacaaaataatttggcatgacaccgttctaaccattttttttttccctaaagctctcttagtcaacttatgaaaattcaaataacctaatcaaaccagataaactgaaaaaaaaaagaaaaaagaaaaaaaaaagcaacttgaatagcctaatgaaaattcaaatagctcaattaataaagggataatttcataaatacacaaaaacaacaaaanaaattacaaaaatacaatttcacggaattttaaatatttttacgaattttttgattttatttacagaa

SEQ ID NO: 120331 - DNA, 612 bp, Cannabis sativa
tatatatgtatctatatatctatgtgatatatctatgtttagctacagctgggttaggcgtgttctttcttctgattttaaccttctattattaatattttttggggtaataaatgtgtctgaaaataaagaagaaaagaagaggagaagggtataaaagtaaagaaaattagagatggggcatttaatgcaaaaagtgaaagtgttaagtaactcccgggatcggcgccgaatttcagttaggttttgaatttcatggttttgcatgggaaagtgacctttttaattaaaatatatatatttgtaataaattttagagacttgtaattttaacgtgaaaaaatgtcaaattttttattattttaataaatgttgtatcttcacttacttcttctacacatctttgttaaattttatggttatggtagattaattacttttataaatatacataaaagtattaatattattagaaaattctacaatatgcacccccttaaaatagatagattgatgtatgttttagcacccgaaataattttttagtcaaatttttttttcatagtcatgtacgttatagttatttaagatatcctgcaaaattttaagaaa

SEQ ID NO: 120332 - DNA, 1462 bp, Cannabis sativa
taagatagacagatagactcctggagtattatgcagatatgcagatttaactgcaaaaccacgtaaaaatatctggtgttatttaaatactatttatactctatttatttcatattattattgtgttaaatttattacgacaaagcttattattagtttggttaatgaaaatcggcgttaacatagggtttatttgttaattaaaagactttataaggtctaattaataaataagttaaatgaaaattttacttgataattaattataattattaaatagatagatttgacatttatagagttagaataaaaatatgacatttgtgaaagaaaaaataagttattaataaaatggtaaaattgaaacctgtagggcccacatagggttcaaccacttaagcttaaattaagtcattattttatccttttttaattccatataatttaaattctaaccctagaataaatcttataaatagaataagatgcttttattttctaacctaataatagatccttcatcagactactttgtcaaacaacttagaaaataaagagagagcatccattctaatttcgaaatcaccctcctcttttcttctttttaattttgaaatccctatagtgagttgaggaatttcccacacaattcaagccaatgcccaggtctttgtggaagattgtgaagaattctaacaacaaaagaagatctaggtttagatcttgatcatactctgcgacaaaaaagattaagggttagagatttaaatagaaagagacattatattctgctaccaccaatgtaaggttttttataacttcatataagtttatttcattgttttagaaaaatcatatttaggatgttagattacaattctataatcaacatacatgttagtaaatctaaatctaggtaaaataagttctaacaggttgaagtaatctcgctagcctatgatattctactttaacttgctaaacaattagccattttgacacgtactcaactatattacttttcatacctggccacccgtacagtgctttcatatcttgatacatctttgttgttcctgggtgtaatgagtatggtgtggtataagattcatctagaatttctcacttgataccatcatatgccgaaacacaaaccctatctttatactgcagtaacacctttgacgatattgagaaatcctttactgaaccagcttcaaaattctctatactctaattatatcagatcactttgctgagtattcttgattctttctagcaaatcagattgtaaagtaatgttggccaatttctagatcacaaactcaattctctctctagtcatgtctttggctaactttggtgagatcttcttcaattcataaacttgccttggacctttttgacttaaagcatctgctaccacatttgcttttcaatgatggtagaggatttcacaatc

SEQ ID NO: 120333 - DNA, 2362 bp, Cannabis sativa
atctaattggatttttaaaatttgcatccaatccgatctaattatgattggatatccgattctattagatcggtcggttggaattggatcggatgacttcctctctatcaagacaaaacaattctctctatcaaaatttacagtgtaaccttgatcacaaatttagcttatgctaaaaagattagctttaagcccttccataagaagcgtatttttgatcttaggtaacccttcaaagttaagggtacctattccaagaatattaccttcaacttgtttctaaaggttatggatccacaatgcataggtcttatgtctgtaagaatagacctatcacctgtcatatgcctcaaacatccactatcaaaataccaaaaacgtgaagcacctcctctattatattcagaactaaaccagcaaaatatttattctttttaacccatgttttcagaacattttttccttttactctttatttttcaaaatattagaatctctcaaaaaagttgttttttgcaaagttctttagagtaaaacacttaggtcgaatatgacattttctttcacaaaaatgactaggtggaatgaatttttcaagtctaccattgttcttacctgctagctgtaactgatatgttagcacaatagagtcaattgatgcaacaactttctgagaagatggaaaagaaatactggaaggcagaattccactagaaacaaagatagttttctttgaattttgagactttgatgctccaaggcccacatgattcctttgacttgaattctgtatatccttaaaaacagaagaatcaggattaaacattcttatatttttttcaattatatttaaatcctttgacaacttactaatttcatcattttttaaattatttctttttcaaaattttcatttaactcagaaataagttgtttgattgcaaatgttaattctttattttttcttaccaatgaccggttttcagaacaaattttcacccatgaaccatacatatttttgtaagattcacttaaagattcatcactattagaattttcttcatctttgaagatattattcaaacaaacaaaattttcagctttagatacagaatttagcataacagaagtgaatacaacattaccttcctcatcttcattactctcaaagtcattatcactccaagtagctatcatacattttttattcttcttcaaggtattttcacattctgactggatatgaccgaatcccttacactccttgcactgaatatttttcttgttagattgaaaaggtttaagagaagaaataatacattttgaagtcttgacattaaacttcttatttctaatttttctttatgtatttctttgcaagcatagctatgtcattatcactatcttcatcatctgatgcttccttttcagtacttttgaaagcaataatgttctctttttccttacaggtactcattttctgctttaaacgaatcttttgatgcaattcaatggtacaaagagatgtcatcaattcttctactttcatcgtattaaaatcctttgcttcttccatagccgtgagtttaacattaaacctgtaaggaagtactcgcactatctttctcaccaaaacgaaatcattaagtttctcaccaagagcaaaatattcattagaaatatcagatgaatttttgtagaatccagatagtgttttagaatcagtcattctaagatcgtcaaacttaatttgtaacatgataaatctagatcttttaacatttgcagttccttcaaactaggtttgaaggattgtccatgcatctttagcagaaatacaagtagaaacaagcttgataaaactttcttcaacaccattaaagatagcatgaagagctttatttttataactagataacatttcttcttctatattccagattttacctttgggcaaccatcctcattttcctctgacggaggagaccatccagacaaaagtgttttccatgccttttcatcttgtgctttaatgaaggctctcatcctcactttccagtgggaatagtttgagtcattgagtagcggaggacgagatacaaaacttctttttgcaaagaaagacatttcacacaagaaacaaattaaacgaaaattaaatacaagatctcactaagagtttagtgaactgctctgagcttctatttttataattaccaagtaaaactatcaaacaatttaaataatgcgaaactatagtaaaattgtttgagggatattggcagttaaatcacctgaactttacgttttataacacttaaccacaaaaaccaaaattttggtagcaaaacctactaaactc

SEQ ID NO: 120334 - DNA, 2000 bp, Cannabis sativa
tctactattttaacctataattattaaattaaaaaaaattatatttaatattttaaaagataatatttttgttagtgggggctatagcctccacattcatacacgtgcatccgtcactgcgggtcgcaacccaagaaggagggcgtcgcggcctgcccctatgctgaagcaaaaaattctatctttcgcgcacgtggggttggtggcttcctaattcgaagctgaataggattttgagcatgtgcgtttttctatctttttagtccctcaatgactatataaggagtgaacttcagttgatttggggaggcggtttggaaggaaataaacagcagaaaaaggagtacgaaatttagagaccgaagtcaatactggaggcattcttcagagggttttcaacattctcttcttctttattttcttctcttttcttaagttaatatgtgtgatttcgcttccatgaacatgagtagctagacacttaattagggtttagatggatactattgacattattttatggttttaatatgatttattttccctcagtttcaatgtattctatttcattcgtacttaattgttttaaattacctgatcaccaattaactgtatgattttgatgtgagatctgagaagtgagtgtcagttatgttatagtgaaatagaactgaattttgatataggatgagagtacctatatggtttagatagcttataggatttttgtgtttaatgtctgttggatgtttaatttatcacgagagtagaaaatttgtatgtaattgagatttatataccagagaagactataaattatcttagtaaacctgctattgcatagaaattggtaatagaaagataatcatattaagtcataatcaatagaaacaattaaaatcgaaagccctaacttttattcactgttaatttcctttattaatttaattgcttcttctttcactatttttattattttctagttttaatctcctcttaaatattctatatagccaaatagaagtaaagatttaattttaaaatacttaactacaatcctcgtgggatcgacctcactctttgtgagtctataacttgttaatgatacgtatacttgcgtgttatgaataccacaacgaagacattaaaaatttttgagcattttgtttcgttggggtgatcctctacttatacaaatatgtgagtcatagattagaaaactaacgaaagggaacagtaatatagttaaaggcaattgatttgaaaagatttggacatccataaatatctattatttataacactccccttggatatccataataactgactcgttaaaaatcttaccgaagaaactaagtgggacaaaactcagttaagggaaaatagttcattttggaatttttagagatcttttaatcgacacattccaatcttgtgaacaatcttctcaaatgttgatgttcgtaatgtcttcatgaataagtctgcaaaactatcacttgatcgaatttgttaaagatcaatatcaccattttcttgaaggttatgtataaagaagaattttggtcaaatgtgtttagttataatctcttttaatgtcctttttgttaagcgatgcaggcaatattattttcatggagaactgttggtacttctttattggatgttaattcacatgttcctcgaatatgttatgtcattgatcttaaccatacacattcttaacttgcctcgtgaattgcaagtatcccagcatgatttgaggaagtaaccaccagagtttgctttgttgacctccaagatatagcagtgtcaccataagtgaatacatagctcatttgagatctagtcttatatggatcaaaaaaatattctgcatttgcgtagccaatgagttgtgacccacaattattagaacatcgcaatcttttatcagtggaacttcagtattttattgagttaggagcgttgtttgaagatgttatagctttattgtc

SEQ ID NO: 120335 - DNA, 2953 bp, Cannabis sativa
tctagatagaagctatagattctgcatctatgattagtgctgccactcaattatactatcatgttcttaagatgtttgtattgcccgaactaatttgtaagtttaatgaacaactctaagaacataaataacactcttaagatcgaaattaaccatatcaagattaaggtcttttgatctaagatcaaccaatgatatttacttagaaagatacaacggtaagtttataatatctttaccaagttccatatcgatccagtctaatgtatactctatactttcgatactagcatactttaccaatgctttgaaaagcacaaaacacttatccaaggtgtaagtaatatttatcgctgactgtcacatcagtgtaaatccagtacactgatgaatcatgggacataaacttttgaagcgataagcacaattaccttccactgtgttgatatcactataactgttattaactatatgttctggatttaacagaaattgtatttcaaaccttaagcatgaaaaatacatgtaaacataaatgacttctaatcttttattgataacaaataagattatattgacatggattttatttagggtataaaatcccaacattttattgctatacttgggtgtacatgctcacttccaaatccgatgtttcatttattattcctcaattattttctcttattgccactaaattttcagtcaacatcaaagttgtttgctgtgacaatgctaaagagctaaatttaacagccttctatgccacaaagggaatttcaaccaacaattatgtgttggccgtcctcaacaaaattccgtcattgagcaaaaccatcaacacatattaaatattggtagagccttattatttcaatctcatttatctttaccttattggagtcatgttattaatactgctgtttaccttataaatcgtactccatctaaattacttgacaaaaagacttcttttgagatcctttataataaagctcccaattatgatcacctcaatgtttttagttgtcttgtttttgcttcaacattggaaaccaaacgacataagttcctgccaagatctcgcccttatatcttcataggttatctcctggtatggaagcttataatcttttaagtattgaaactcaagaaatcattcaatccggagatgtttactttcacgaagatgtttttccactttgagaaactatgtcatccacatcaataaatgaattattctcacattctttacatccttctataggacagtcacatactcccaccgaggaaatctcaccagttccaacctctgatgacacttcatcttctcaaagtgtgcctgtcaccaacacacctaaccctactcttgatgaagtaccatccacacccaggaacacccccaactacttctcttattacttcaaaaatgggaagaatattaaccaaactaaaagtctttctgattacatttgcaatactactgctgcttcttctactactcaccctattaataaatatttgtcttataataggttaacacaacattttcaagcagcagttcttactgcccgttctctcgttaaacccgccagctacaaaatggcagtaaaagatcccctatggcaaaaagccatggacactaaaactgatgctcttgaagccaacgacacttggatcgttgtaactctccttgatggccaccatgccattagttgtaaataggtatacaaaatcaaatacaatgataattgctcaattgattgtttcaaagcacgattggttgccaaaggcttcaatcaaaaacaaggtattgattactttcacacctttacccctattgcaaagtttaaaaccttaaaacttctacttgccattgcggccactaacaattggtcactgcaccaacttgatatcaacaatgtctttcttcatggcaatttaaatgaaactgtctatatgacactttccaaaggatacaaacccaagggacaaattccctcaattgttgtttgtaaattaacaaaaagtctctatggcttgaaacaagcctctagacaatggttcacaaaactcaacaattatcttctatcaactagtttcacccaatctctctcggaccacactttgttcattaaaaatgataaggcatttttctcgcccttttaatatatgttgatgatattttggttacctccaataataatgatattgttacttctttcaaacaacaacttaactctacgttttagcttaaggacctgggtcctttacattttttcttaggtttggagattggtcgtttttcctctgggatttttgtctctcaacgaccattcaccttacaacttttgattgacacaagttttttaagagcttctgctgctcccattccaatggaaccaaacattcaactctcatttgatgttggaaaaccattagaaaattcaaaaatctaccgcaatcttattggtaactcatttacttagctattacacgacctaattttgcgataaataaactaagtcaatttttatccaatccgagagctccccacctcactactgctcatgaaatattacaatatcttaagggcacctctcgccaagggctattttttttttactcagcatcttcaactaacttatctgcttatgctgaaattaatatgccaaatatagactttcatcccaagattttttcaaatgatgattgggcttcatataatgactgagtttataaatctaaagtgctagtgcaagtgttcctccttggatcacaaaaataaaaaagaaaagaaaagcatcatcaatcacaagaagctctctcgaagcaggacgctgcatctagaagagattttctaattaatcgaagaaaaccctttaggagtgggacaatcacttctacgagagattaatcactggacatggtgagatccttatgtgataat

SEQ ID NO: 120336 - DNA, 6113 bp, Cannabis sativa
  modified_base (2175)..(2176): a, c, t, g, unknown or other
ttcaacaagtaaacatcgaaactagtcctatagctaccaaagaacaattctacgaaattagaatctccataaccactctaaatcataaatccaatatataaaactaatcatttttaggttaaaacgtaattaagccataccttaagctttccctcttcaaggatttgctatcccgctactaccagagcttagaccactaggtttcgagttaaaaatcaaagaaaatagataaaaaagggagaaaatgttcgtcgaaggaagaagagggttttgttcgtactattgttctgatatcttataatatatatattatgttaacgataagttatatatataaaaataatgttataataataatatcataataataatataatattaataaaaactttattattaatagttatcctattatttcttagtcactaataaatctctacttttaggatatttggccaatctgagtaccctaaaatatcccaatatttctaaaattgacttacctcaataatctcatcaatatttctaactaataccgttgtgacatttttagcctctaatcaggtctccaaggttgccaaaatttaaaaatattttttttttttttgaagaaagtttgaatttttttattgatcactcaaattagcagcaattaaatgttgaagagcagtagggagtgtatcttcaaagagaatgtgacctgaccaaaaacaagagttacgtgccagacaatgcgcaattctgttagcagatcgcttaacaaaacaaatcttaacattaacaagagaagataaaagtaattggcaatcaagaaccaacaatccaaacaccaccgaaggcatacaaatggaactgtccactgcatgtaacaccaagagacaatcggtttcaacaattacattatgagcctccttctgcttgatccaacttaaagcctccttaacactgacaatctctgcaatctcaggttggaccccgccaacggagtacaccgaaaacgccttaaccaactcccctgcatcatttcgaaccacaacacctgagccaaaagcatttgcaccctcaaacacagccccatcaatatttattttcagttggtttggagctggtttttcccaccgctcaccaactaacaatgttctaggatgaagaagaagcagttcaaatctccttgaccgagcgtgattccattgagcatgaactactcttgtcgattgcaccacattagctgcaaagcagtatttcttgttccaaataacaacatttcaagcattctaaatagaccaacataccatagcagccttctcaactatcacagagcttctacgggacaccacctcatggaaccattggaaaaaactgatggcaggtgaagatgcaccatctaaaccagacctttcccaacaagatttagagaactaacagtgtaaaatatttttatttcacaaataacttacattatatccacatatttcagataaatctctgtaattaacaaattacgtttatttatctaattatcgggtcttcaaaatcatcgaacttgaaaatatgtttattccacatatagctcatattacattcacacatgctatataaatctccataatttataaattatgtttatttactcacttatagcaaatttaaattttatgctgaaatagattagtaggatcataatcccactttaccttattaatccataatatttaccattaggcttatcgagatattacaaccatcccctccttatataaattttgtcctcgaaatttatttaaatagtttgggatattacccccgtatttatgattataactctcaaattgatgtttctatcttgttgtttctttacagcactttcttaactagtggaattgtctcatttcatagtacttcctttttttagtccaaaacctagacaagatattttttccgtataataaatttgtctaaagtttaatatcgtcacagctcagaatatgagtcgagtttaatacatattttctcagtatggagacataaaatatattatatacttcagacaacacaagtgttaaggctagctaataggttacctagcctatttaccctagtaaataggtatccaatatttatctcgtaccacatttattaaggtacctaaccagtggtacatttaattatcacttnnaaataaacacctcgttagggaagatattattctaagataatctaacctttatcgaatatgctcacagcatgtttctaatattccattgatcttctcaagttacccacctttcaagaataaaacatcatactatttttgctttaatcttcatggttctcaataaccttctatatttcttaacatcatagccaaagatatcaaccttggaatttcacaagattagactattatttcgtatgaatttcatatcctcatttattgtataaattgtccatactgataaacagcatattaacttaatatgtccagccgttactactcagtcaaaatcataagatcccacaatacatagttcataattgcatctttctgttcctcctataggacctcctaaactggtatactgacttaacttattaacaagttaagtattcgtttctgatagatattcaattagagcacttcttatttctacttattaacatatgcttatctcgatacctcgtaaatctttacttattaacacatccttttctcttaataatctctggaacgactattgattctgcatcctaatatgaatatttctaacgtactttgtcctcactcgtatgctttctgagatgaatccctaaaatatttcccatatttagattaccccaagttaagtatgcttaactccaaggtaaacgcatggtgggttatcagaaagtagatgcttctttgtcgttcctacttgtatttcttgttttcgtccttccgttatttaaattcaatttccatcactcccttcattatcctcttacaattccttgtcaattttgttcacttatgcttgaggaatttccatcttattgtcaacttgaatcttgttcatttctacttattttaacttacatcaatttctcttgaactgacacaacttttaaatttcccaatcacttacagttaactaccgttataaagtgaattgatgtaacctatacggtagaggcaacattgctcataccaggtacccataactaaactagaaatacccatttcccaaattctcaactaataacaattaatttaagatcactccttgatcttgaagttttttttctgtgtttggtagaaatcttgataatcttttcaaacacaccttgaaatatacatacctcaagtatattctctattttattgacaatcccttggcatgaactactataccaacttatagtgagtctcccgttgatgatgctaattcatcaacatctaagaccctcgtatacttttcccgttattaccactaaggttttactccctagttcatacgccactattgctcccttgcaatcatcactatcttcatacttggttaaccactctaaaacttattttacactcaattatatagtttgttgtttaataaacaacctattttgtgatccaacattcaccaatcactcaaatacatgtccattaaattgcatctcaattcataagctttttttcattctaggtgagtatgcatttttataattgcttaataaagtaatattttctcagaatttcaatggtctccttatataccatattgactatccaatcaattatgaagtactctccatcattaccgtatcaccttaagtaattcaggtaatcttctttaccttagtgataccactactcttcctaacgttcttttatacgttaccctagtaacgtccccgcttcaagcctctattgggcccttactcccatggaatgatggctcttatacacaagtacattactctagctgcttcctggactgacgactggccccacggaccaatccaagtgttttcaacgtgctttgctctgattcgcacgcttcatggagaaacttcctaaatgaaatcaccccaggtcaaacacacttaaccgtggagttccttcatggtgggctacaaaaacaagatgcttcttgctaacataggtagtcccaagcaaacactcaagtccttaaccattatgtagtcccacacctacataatcttagtatcactacatacgacctttcccctaggcgacgtggggttatacagctcctggtctttccttcgcagatcacggggctctgattgtcacagcttgactcgtgaccctctttgatctcattctttccctagaagtgaatttctccaaccatacaatcgccgccttcaatttacctaaggtttcagacaatactcataaattgtcccacttgtactaacactagatcacttttaattaaaagattttgtttccccaaatcaataagatggatacctccattagctactcatgtcctatattccacttgggaatatcagcaaatttaatttatattgccatttctctaatctgtctaccctatcaaatgaactaccactaaataacatacatgcacagtccattcagatcttttgatcccccctcattgagtgtaaaatgtttaatatcgatatcaattgaaatagtaactataatattgcccataaaattctaacttgaatcagccaaagaccgatactcgggtccctttgaatcataattgacacttgggcaggacccgtacacttttcttatttaacattagtctttcttaactgtggataggttctttttagatgacccactaccccacaataataagatctggctctatattagctcaaatggcgcctttttgtatattgaacactcagaataaggtcgtcatttcttattctcattttgaccgctatcctagttgccctataactttttgttctattccataattagtggttcatttagttttgccttatgatctgctcgtaagttgggtttatatctttcaccacatccagtggtacaacaagaagtgtctgtagtgtgagaacaaacataaaacgagcatgttgtcctttcagatctcagatctattttttccttgtcctctaatcatatcatgcatagcaaaatttacatgtttctagtattacgacaataaaggattatcttccttaccgtttatcccgagtccaaacaactcgccattcaggcaattcaattgcccttactgtacaacttgtcacacatttaatccatattttctaaaaacttaaagctcagactgatatgaatatcagtatgcgtataccatacacatattcttattataaataatcagtacactacttcttcccatcatacactataattgtctaagcaagtaagacaatagcaaataatataaacacttactataccatgagtcgacctttcttcacagtaaatgtacatattcgaccagtcttcaagacctttaaaatcatggttgctctgataccaagttgtaacgctataatctatagggacaccacgtgtgtgattttataaactagtttagtactaataaattgattaattattgaaaaccgtgatgatattaaaaactttactaaaataaaatactaaaaatggacattataacgacatgaaaaacgtgtttcgaggatccttgttataaaattttttacaatagaactatatacaacgatgcctccaaaacataaaactaaaatacacaatagatatagcccaaaacaactcctggcaactcggcacacaggccggtggggtcaatatgtacattgctggaaaaggtagtcacctcatggcagctctaacttttccttgcccttacctgcaccacatagcacccgtgagtcataaggattcaacaagaaaagcaataataataatcatatagtttattattcgaatatatcatttatacacaatcaaaacaaactatcacgcattgttcataagatgaaattcaaatcactactggcatctaccatgaataatcattagtatacatatatctggtaatacaaaatcattataccaatagtaggaatcatattcatttaaaaaa

SEQ ID NO: 120337 - DNA, 996 bp, Cannabis sativa
  modified_base (30)..(36): a, c, t, g, unknown or other
  modified_base (926)..(960): a, c, t, g, unknown or other
atccatgtgattattaatatataaattatnnnnnnnaatcttcgagtttattattataaaatacgggcgttacaggtgctttgtgaatgatgtgtgggactctttttataaccaacccaaagtttcacatctggactattttaactctgatcaccaagcaatatcaacagatatctccaacaatttggctcctcagcagcataaaagatacaacaaattttgatttgagaaattgtggttatttgaccctgaaagcaagagcatcatctcaaattgctggctggcagaaaacacattagacccgattaggagtgtccttaataacttggatttgtgtgctaaatcattgcagcaatggcacattaaaaatatgaccgaatgaagaagaatatagctgatgcacaatccaaagttgacaccttaatcaattctcatactctaaacaatgagacagctgctgcactgaaacacaatgaatcaattctagatgatttgttagaacaagaggagatatactggcaacaacgctctagaattgattgggtgcaattaggggacaggaatacagaatactttcattttaaagcctcagcaagaaaatcaaacaacagatagcttttctcaggacagaagatggtataaaagtcacctctaaacaagacacgagcaaggttattcaagattatttctccaacttgttccaggcttcttccattgataataatgctcttgctacaactttggctacaatcccagtttctgttactatggacatgaatgagactcttctaaaaccattcaaaaaatcagatgttgagctggctctgcaaactatgggacctaataaagcccaggaattgacagaatgtctgcaatattctaccaaaacaattgtgatgtagtcggtgttggaattattttaccannnnnnnnnnnnnnnnnnnnnnnnnnnnnnnnnnnatcctaatatgaatttctaaaaaaatgaaataaaca

SEQ ID NO: 120338 - DNA, 951 bp, Cannabis sativa
  modified_base (386)..(388): a, c, t, g, unknown or other
tgagcttcaagatacaggcagtactctcacatgtgaacattggtggaccaaattttggaagttaaagttgccttcaaaacttcgtatttttgtttggaaagtgtttcacaatgtcttaccagtagctgctgaactgcaccgtaagcatattgcagatactccattgtgtcctttgtgtaaaatgcagcaagaaaccattaatcatgcattattcctctgtacaagagctaaggaggtttggcatctttctctccttaatttgaacttcaaattggctgctacttcttcaccagaagaattcttgctctatgtctcggccaacacttccacacaagaatttgaacaatttttgactatttgttggagtatctggtatgagaggaatnnngaatatcatggtaaattgcctaaactggctgctgctattttggtttttgcaactgaatatctcctcaaatatcaaactgttcatgcctcatcactgacctctggctctactgctgtaaccaacacacatccagcaaatatcacaccagttgcatccttagctgacccttggattgcacctccagtaggaaaattgaagctcaatactgatgctgcctgtaatagatcgaacaaattaattggtataggtgctgttttgagggactctaatggatacatcaaggctgctctctcgaaatcaattctgggatgtttcaaaccaaaggaaatggaagcaactgctctagctttaactctgcaatggctcattagtcttggtttaactgctgatttcattgaaacagattctttgttagtagttcagggtttaaaagcttcttatgattgtaattctgcttttcatactatgttaaaagatgttaactatttggtatcctttttcccacgagcacaggtcactcatgttaggagatctgctaatacttatgcccatgttttggctaa

SEQ ID NO: 120339 - DNA, 712 bp, Cannabis sativa
  modified_base (676)..(677): a, c, t, g, unknown or other
attttatacaatttactttttttttttttttttgagaaatagaattcattaaacaatttaaggattataaggaaatgacaaattacgctcaattacatgactagtacaagagggtgacactccaatccacatagaactaactttatttttcaaagcataatttacttttttttttttctttagagaattaattttttactttattatttttaacatttaattaataggaagatttaaagatataatattttcatgatataaaagaaaatataaagaattaaatacaaaaaattgaggttatagtaaagtattttaaagtatagagaaagtagtgctgagaggagttgctattacagcttaatttgacaacaaatatttgttcgaaaagtaaaaaaataaaaactttctattaaagtggcccatgttgaagaattctatttttctattaaactttctattaaaataaaattattttaaagaattagattataaaattgcatgttgaagaaatacaatgcgccactttacaaaataataatttaaaaaacaatgggcctgactattagagcaataatagagcttaaaacttggcaacaaacatttgttcaaaaaataaaaataaaaggggtaagttgaaaaatgcctcttttattcatcaattaatcaaatttacctnnaattttatatttatttgaaacatatctctttttat

SEQ ID NO: 120340 - DNA, 4451 bp, Cannabis sativa
  modified_base (29)..(39): a, c, t, g, unknown or other
  modified_base (2096)..(2097): a, c, t, g, unknown or other
  modified_base (3161)..(3168): a, c, t, g, unknown or other
taactagtaaatctgattatattaaaatnnnnnnnnnnnagggcacaaaacccaacacctagtacctccatgggtaacacaggtatcatactatctcataattctatccctccattgcatgattcttggattgttgacacatgaccaactagacatatatgttctaatccaaaactttttcaatgtatatgtaagataccctcaactaaactaattctccctaataatgaatatctcatcgtgaaccaaagtaggattgtcaaattagggaacaatatggtcttaaccgatgttttgtatgctcttattttcaaatataacattgtgtcagcaagacaatgccagcaagaggacgattggaagaggtagtactgtcaaagatctttacattcttgatactacaccgaattctggtcatgttttctctgtctcggctgagacctggcactctcttcttggacatctatccaacaagcgtttgaatttgcttaaagatactttgaattgtaaaattgttgatttacacaaaagtacaccatgctatgtttatcctattgcaaaacaaagaaaacttcctttccaaaatagtaatagtgtttctaataaaatctttgatattattcattgtgatgtttggggaccatatcacattgtatcacacacaaatcacagatattttcttactttggttgatgacttttctagattcacatggatttttttaatgcatcacaaatctgatgttagcttcattatacctcagttcttgacttacatacatactcaattaaagtaggtttttagagttttccattctgataatgcaccagaaatggtgtttaaagaactgtttgctaagcacggcattatgcatgagttctcttgtgttaaaacacctgagcaaaacgctgttgctgaaagaaagcatcagcacttgctcaatgttgcacgatctctatactttcaatcaaaaattcctataaaattttggactgaatgcatattgtctgctgcgtatcgaataaatagaattcctactactctattaaacaacaaaacaccctacaaattgctctttgataaacggcctgaatatcaacatttacgttcttttgggtgtcttgtttttgcaactactttatctgctcatagaagcaaattttcctcaagggctcgtacttgtgttcttatgggatatccccaaggtattaaagggtataaactttatgatatcaacaataaacatatgtttgtgtctcgaaatgtagtgtttcacgaaaacatatttccatttcaaaaacttaatactgaggatagtgacatcgacccctttactcaaactgtacttcctcattctgtgatatctaacacccctatttgtgagtatcctacaggttctagcgatacattaaatccctcaattcaggtacatgaaacaggagccaatgctgatcaaactcgggaagatttttctcctactgttacaatagaggcacctgtcatcgacacataacagcaaccccaggatcctccaagaagatcaaatagacaattgaagccaccaagctacctaaaagattttgagtgttattcactcatccaagatcattcttccacacctcataacattaataagtttatctcatactcaaatttgtctgaaactcacaaagcttttatttttactgtctcttctatcaaagaaccaagaacatactttgaagccatacaaaccatagcatggttgaatgccgtgcaatgtgaatgttgttgaaagaatttttacagcaccaaaaataaataataacaataataaataaggaatatatgcgagtactcaacccagaatgacgagtattcgaatcggaaacacaaaatactttagcaaaaactggaaataaaatgaacacaatggagtatagtagttcaggcagatcatggtctgctttatccactgctgcaaggatttctctcttgtttatttcacgatggatcactcatttatatacaaagcaagagtcttatcatctacacaatgattgaatacattatcaatccattcatacattaaaattacaataattaaaccaaaaaanntaaacataataaatgaagaacagtttccaatttaattcactaagtatagcaacgtatgcgacttttacagtgcgagttggcttttcatattcttgcataagctcgcaggattaggatgcattcgagactattggagtctaggatgtctgcatcctcttggattcgtttataaggacatcttataacaagctgatagaactaagacatgcgagtctatatcggtttattagggcagttgggtcaatgggaccagctcgtaacttggagaattgatctctatgtttttgcagaaggattacggtgatactcgcatatatcctgatgtatgcgagtttagaaccgttccttggtcctacataacgtgagccatacgaatgcaattagactcggtcatattcgcatcatcttggtgagtctggttcaggcgagattcgtacctgagagttctcttatcgagatctcagcattcctcaaggaaagtgagtacatgtgtctttttaataggagtccggtctcgagtttctaggtgagaaaaatcgcactataacacatgctcctagtttcacgactaacaaatgaggtcataagggaaactatagtcgagagacaggcgaagagatgtcacgaggtggtgacctttggttgtcccatcgaaggtttcttaaaaaatgacgattttaattattacatttgatcctttctagggtgccacatcacaaaactcttgaagatcgtgtcaaattaaaacttttagaattaactatgaaactttatataaatatttacaagtgacgggatcccgttatttaaactttttacaaaatattccaaacacaaaagtcaagtcgcacagcaactacaaaatgaaaaccccagatgtcccgagaccgaacactctaggtcgcgctgccatgacatgtacaacatcaccctagctcgaggtttcctgttcagccttcatctttcttttacctacacatgaaagtaaaattgtgagtcgacactcagtaagaaaagcatataacatatcacataatatcaacttgtatttaggcacccatacnnnnnnnnacaaggcttaacaaatgagtaataatgttctatactagggttcaaccactgtaccacattgcacgagtgttggtagggtttgtttcgtaccctgagtaccactaagtgatataccacacacaccctatactttctcatacttgtgttggtaacaccgtaatgtactctttaaatagtgtacactataccaatacactaagtaccatttctgtacaagtgttggtagtgtagcaaccataataagcatgcatatacatttcacacatacatacattcgcatatatatcacatgatctacactatgcttacctcgtttctaaattcaagtgagttggtcgacctgaatggaaagtctcatgctggatggatgccttaatcacataacataaccgggtaaatcacacattaaaactctaatctggaaaacttgaacctctaacttaaggttctgctattactaaatggaactacaataccctaggaaacaaggaatcatccaaccaaggctctgaaatagacacgaatcaaggaaatgaattgttcggggtatctgccaaaactggtttaccagttttacagatcctggaaatttggttaaccggtttgcaccaggtttccccaaacaattccaaacctactcaaaacatgtccaaatgccaccaaacgttccaaaacacctacaatgaccttccacaatatatctcaatcaacagaaactagaaaaacatacataatcaaatcatgccattaatgacccaagtttgagttttcaaactcaaacttggtcatccaccacaaaaaacctcaaatacagctgcaagaacttatttccaactcattttaagcttagaaattaaattataacacaacctaaccctaacagcccctaaactacaaaattgcatactcaaaccaaattcaaagctttaaaaacaaagattaagagttctaggggttaccttgcttcaaaaacacttgaatctaagctcaaaactcagaaaaatgatgataaaggtggctggtttcctcctggtttggtggtgctcagagagagagagagagatagttttctcttaatttgctttttcttttaattttcttattttccaaaaagaaaatgcattacacacacaatactcagcacaaaaaggggcagttgtcctgctctaataaaagccacataatccctctcataaaattactaaaatacccttggtgcttatgttgtgaaaattatatacgcaagtatatgtagtcaaacaattaataaagtgataagtaag

SEQ ID NO: 120341 - DNA, 2157 bp, Cannabis sativa
acaaaatccaacactaggtcctaggttaatgtttgggtctggggttgggtactaggtcccggtcctagtttcgttgcccaggtccctatcttaattttgggtctagggtctcggttcttgttttgtttgggtcccgatctaggttcacgtttgagtcctagtcttggtttaggtttgggtctcgatctgggtttttatctgggttcagtttcttgtttaggtcctagtccttgtcctagtcctagtccgattctagttccagttgcgattccaagttcatgttttggtttgagttcaggtagggttcaagtcctagattgagtttggttcaagtctggatttttgtctaggtccggatcaggctccgggtgttgttttagatcctggtctaggtcaaggtctgggttagagtcccaagttccgatcccgatctaagtctgagttcagttccgggtctaggtcatgggctccgatcccactctaggctcgagttcgggttctaattttaagtttggatcccaaatctaggttttggtcttgggtctaggtttgagtctccaatctcagtctgggtcctaggtctgggtttgggttcaagtccgtgtctaggttcggttttggtttcttgtcccgattccagatccaagttttgattcgggttcgcgccccagactgggtctgggtctaggtctgggtctctgtctaggtttttgtcctagtcagattacagttcctagaacccaaactcagactcgaaccgaggtctggggtacgggtctgggtcttggtccgggtccgagtcttggtctgggtttgagttcgggtatgggtcccagatataaatagcgactacaggttaagtctaagcgggtgaagatctagaaataggaccaagaccatgactaggacctaaaaccgaagcaaaacgcaaataaaaacctagaccgagacccaaacccaaactgcgactaggacccgaagccaaacctacaccgggacacaaacccagacaagaaacgagagctggacccaaaatcgttatagggacctgggcaaacagaactaggactgggacccaagaccctaccccacacacggacttgaacctatgacccagctcgtgacccggcacccgaactggaaccagactgggacccaagattgggatcccaatctaaacccggggcttgaccgaaccaatagtcggtgaatggatttgggacacaacgctgcaccgaaacccagactaagatctgaacctagagccggacccgaacctagtcccagaccaaaaccttgacccaaactcgtacccttgacccgaaattggaaccgaaactgaaagtagaccgggacccgggaacgggaccggaaccaagacttggacatgggcctagaaccgtatccagaccgggacctagacctaaaaccgtaactgggtaattggactaggacctagactccaacccagacctagatgtgaatcgaaaaccagactcggatcccaacccaaacctaaactcgtgacccgaacctggacacgaactcagactcaaaaatggaaccagacatggaacacagaattagggccgggacctagaactacaccctcttttcggtcctaaacccaaacaaggacctggcacccaggacctaaacaaaacccagtccgggacacgtgatagggatccaaatctgggactcgaaattggaacctgaacaagaagaaccagaccagcaccctcgaaccagacccaaaccgtgacaaaaacttcggcccaaacatggtcgtttacccaaaccgggatcgagtcctggaccccgaactagacttgggacccgatcctaaaccaagactctaacctagatagggatctggataggaacttggactcgaacccagacctagacccagaataggatcgaaattcaggacctatatccagacttagaccctgacccaaacccaaacttggacccgcaccctgaacctaaactcggacctagacccaaaactagaccaagatcggtatttggacctcgatcaagaccaagacccaaacctgaaaccagacactgaatcgaaataaaaactgggactaggacccaaacccaaacatggacctagaccgagacctaggacccagacctggatgg

SEQ ID NO: 120342 - DNA, 1046 bp, Cannabis sativa
tggaaaagtaaatataaatgtatatcaagcaagatctaaatcttcaatattatataataagcttatcatgttatagggtataatagtacttagattgagaggtccaattattgatttttggccttaagagagagagcaaaagctattacaagctttcacttatttttcatttgtttattctccatttgtcacattattaaataaataaatatgatataatgttcaaaatttgaaaattttcttttcatttctaataataataataatgaatgactcagtttttataattttgatggtgtattatttaaattatctggcttttctcatgggtatcttggatacgttaggtttatttatttatttattcattaattaatcttacaaataatatattaagatcactagctagctcaaccttctccatcttgcctttttccatttaaagcatatttcttttccaattaaaaacatgattatgtgccccccactttgattatatttcactaaacattaaattttctaactttaaaataatcataaactcattcatgttgataattgtaataattgtattcttaattgtttaacattagccaattaaattagaaataaatctccttttgaaaagcatctttttgtcgtgataatttattatatgtataaattgtcattaacaacaatttataatagattatatttcataaacttattttaatatcttctaataaagtagtattcatccaactacaaacaatgattatatatggagtatttttgcaaaatatcacgtattttttttttttttttttttttatttataaagctgaaaatgcatattttacttatgattaataaataataaagagttggagtatttacaaaatatcacgtatttcttcttagaatttttactggaatgatgagcataatgtcctaatttttcttgtaagggtaaagatgattatatatgaaatgtgatattattttatacatttagtcgcaacaaaatttgtgattaaaagtgaaaaaattgtaactaattataa

SEQ ID NO: 120343 - DNA, 2113 bp, Cannabis sativa
tgctaattgtgatgtattcgctcatcagagatacaaattcctgagatggatggatgaccaggtgtacatccttcgatatcaccagacggaaatagatcgccacaaccgggaggctagcaatataaaaagacggttcaatcagagaacagacagcataggccaggatctcctttgggatccacttcaagaaagactgacgctaagttcttcaggcactaggacagatctttccctgccaaagggaggaaaaaccttttctcaaaggttaaatggtgagaacaactagatcttggcaaccagcggtatggggggccactaagaatctctggctcagcagcaccccccattttggagccaccagccggccagccattaacaggagtacccatggccgaccagagtacatcacttcctccccaaggggagcaaggtgcacagagatcgatcttcgactgatgaggactgagagtgggaggaaacacccaaaatggcgattctagaagtgaaacggatcactttaggcatctagatccaccaaactccaataattggtgtgatctaccccgaataaacacacaaccaatactagtcgaccgtagaatcacgggcgtttagaccctacccaatgcaggtctagctagacaagaaaacatcacgggcagccagaccctaccctttgcaggtttgggcagccagaccctacctttggaagtttgatcatgaaatcccattcttactttagtagggatcttgataatccttccaaacacatccagacatatacacaccttatgtacattctcagtttcaccaacaatctcttggtatgaattaccaatactaacttatagtaagtctcttgttgacagtgctattcatccgaatctaagactcttgtattcttttaccattattatcactagagtttcactttttcgattcataccttaccatcactatctcgcagtcaatcatacatttatacttaaccatctaccatcacactcatattatattcaccaatacaagctattatttattaaaataatcaactatgttatctaataagataaccaatattcatttgttatttgataacttaaccagttaccctttattatctaatgagataatcatattagttctacaccgggttcatagagtaataataactctattactactctcaatgttacttaattaagtaacccaacattcctggtcatctaataaaacaacctatatatatattttattctctacattcactagaagaactaacctcatttaagggagataattaatttaacaagtaacaacgtacctcattctcttaacaatatatcacatggtctaatatcctaccatgtaatgaatttaaactcagctttcctttccaggaaaatatctttcattttcaaatatcctagtaagcttatcaaccttatttttgttccaacagaaaattcaatactctaatacttctaactgagacccacatctagaaggtcatctaaattcctccttttaatcatgagggttataactcatacctctttaaatgaatggatacctccaagaatctctccaagtgttattatcattaataactaatattccgtcaatctcgttaacatgaatctcaaccacttgagtgtattttcattatccacaagttatgtgctcccctattttttgattgacccttacctttcccaggattcctatagctattccatatacaagattcgtcatatgattagaccttaaaagtatttttcattactgtcatataattactagcgatctagtcaatcttcttagcaacaacactgtcctcgtcatcatctccttataaatcattaactgaattatttcttaattaacatggttcaattcatgctcctcgagatctatcttctattatctgaacatctcttttgtagcatgaaataacataactcacttaatcataatctccaattcacctcaaatcccagatggacgtaattatacttgttgacttcgcttttagccaacgacaatgaatctttttgataagcgaaaaatgatatgtcgtaatgagaatatgtaataaagcaataacaagaca

SEQ ID NO: 120344 - DNA, 742 bp, Cannabis sativa
acaataagatgggaattcctcaagtttaagtgcacaaaaaggatgaggaattgcaagaggttaatgaagggagtgatggaaattagatttaaataacgaacggatgaaaataagaaatataagtaggaatgacgaagaagcatctactttttgacaacccaccatgagcttaccttagatttaagcatagttaacttagggtaatctcaagacaggaaatctttcacagagtcatcttggaaagtgtatgagtgagaacaaagtacgattcgtattaggatgcataattggtagttgttccagatattatcaagaggaagggatgtgttaataagaataaatttacaaggtattgagatgagtatatattagtgggtggaaataagaaatgctctaattgaatatctatccaaaatgaatatttaacttgttactaagttaagtcagtagatcagcttaggagatcccatagaacgaatggaaagacataattatgaattgtgtatggtgggatcttctgattttgactgagtagtaacggttggacataccgagttaatatcttgtctataagtgtaaatttatacagtaaatgaagacaaggaattcatacgaaggaatagtttaatattgtgaaattccaaggttcatatcttcggctacgatgctaagaattaaagaaggttattgtgaaccatggaagttaaagcgaaaatagtataatgctttattcttgaaaggt

SEQ ID NO: 120345 - DNA, 1910 bp, Cannabis sativa
  modified_base (32)..(37): a, c, t, g, unknown or other
  modified_base (67)..(67): a, c, t, g, unknown or other
atttcaatagttcgggggaaatttttaacggnnnnnnaagttcaaggggcacgatttagtacatgtnaaagttcaggggaaaaaattattaattagcctatttatgttgttcggaaggagcgtaagttctgtatcttaatctttattatgctgttagttggacaactaatcaaaacgaagaagacttattctttattcctactttaaacagctaaaccaatgatggaaggcacaatatatctcctttactcagcatcattgattgtaacattagagtacaagaccttagaatgataaagcacactgtagtttttcatctaaaaccttctgcaacaagccttcaggagccatccaccatgtcatctttgaaagtaccagttcatgcaacttgcaaggacaagtagctcgattacttaggcaaaattgtatctttctctgttctcgatatcaataaagtaagcatttcatctattgcctaccagaaactcgcaccagcagtcttagccattcatcttaaccaacaaaagcattgactcaaaattttcttacagaggttgtggacgcgtctggactataaagatgtctttgccaacaacacacccttccacatcctgtgggcagccaaacttctgctccaggaagaaacccactgaaccaaggcgttgacctagttggcgacggaaaactgggtcaatggttaatggtttcttgctgtagtccacagtcaaatgtataacctctccatcagcagggccggcagcaagaaccagaagctccttactgaaatttgcaaatgagagtgttttcacatttccgtcaaacttcccagaagatagacgccaggctgtgcccctagtgcctgaagccaaagtttcaccaaggccagatgcaatctcagcttcaatgtaattgtgatcttggtctgttggactttgtgtgtggagcacaaatgacaagtccggtgaaagcatttcctgtactagaattgccattgaagcttccccttgaggaacaccagctgctcgacggctcaaaattgctctcctggtgtataatgaagcccatactcgactaatacaattggctaaaactgtaggatttgaagtactaacgttgggaatggattcatagagtccagcagctgatagtccagccaggtcttcaacattagcacttgaacgaacaatcaatcgtgcatttccaggaaacaatctctcaatgctttcaataatatttttcggtggctgtaaggaagagatgatttcctgtagttgaaaagatattttgtccagttcacctccttcaaatgttgcagtttctacctcatccagtaaggacctgaaagtttccattaacttgctttgctttaatgccaactccattgagccaaatggtattacagcccccgcaggaacaaaaaatgatgctgggacaccttggtcattgtaaactgccaacaaagaaccatcagaagcatcacaaacttatattcagaatttcgctaaattgtctatgatatatgtttgtatacatacatataaatatagctagtcttcactcttcaatttaggtaaagtgaaatatatgacttacatatactgaacaaaacacagaataaaacagccaaaagacagtgaacatatgtaaagagatattctggcagcaaaccttaacaaaattcattcatttttcttttcttcaacacatatgtgccctgcccactttgctaatgaccccttctaagttcagtagcaccatttcatgtattatatggcatatgtaatgaaataaaaaagcaatctactatcacctaaaaccactgttagagtattagctgtatattagttgtaaaagaattagagtaacttgtatttagtagtttcttattttagtctcctagctttgtatat

SEQ ID NO: 120346 - DNA, 1131 bp, Cannabis sativa
  modified_base (27)..(27): a, c, t, g, unknown or other
actaatcagattgtaaagagttttatntagggcataaaacccaacacccgacataactaatcagatctcgtatgtcgaaaagcatcaagtatctttcgacaatgttcgtcttgtacaaggagctaggcttgcctcaacctactccatacgagatcagtcactactttgatttgaggtctgtgccgaagcagaacagaaccggatatttttattttagccaggttggtcaccaatagttgggtgacactaattgcacaaccatgtcgaaggttggtgggtacactaagaagtactttatcgcctatggcctccgtaggattgggcgctacgaattttggcctgtaccattcttcagacgctctatccctactttgcagataagggatagggaaaatcacatcctgtctctctcgacagagcagagaaacataattctgttgactagtgtggacgatttttagaagtaggcttatatcctcctgctcgcgaagttgcaggagtgccagctgcagatggggcctaccctggagatgggtaagctcttgactagggtgatgatgaggtacctttatctcgcattgtatggaatctggagaagaaggaaagggctctccgccagtgtttggccagcaaaggaccagtaggtgatgattctctcggtatcgggcctagaggccaggctttcgagagacttacccacatcgtgcctacatctaagggcaaggacaaggctgttaccaaggaattagatagttcctcttctgattacaatggtatttaatagctaataacaccatgcttttgtcttgtactgaatgtttataatttctttttgacttgcaaatatgtcttccaggttgagaggtcttactgggggaccttcagatgaggccacgtgacgagtgagggccaaggtggccaagacttcccgtggtggagatgctgccaggtcatcactacctccccctcctccagggcctgcaccaacttggtaccctttgatacggcttgcaagccagggtactcagaggcccacagttccagccctgaaaatatatgggcccaagacgaattaaattttggggccctaaaaaatatataaaaaaattaaaagaagagtgttatgggatt

SEQ ID NO: 120347 - DNA, 1985 bp, Cannabis sativa
ttttttgtggaatgatgaataaattattatgaatgtggagacgaggaagtatagctgctaaactagcttactgctgaatcaattttaatactattataaattttaaaagaggtgtatttaaaaattatgaatcatttttaaagttgatttttaagatgtttttttaaagagattttcaagatgtttttagttggttgtttagcaatagaaaactattgtaatgtcttatatttttgtcgtgattttatttttgtttttgtttttgtgtttttttttttctttctgttttaagtataataaattaaaaatattagcttatgatatgttgactagttggtgatatacctcttgttttgtacatgggtttaaacccacgtgaggaacaatttttgtgtgtatttgtgtgaataggtcttgttaattattatactattatgtacttttggaaaatttaggtgcactcaattccatttgtatttttcacattcagatagttttaatcataaatttttttatgtgacaatgtacaatatagttatttaaagtattatgcaaatttttgtgaaattttaactgaaatttagacaaatttaacgcatcaaaaacaagctttaaacagtttgttgcacgcgtatctcttttattatatatgcgtataaaataaattgtttgaaccttatattttatattataaattagtttaaattttctaaaatatttttacatattgttaaactttatagattggttcgataatgatgataatgtaaaccgctcaaaccgcaccgcaccacattgtattttttgcagtgtagtttttgtaattttaaaatctcgcggtgttgttggggtttgaaaaaaatacaaaaaccgcacatgcggtttggtttgaaaaaaagtcacaactcgcaccgcgaacacccctaattaatagttaaattatttagttaagaggtcaaaaacaatcaaaagtattgctctatcaatggattattatagctaaaagatttagtttatgaaaaatgcttagctacatgtagagaagtactatttattgagcatttgagctataaatattatatcaatattttaaattagtttgtaatatatgtgtgtgatattattatatttatttatttaatttctaaattgaataaaaatatatttaaataaaaaaatttaaaaataatatagagaaattaatatatggtggaatgtaaatatatgaggtaaaatagagaaagtaaaattttagttaggtacaaatatacaaagtaattaaatttattaatttttattttcagcgagagtctctctcttgataacctccctatcctagtcagcctttgagtgggtattctctttttttttttttcttttcgactagggcttaccgattcttttcaggagttagttatggctctggtgaggggtgctgagtccacacaaattaaatttttagattttttttttatggtaaatgacttgataagtctattgtccataattttttttaagctatatttttatgtaataaattttgtgtgatatgtctattaataaatatttatattttttcttacaaaagttttaataaaatattttaaaaggtagtgtaaaaataatgatgtgacttctctaacatgtaataaatttttataataataataatttacttcaataaaaaaaataatactttaaaaatgtttgacattcatatagatggtatctcttttaaaataaaataaaaaaatccacggagatggtgtcctagtgttgtagattctctttttataactagtgttgtagatgaaggaatatgatcaccaattaatgtgattagaagtggacatgattatgatcacatggagagtgataaaaaaactaaaggcaaatatatatatatatatttatggaaaatttataaattataagtataataaaaataatttaaaattattaattttttaaaaactgttataaaa

SEQ ID NO: 120348 - DNA, 2458 bp, Cannabis sativa
  modified_base (1561)..(1562): a, c, t, g, unknown or other
agacaagtgtgtcccattcttcaatatcttgcgaggaaacaaccaattcgagtggacagaggaatgtgaaaaagctttccaagagctaaaagcagaactcgcaaaacctcccgtactcttacaacctctggacggagaaaaacttggaatatacttagctctcacggagcatgctgtcagtgccgtgttaatcacagaagagaacaacatacaacacccggtctattacatcagtaaaagactcattgagggtgaaggtcgatacccattgatagagaaactcgcttattgccttattcttgcaacaagaaacttaaggccctatttccaagctcatcctgttcgggtgtacactgacaaaccattacgccaaatattgcaaaagtcagacacctctggacggctactcaagtgggcaatggagttgggtcagtacgaaattactttccaaccccaaaaaacaatcaaaggccaggccttagcagactttgtggtagaatgcacgggcaaagaagaaagcgtaccaaaaagcaacctcgagccggcacaaacacctcggccaagtaacactgaagataagccgacatagatactacacgtagaagggtctactacagatcagctatctggtgcaggaattgcccttgtcacacctagggggcaacacctgcacgctgcagtgaagtttggatccaaagcatctaataataaagccgagtatgaagctctaatcgctggcctaaagttagcccgagagatgagagccgagcacattgaaatctgcagtgatttacagctagtggtaaatcacgtatccggagaaaagatgatagcatatctgagcaaaatacatgacctgcttgcacagttcaaaagctacggtgccagacaaattccaagggaagaaaacacaactgtagatgcgttggctcaatgtaatgtaagtgataaggcgaacttggttcctatccagttccttgaagagcctagcattactggcacggaagagattgaaatgattgatacttccccaaactggatgacactgatagccgcctacctcaacattggggaactcccagataatcgaaatgaagctcgaaagatgcgaaggaaggccgcacggtatatcatcgtagagggaattatgtacagaagaggattctctatgccgttgcttagatgtgttacttaagaagaagctgcacgactcctatctgaggtgcacgacggattatgtggaaatcatgctgccggatagagtttatctaagaaagttctaaggcaaggttatttttggccaacaatgattgaagattcaaaggccaattttaagaaatgtgacaaatgccagagattatcaatgatacctcaggctccacccaacgagttaactcagatggaaagtccgtggccctttgccatttggggaattcacctgatcggacaattacccaaaggcaaaggaggagtgcagtatgcagtggtagcggttgattatttcactaagtggacggaagccgaaccactcgcaaccattacatcaaagaaagttcaaaannttattgtgaagaacataatctgtcggttcggattgctgtacaaaatagttacggataatggcaagtagtttgacaaccaatccttcactgacttttgtgcgaaccatggtatcaccaaaagtttctccgcagtggcacatcgtcaagcgaatggtcaagttgaagcagtcaacaaaaccttgaaggacacactaaagaaaagactcaaagatgccaaaggaaattggccagaggaacttccttaagttctatggtgatatcgaacaactaagaaaaggggaaccggacagactctgtttgccatggcagatggatatgaagttatgctgcctgtagaacttgagccaccatcccacataagattgacgtacaaccaagataccaatcacgtactcctgaccgaatcacttgatcaaattgaagagaagcgaaccacaacaaacttaaagttgatagatcatcaacaaaaagtagctcggtatttcaataaacaagtaaaagctcgaaaattatttgtgggagatatggtcctacgaagggtatttctaaacactaaagacagtaagacaggtgtactcggacctaactcggaaggaccatatcaggtggtcgaagtcctcgaatctgaagcatacaaattaggtaagtatgaggaaaaaatgcaacttattctagtaccacggtattggaatggggaatatttaagaaaatactaccaataaagtaccacgtcagacgaccatactaagtactgaaagaacatttacttttaagtgaatggcctgctgggcggtctatgctcaagggtttcgaaaaaaatgaaaaagtactcaggtcggatgaccaccatttaaagtacaatttctaatttcagcaatttgttttatttcatgtta

SEQ ID NO: 120349 - DNA, 746 bp, Cannabis sativa
gttcatatttagggtgttaaacatcatacttgtgagtagatctaagatcctggtcaaataaatttccaacatttagtgtgtcttgtaaaaagttcctaggattcatggttaatgagaggggcatagaggtgaaccctagaaagggaaagctttgatagatatggaatcaccaaagaaaaagaaagaggtgcagtggctaactgggagagtagccgctttgaacagggtcattttgctgtccactgacaaatgtttcccattcttcaacactctcaaaggaaacaagaagttttgcttgggatgaggagtgtgagaaagctttcacgagcttgaaggagcacttgggaaatccaccttcgttggccaaacaaaaaaggggagacaagttgtacatatatctagcgatctccaaacacgccttgagtgtcgcccttgtaagaagagagggagaattcgaaatctaatagagaggctcttttttagttgtttgacataatagtctgatgtaggttactaggttatgaaaacaagagcctatcattatctatttatatgattccttctaaggttaaggtttaaattatatagaattaaaaaaggtaaaataatggctaaaaactcccttaagtggtcggccatacttgtggcccccactagtttcaattttgctatttatttaacaacttatcttttctttcacaaatgccatattttaattttaatcctataaatgtcaaatctattta

SEQ ID NO: 120350 - DNA, 1575 bp, Cannabis sativa
  modified_base (1544)..(1547): a, c, t, g, unknown or other
aaaataaattccaacagttttctcccttcaaatagttatttaggagatgtcgacaccagctctttaatttatgaatttacaagggcaaaattaaggtatcatggtaggatttagccctcctcgtttactgcctcatgcttgtgcttgtgtttcatattattttttttaacctttcctttgtctactcttaatagcaaaacctatggatgatctattggccatgttgactgttacacatagccctaaaccggaggtggccattgctagtggtgactccaaagggcccagatgaggaagtgcctagaagctaggcagtagtgctaatcaaggaggaagaggaagaggttccccacttgatcaaaaatagaagggtgtggtttccaactccgaaccttctaagaggcctaggccttcagggactcttggcccaagcaccaactctgggatcccgtccaaggctgaagactttcctaccccttctgctatccttttgacttccacccatcctgacgaggagtgggtccaactttgcactgccaaacataactacattgtcgacaagctgaagaagggcaaagcaaaggctgaggccttaaaaaagtggctaagggaggctcatgatggcctgttctggggtgagtataccgatgaagtctgggatttgagccttgatcccatgactgacttgttcaaccacttcctgaatccttatctggctccttttgcctcagagatggtgagtcattttgctactgacttgagttagattcctaccaaaaggtttgcggtatgcgcctcttctaacctagtctaccaaatttaggacatgagtgtggcccttacctctgtgagtctatactctaaacatctttcgagtttttctttttgctcatttcaatgtccttaccaaaccccattattatttattgttgccaaattactgctaaggtcggtcatctttcaaagactttaattgaccaagggttcactatctcggaatagggttgtatggacggggtgcttaggaagctcagggaagcagagagccaaatgcacacccttcgaaatgacacctggtagagaaggcccttagggaaagggaccaggaaactttgaactccaaggatgaaattatttcttcgacccaaactaagctgacacaggcaaagatggatttgttgatgcccaagaagaggtatagggactgacgtccaaacttaagactcttgaatatttgcacaaggcctacatggaaactgtagcgaatatgtcaatagagcttaaggagctgcatgagtttcaggaccaaacacagaaggaggacatgaaagctgggagagacgccctgttaactctgatgtcttgtaagcattgtataaaacgcttcgaggacggagtctgcatgtgctaaaaatcaaaaagatttgaaccttgcctaactttcatgctagatcctgaggctactgtgactcatttttgggagaagaacaagaaacttgaacagtcattggtagaacgggtggtgttgggctttgtgccctaannnnaactctatttcaatgtaatcttttctat

SEQ ID NO: 120351 - DNA, 1536 bp, Cannabis sativa
gagattgttaactgaggaagattccttagtttgcaaattttataaagcaaggtatttctctaatggctcgttcctaaatgcttcacttgggcataatccttcattcatctggaagagcatttatgaatcaaaagacctgattgttgctggtgcaagggttcggattggaaatggtttaaacacctatatcagtaacagcccttggttgcctgatatgaaccagccgtatataacttcttcacatcctgctataggtgataataaagttgcaagcctaatgcaagtggatcatttaagatgggatgaagatgtagttcatgatttattcaatgatcgggatcgtgtactcatattgggaattccccttcctaatacaaacttgaatgatcgatggagttggaaattcgaaagctcgggttactactctgtgaagagtgcctatagacacttaacacaagctgaacatgacacgtctcaggctggagatttttggaaaaattactggaagataaaagcccctccaaaagtcttacacttcggttggagagctatttcagggagtcttcccacacgtacacaactccaaaccaagcatgtttatgtcagcaactcgtgtccggtttgtaacattgcagaagagtccattatccacattcttgtcctctgctcttttgccaactcgtgctggaacaggtctgcaattgacatcacaccaacaactactgcaacattccgagactggtatgattctgttacccgtagcagcaccagtagcctttctgctgatgttctcatgattgcttggcaaatatggagtgttaggaatgatgtgctatggaatggtaaggtcaaaactgctgctaatattgttcttgaagcaaagtcttatcttaatcaatggttgtatgctcaaaagaatcgtttcgaaccgatccttgttcaaagtaatcaaggtttggatgttgagcattggactaaacccggagttaattcgattaaggttaatgtggatggagctatatttgcaacaatcaattcgtttggtatcggtttcattgtaagggactgtaatgaacagatcatagaagctggatccaaatgcaatattggcaatgttgcgcccgaacttgctgaaatttgtggtatcaaggaagtcctaagttggataaagaacaaagcttggcatgatgtgattcttgaaactgattcactgctggctgtacaaggcattaatagcagttcacaaatgccatctgcctttgggatggttgcttgggactgcaagaatctattatctgatttgggtagcatttctttaaagtctgttaagcattctgctaacaaggtcgtgcatttccttgcgggtagtgcttgtttctcgccagttcgcatttttcataacaataactctcctgaagagttgttaagtattgtaatggttgattcaatttaaataaagttgccatatttccattcaaaaaaaaaattatcgttttagaaagttcatatttagggtgtttaaataacatacttgtg

SEQ ID NO: 120352 - DNA, 742 bp, Cannabis sativa
acggcgttccaaacgaaccctattagattagattaatcgataaaatgaaaataaataaataaataaagtagctaattctgccctggaattccaaaccccaagtggttttctcacttaataagccaagtgggaaagctcgcacctttactttacccaaaacatgtaccttccatgtacttaggcttgaccaagtactatcaatacaatttaaattaaataatcactaccaaaacccactttttttggtctcattctcaaattatgtgtcatggaatgatgatcaacttgcgcaaattgttgtaacccgttcatgattataatagataaggggaaaaagctgaaatagccaaactaattgtttattttcttaaatcagataatatttcctgaaaataaggtaatttgatagtattttctgaaatcaatttaattctagtaatatacatattagtgtgccatgtgtgcatgaatcttactgtcatagggtcatatcaaatgtaaataaaatccattagtgataagctcaagcttaacaatttccgattttgtaggggaaatttgattaattaagcatttattagactatttttttttttaaatctaaactattcaatattggtagaatatgttatttttttttaaaatctcattttacccctctcatttgaacaacacactctctctctctgtaaacacgcacacggaggagcacacaatcgacccacaatccaccacccacaac

SEQ ID NO: 120353 - DNA, 2256 bp, Cannabis sativa
gttaaaacaaatataaaagaaatggaagtgcaaaatgggaacaaagaaaaatgagtggaaagaaaaaaaacaaccacaaatatatatatatatatatattatatgtatatttattaaaataattttacatcaaagaaaatataattaaggaagatctaatgtttgcccattatgaaggatgccaatattataattgaaccttgttgttctattttaataattgaataaatactatgtgattaaaatttatctcattaaaatttatctcccccccctaaaaaaggcctaaagccaaacaccacaaaggacatagggtgctcaacatcgataaaactaaacaaaataaaataaacaagccaaataaaaacataacatcaaacaattttacaagactttccctagcgcaaaggaggtcgcacgaaggcccaagacaagcagaccaaagacataagaacgatgccatcttccgatgaaaaaagttcacattctgccatccaatggggttaacggtgagggtgctaagacaagagaagcacatccctttggaaaaaaattgagtccctccccccctttatatcaatgacactctaaaagctaaccacaagccattgtgtaccaaagccaagacgcttgagtagaaactcatgggacactaagatctgagaaaacaggaagagaaacaatgctccaaagcccaagttcttgcctaagaagggccgctataactcactgtccccaaaaataaaagggagataacccacaaaaacccacattcgtcgcctcccaccagtccatgagatcagagttacccacgaccatcgaccctaaacttgagatacctcaaaagagacgtccatccatcttggttgatgaccactcgcctgaaaacttgggcatcaaagagccgacctcaaggagaaagaaaaagggtagacgttcatcaccaccgctcacaacaactatccaacggaggaccctccaccttcaacctactacaccgtggagcctagaccctaggcgccaccagccaaatctggccggcagtgcccaagtattagaagccctaaaacgggcaaaaaagaaaagaagcaaaccctaatcttagagagagagagagtgggggatccattttgaccacaaccttagttatggcaatagctttgttttatttgggggtattagttcttgaaatgacttttgaggttattatttgggggcattagaccatttataatgctggctacacctcaaaaagcttaacactatgtttatgatggagagtttaaagaggagggagatgggtgatggatggaatgaattgttacttttcgtaatgttttttttttcctttttttttattgggagttacttttcttagggagagtttggaaagctacgatgaaattaaaattgggtgtaattgaaggtaattatataattttgttgtttgtctgatcatgtaattacactataactatgtaattagaggagtaatttatgacataaatacctaagtttaactctcagttgtaaataaatacctaaatttaatttttggcggtaataatacctaagttatatttttggaactccgttggtaccttaccattaaatgtcaattcattatccacgtgtcatttccttattggtatgtttaaacttttttttcaaaaaaataacaatttaatgacctaaaccaatcagggataaccacgtggtaaattacttaacacttcaaagtcaggtacgtacaaaagtttcaaaattataaattaagtattattatcgttaaaaattaaacttaggtatttatttacaactgggagttaaacttatatatttgtgtcgtaaattactctaattagaggtaattgaaagacttcagtatcactctttaattctcatacccctcatatgaattgggtgtaattacttaaatatttccattttaaggactataaattattattttcctgttaattactaactattttttctaaataggacattagaaattcataagtaattaccacttcatatctaaacacatcttgtattttaaaatatggtgtgattactatgttgtgtaattactaccacaataattacactactcagtaattatacagttaattccaaacacactcttaatattgtttggtgttaagagaaaagatataatgatgtatttaaaattcaaaggtaaaattactaaattattttttatataatatataaaattactaaattatataa

SEQ ID NO: 120354 - DNA, 1239 bp, Cannabis sativa
tttctcttcttctttcatgtacattttaagttcatgaactaaccgaattagttttttttttccttatatgttttaccataatttgtatttttctcttaaatttttaatcataattaataaggaggatgctgaatttaaaatttgtgcatgaaaattaatttattaactatacataatttttatcatagtaatattggtgcctcttagcatcatcgtaatttcagttatacaattgaagttgaagatatctttgaatcgtagttttatttggtccatatataaaatgataatgtacgtccggctaggatcggattttagtggatttatattacattaattctatcgttttcaccgttgtacctactgcctatattatatatatgcagtcatcttctctatttttattttcgatttttggaaaaagaaaataaacaatattttagtcatgtggatggaaaacattctgtttgatattttgaagattatacgtacacagtctctcacccaacctacacagagcaaagattaatattaataaatagtcatcgatagaatacagccaaaatttgtaatgaataagagtttacatgaaataaatcttaattattggcttcactttttaatatacatacatacaaataaaattattattgagattttttaccaaaatataagcattttgggaatgcacactttatgactttaatattatatatatttttttattttacaccctaaaaaaaaacttctattagaaatgatataattggggcctcaaaatataggttttggacaatattggcgcagtccaatatttaggcatgtcctggataatattttattattgttattagcattttaaactgatcaataccatctcatgttttgtattgtaaataattagcaatttcttttattatttattaaattaaattacatttttttttacagtgcaggacaactttattgtgcctcttaacatttttcataatatttccaactaaaaactcaattgtcattgacaataattacctggtgcgccctatgattagtgcgagtactcagtttatattacagaaataatgaaataatataagtgatttaatacggagacactaataagattgtatagtctccacaaaaaaaaagttagtgtgaaaaaaaattaaatatcttctatttagttaaataattatacaacaaaatagtaaaaagcccccacaaaatagttataatttt

SEQ ID NO: 120355 - DNA, 1252 bp, Cannabis sativa
attttatatgtatatataatatatccctccacctctccatccttctttccaaacaacttgaaaggataactaccatactctccctcccttatattctttatcctccttcaattctccatcctttatcctctccatccatctctctcaccaaacatagtgtaaaagtaagattttttgtagtaaatacatgaatctcgatataaattagcacgcacttctaactagttttttttttttaattaaaaaaatcttactcttatttacagcactttccttctttcccatatacatgtactatgtactataaaagaactttaatatatctttatattttatatttcttagaaggaaaatgaattgttaaaatcctataagtcaaactcaaaagttaattttcataataaagttacaaaaggtgtttcccacggggatagagcacattttcatgtagtttcatttatttatttcaaccaagactaattaatttaatatatgtactcttttagcaattgatgctaattaaactatacttcatatcatattaatgatttaagtcaataatcaacattcaatagtctattctgatgacatataacaacatcaattataagatttgattaacttacattttatcaacaaataatgaatataaaatatagctatagtttattaatttattaaaccccacaccgacgacaaaatactttccgacaaaagaagaattattatttttcacgtgtaatgaaaaatctcagtactctttctttctctaccgccacaagaaaagaaaaaaaatcttaattatatattcaaattaaaaaatatttaattcccatgcttatttttttaatgagtataaaattcactctctttccatgcttaatagtgttgaatatattcagaaagatacaaataaaataaaaaaataggaaatgtaattaagtttatagattaattcttaaatattcatcaaatcccaaatgactcttcttaattaatctgaacgaagtcagaggcagctggtagaagattcattgagctaacaacaataaatctacacgtataattttatgtatctcaattatggccaaaatcgatttttttcttagaagaaaatatgtataacacttatttaaaaatgatatacctatacattaagtgttagtacctggggcggacccacattgtagcgaggggggcagtcgcccccctgaaaaaaaaaatcgagaaaaaaatgtatatgtattttaat

SEQ ID NO: 120356 - DNA, 574 bp, Cannabis sativa
ttaataatataaaaattaattaatcaaaaaaaataattaaataattatttagtatttatcatttgctgatgttttatagaaaattataataaacctaaattataaaactatgttaatatatgtccataaatatcctcattctaaaattgagagagaaatcatcattttaaactatttattatttgtattacttgttgtcacattatttatgtaaaaatacgtgcatttaaaaataattattcgtgatattatattgttcaaagtactgctgatttgaataataatactagtattattaatgcaatactcatgattctctgacaacatatttttttatttttttttctttagttattttggttagtttttcttaattaatactaaatttactgatcatttttttagattttttttttttttgtctttcttatataaaaagatacaattatttatttatttatttgagtgaagtgactatgtctcactattcctttcatgttttttttttttttttctcaagtttacacctatatattttttagggaaaaaaacaaaaaaaatacaaaaaaggaaa

SEQ ID NO: 120357 - DNA, 1748 bp, Cannabis sativa
ggtaaaataatatccaacacatgcaagtcgccaaggccagtgatgatgaaaaatgtttatgtttttcattgacattaagttagtctatagagaattggtggaaaaggttgtctccaagattgatccacaattagagagacctacaagtaatgtttagaaaatactttatagcagccaaggactatgatttggaggctagctccttgaccagcgtcaagcaactataaggagaatgttagaagaagttcatctagtgcatgatggatgtggttgccaaaactaaagtcactaatgacaagaaaatggtggctctaacataaggacttacaaccgtatcattattatagggagatctccaatgcaaaagggcagataccttgagtgaattctaaaaacgagcccaaggattcataaatctagaagacgcttatgcccaagcatatggagtactccttgcacctttcaatgaagtaacaaatgcctgaccatcgtagatgaaaacactcgacatttaccctctgccaattgtttttactactcctacagtatatgggtcatgtacttccgtagagccagatgtacaggctagtttttccaggtttgaggctgcacaaactggatgcagtaccacccccagaaaaacaaaccaaaaagtagaagttctagagtccaatataagccactcaagaagtaagcgaagtacaaagggtccaaatcagagtgagtctatgaaaaaaggtaaaatgcaagaataagggtacactgagtacacaagtctcatagatactcaagataatgtatataaggcaacatataacatggtacgctataggaagcctctgctaatgtacaaaggcataaaacacagtagagacccaaacaaaaagtgcaaatatcatagtgatattggtcacaccaccaatgagtgtgactacttaaaagataaaatagaagggttggtacaaaacagacacttgaccaattgggtgagaatcctagtcatctatctgggacaggcagtttcacatggacagcttttcattcccgaacaacagggagccataaatcctcctcagggagtaggccacccacaactctagcagtggcagtagctatagaccccagattgaaaaatttgtacccacatagaggtgcatcactagctttagataatcatatagcaactaatttaggtggaccctatattgccagaagcactcgaaatggaaagaagcggtaccttaatgtgtggaaccaaggtgaagcttgccacttggtgcagtcacctacccagcgtccaagaatgatgaatcttcgtatgacttttacaaaagatgatgccaggcacgtgcacttccctcataatgacccattggtaatagaagcccaaatagccaacaaaagagtttctagaatcctcgtggataacggtagccctacaaacattttcaaaggagcctttaacaccattcgtctagtaagcaaacttgttaccttgtctgattcaactagaaggcttcaatggagatacattgatccccatgggaaagaaacaactcctgatgactataaatggggaagctcctagaagtaacgccgtgtcctccttccagtatagcacatttttgatagtcgattatcctactacttataatgctaccatgggaagaccatttttaatggactttagggtcgtgattgttgggattttatgccctaaataaaacccatttcaatctaatctgatt

SEQ ID NO: 120358 - DNA, 2197 bp, Cannabis sativa
gagtcaaatacctggaaagcgacgaaatgaaaggggatctgagcttacaaacctaagaagcattcaccttttgagctttggcaaaaggtaaagctttccttctgcaaatcccaccagggaagtgaagagagagagagagagaaagaagaaaatggtgaaaaccaagtgaaaatgagtaatggagagagagagaactgagaactgagaaagatcagaggtaagatatgatgagtgagaacgatggaagaagcatgagattttttagagagaggtcccacagtcgtagtcttctggcatttagctcgcgaggacaaacgaagggacaggtgagtgagagcactttgtgaatcgccacgcgccggtttggcgagttgtacgaggccaaaaatttacccccacgcacgaatgaccatcttcgtattagtcttctgttgctcatcacgcgttcttccatcacaattctccacgcgctctaaattataattatagaaacaaaagtagatttagtttgcaatctccaattacaatttgttgtttgacttgtgcgtttcaaatttatactgaaatattttttttattgcactattcgttatatttgtgataatataaatgttcagaaattgtaattagtctcttcatataataataaaccaagtgaacctttttcttaagaaaaaactactttttcttaaatgaaagtgttttttccttagtccccatcaattcaatattacatgaactccagttaatttaatttctcaccttactcgacaatttactcataagtatctatttttatttatttacttgataatttttttttagaatccttgataatagtagacagacatgcaccttagtccaagtctccaagacagaccgaccctatacactttctcaacccttttagttgaatcatcttaaatttttcatatcatttcatatctatatgaagtataaccaatacttattatacaccacactctaagtatttatagttatacaaactagaaaaaaactttaaccaatgaataaaacctcaataaaaagtccataaatataaaagtctttacttaatactttaatatttataaatatagtagtgaacaataatattaattataggtattgaaactttaatgagcagtttaaatgaataccatttatttcacttgaatgaattcattttcctaataattgcaaatttatatttattaggtaaatttatagtacacatactctaaatttcaatatgcaaaaaaaaaatttagtcaaactttatttcatgatcatgtatgttatagttatataagatcatgttaactcgaaaattttccctgttaatatggacatcaatgtttgacatgtggcaaggagatgacatcactgagttgagtagatctcagtcataacagttgacttgggaggggaccttagccttgtgcccaggttgatattgggagctccgggatagaaatttggacttcaatagcttgaatttaactcgttatatttcaatatatgtaccatgaagacattaagcaatcaaattacagtagagtaaaattacacgaacctgcaccccggaggccaacatttgcatcttctttgtcttcatcaaaaatagggaaatatgtactttcaaggaagaaaaaacacttcttgggtgccagaagcaaggtccagcgctcaggctgacccttagggctaggccaacgcccaggctgacaccttgggctagcccagcgcctaggctaacacctggggctggcctagcgtccaagttgacattttgtcaacctaggccaattccaatgatgttttcggagatctcttttgagcatcttctctgttttctgcaaagattaagattcaacaatttctgaggaccaaacggaacttttgaagggccaaaagagggactcagcgcccaggttgacacttggcactaggcctagcgcccaggttgacaatatgtcaacctgggctgtttccaatcaagttctcaaaaaaatgttctgggtattttttccatcattagaaataatgaagattcaagcaaactcggggagaaaaccacaaacttgagaccctggaaacgggacccagcgcccacattgataatcaacctgttgtgctagtttcaatcattcaaatgccaaatctaattcgaccattgaatccaaaatggtcaaaa

SEQ ID NO: 120359 - DNA, 778 bp, Cannabis sativa
atgactctgagctagttgtgaatcaaatatcgatagagtatcaaacaaaaggaaagagaatggatgcttacgtatcttgggcccatgaactattatagaattttaaaagatataatatccaacaagtccctaaggaccaaaatggtcttgaagacatgttggctgagttaacaatagaccctaaaatagaggatcactgagttgttttcattgctcgattacttacaccaagtatctagtcactgggggtaaatgctatgacaactctgcctcttggataggccttatcaacaaattctgaagttttggagaactactaaaggacaaagttgtagcatgaaaaatccagtatcagtgtccccaatatgtagctatatatgataagttgtacaaaagagggttgtctataccatacttaaagtgcatagccaggactaaaattagtgcagtgatctacgagattcccgaaggcttttgtagagaccaactttcgggctgagtttgtttaaaaagattatcggccaaggatatttttgggctataatgaaaaaggattacatcaactacgttcaaaaatgcgagcagtatcaacgttatgccaaggtcccaagggctctgctaactgaaataaccctcatgaaaagtccatggcctttttatagtttggggaatcggcatagtaggatctcttcctacttggaaagaaagagttaagtaccctgttaaccctgaaaattagtgcgttaatattcaggattattctgttggaaattatttt

SEQ ID NO: 120360 - DNA, 705 bp, Cannabis sativa
tcgtgaaggaagacttgttataatagaaacaattgtgtacataccaaattaattattattattattattataattttaatagattttaaaagaagaaaaaatgaaattagatagatttttattataggaagccactttgtatgtacagcgagattgattataaataaaataaagattatttttttatttatttatttatggtaatgatttatattagttttaagaaatataatattgaaatgttaaaaaaaatattatgtctttttattttgttttgtcttcgtaaagtaaaggaaaatttgactaattatgtatttattggactaaaattatttttctaaacttatgctattcaatattaatagaatatgttattttttcttaaaactgcattctcccatttgaacaaccctctctctttctctttctccttttatctctcactctctataaacacacacacggaggaacacacaatcggatcacccacacgatccacgactcacggaccacctcgacctcgcgaacacaccacgcacacaacccacggaccactgcgaccacaccacccaatgtcgataatgtcttcatcaaaggtaatgggaaacttacgaaaatactagaatttgagttaacttttacaaaaatactgtcacacgaatttttttttcaaaaatactatgtttttataaaacactagtaaaa

SEQ ID NO: 120361 - DNA, 1685 bp, Cannabis sativa
gaggagactttggttgagtatgttccccgcttttgttgcatgttgggctgaatgattttggcaaatggaagtaggatattgtagctgtcgacaactgaataaatcataccccccaaatgagctgggaattatggggcttagattctcggtcatttgcattgagtctgacttctgtctccttccaacttctgaaaaggagtatcaagcatatctttgcctcacaccctccttccgtggacgtctttgagaagcgcagggtcacctgcaggcttttagggagcaaaacatgagttttgagtgagtacccgatttatatcccaacaaccatttgtctggtgcaaatctcataagggatactctaggctatttgtagcatggggccattggtttcccggggggagagctaggcgtgctcccttaaacaatcttccttgcgttggggtttattgcaacgaaaaatcatgtcgagtctcgcagtagcaagctttcggctttcactaagaaaggcggaaagcgcgcatgagctaagacattaatttttctagtaaacaccaaagggcgaagtattatttggttcacaaaagtcatgctaaactttcatgaggcaggcttcgacttccaggaaggaaggctgaagttgcctaaaagttcaagcctaaactttgcttgaaaggatcaaggggaagagcatcacaaggaatccttgtgttttacaaaaaatattgattagaccctctattttttttaaaaaattagaaccctatattttctaaaatagtataattaagatcgtaagctcaattttctacaattccttacccaaacagatgtagaaaatgtaactaattttatcataacacctctacattagattattattaagttttattttgacaaaatatcaatttaaggtactattattaatatttttgtaatcacgacacgtgaattttaatcaagaaaagtcaagaagtcatcagctgaccaacttcttaaactgatgctccgggacggtaaaggtcccatctcgcggaaagggcttttatgattgggagttccttaacttccagcaacggagagagtatccgtgaactgaagacttccccagtcccaagaaccaaagccatttgttcgccaaaagagtaagagttttttccagaaggaccaaggcatgctaagatgcgtcaaattgagctacacccttagcccgcaaagactttccttgtacgtgtcagcctacggacctagtgactaggcttttttaggtacatcgtcaagggttgtctcccacgatgcgcaatcgtacagggcatgtgcgtctcattgtacttggccaaatgttaatagctagggataagggaaattcaaaaaggaaaggccttgggatgacacgcgtatgacgcccaacttgtacaatctgacacccttaaatgccatatgaaaaaatgccacctaccaatccaatgcttagatttcgcccaaggatgatcgatccaagccagaacacgaggagaagttggcctataaatacccttgtaaagcacaagaggaaagggggatcttttggagggcaagaatcattctttgccaaactttgcaagcacacttgtataaaaccagatagtattacacctaaaaaaattccagaatattcctactaagcttcctcttcttcaagaggaaca

SEQ ID NO: 120362 - DNA, 2206 bp, Cannabis sativa
  modified_base (49)..(54): a, c, t, g, unknown or other
actcagaaattctcattcactttctctttctctcttcatcttcttcttnnnnnntctcatctattttatattattttatattattttataacaatattataatatttaatatataaaatttgaaaagtattaaaaaatatatatatttattgtattagttatacttaataatatctttttactaattaatgatgcatcatatttaatatactacatataatatgcatataaaattaaaattatatttttgataactaacaaaatatacactcaataataaataaatttttatgtattatataagaaaaattatttaattgtgattttttttaatcactgcccataagtaaaaagtatatttaaggaaagaatgattattttattaaaaaaaattaaaataagaattaagatgacttgctattttaggtaattgtttttttcttaagaataaagaatgagaatcaaaattaatttattagaataattgcttaatttttttaaattttcataatgacccaatttttttaaagtattaataatacacaatacaataccttatgatgtgttattctacatgtcaaaaagttctaatctagatgaactcatccataatctctctattatccatattgactactaaaaaaattataaatttcttatggcaaaccccattaaaatattattatggtggacacagttaatccatatatattttttttattttgtattcattctcttaaaatattttaaactaccatttgatgtatatactggaaatagtttttaaaatttcagtttcaagctttcttctcagagctaggaaccacgtatccaaacgctttaaaaatatatgatgactattaaatatttcgtccctatgaaatatatataaactagaattcaattgtggtaataacaataacaacaaatacatattaaaataacaataaacaaagagaataaaacttaccctgtatctttttggcaaaaataaattccaaaaaaacttctcgcaactcttcaaagatttagtgaatttgaaattttcaaaactatatttatttggtgtgcaaaatttaacttcttaatattcgatttattttcttgggattttttagcttcaacatcattcgcatctacttttagttttttcatttgtgttcgttccaataataattttaataatttctcattacgaatattttgtatttggagactttctaaattttttataaataagtctaatctctcaaccatataactaaatttgacctccattaaaacaaaaaatatcatcaaataaacttacacacatctaagactcatatatgcatcactatatgtaatattttttcaaaaaaaatatcacaaaatactcaattttgattttatatatcaaatatattaattattgttgatatctcttcaagagtaggattgatatcaattagattatttgtgatctttattattttgaatataaattatttttaaaatttttatattatttgtgaatttaatatcacaagtatattgatattgtaatttttttttttttggatataatacaaataggatgtgattgatgatgaatattacattactattatgcatgcatgcttatatgcatacaataggatgtgatgatcaatttgtgtggaataaataaactctatagtaattttctaaaaaattatataaaagacactataatatttaataggattaattacgcatacaaaccaaaatgtcaatttatttaccaaattaaccgtgtctgttttattaccgattatttattaaaattgtgttgacacgtataccgataatgataaaatatgtatctctcttcattgatacatgatgaagttaatttctttttcttgaacaactctctcttttgctcaatatgcatttttgtcgtcttttttttttagcaatctaaaatgatgggataaagatgaatcattttttttaagtcctttcttttttattaacaaacaatcaaacattctctttctttttttaataattttaaaaatattttttagctatactaataattattttagttttttaatctttagttaactattaatatttagttaaccaataagtaaacaatgtttaaatcagtatatatcaaacaacttcataagttactaaaagaattttgttttttatattttgttaataaatgaataaa

SEQ ID NO: 120363 - DNA, 1625 bp, Cannabis sativa
aggaagctttgtggaagagttgctctttacaattgtaattgtatcctgtacttttctgatttcatctaatcgatacagatttttctctcaaaaaaaaaaaaaaaaaaagaagacgtgcctttctaacgtttacactttggtattgaaagaaagatcaaaagtgacctaggtgcttattaacttatttagtcgattgtgtaggatttaaggagtaagttcgtatagtaatcacatttatggtgtttgatatacatttaagactatatataataatgttgtaaagccaatatatataaacaagctacatacacatgtaagagtactaaattagtttcttagggttaatcattgcacaacacaataattcagattctttctagtttctttgttcatagaaaaagctctctcttttgcttctctacattttacatagacaatgtaaacgggctcttgcatttgacagcaacttttgtgattaataagaaaaaattaatggattgagttgggcctcataatgaatgagatattgttaagtcttttctttctaacaaagggatgcatttattagtcatctgaaatggattttgtaatgattcatgaatgacttgttatatgcattgtctagtcgtgacaattatgaatacgtgaaatgaaatgataatatttatttggtggcactgttatatctggacaaaagaatgtaacatatttttcctgttgtactacatatacacagaaaatttattaataatttaatatcaatacagataataaatgcatatgtaggagaacgtccatatttatttatttatttattttatttatttgctggaatatcgcccatattcattactctacgaaacgtttttgttcatgatatgtcaaattcttcttgcattattacaccatttgtagtgcaatgtaatatatctataatctataacttaaataaaaatcacaatattttgggtttcttttgattaatttacacatatacccttttaaatctataaatataacaatataaacaaaatacaaaatattttgattattttggaggtattatttagtataattcaaaattagtgattgaaatcaaatggatattaaaaaccaagtaagaataaatttgtaattttaatatttgaaaaatattattataacaataatagccataaaaatataccacattatagatttactaatattatatattcaaatatttgaaacaaaatatattgtattaaataaatcattttacatatcaaatcctattactaaagaattctaataaataaataaataattgtaacaccctaactagcataggcgtgttagtgtgattttaaacgtactgtgcagctcactgctaatcaatgaggttaatgaaaaacgtgattaattaaaatttgcttatttaattgaaaacttaaagtattacatatataaaattccaggatcccgtttacaaaatactttgaaaaagtttgctatacgcataaacaaaaccttgtcgcccatcgactatacaacaaaagccttgatgtcccaaagatcgtacgctccaggcctaaccgctatgacaagtacaatcttcatctgctcgtacttacggctcctcaact

SEQ ID NO: 120364 - DNA, 886 bp, Cannabis sativa
  modified_base (654)..(657): a, c, t, g, unknown or other
gggcataaaacccaacaggtagctactagtgcagttgattttaattttgattggtgtattgttggaagtgttgataggattggacatattaatttacacaaaaaaatttatcatagccgagtgatgcatggattgtgtatgtaatgttttaaatctgatttggtgaagggtgaaagaatttggtgtgaatgccttgaaattgagttggtgtggtttggtcagattgggagatttttgagcaagattggatcattgctagagtagtgtattgttggaattaggggtgaggtgctgaatagttgtaataagaaagcagagaagaaatttgttgtgttggggtagggtgcaagtgaaaaagaagagaaaattccgaaagttaagagtgttgccaacaagaaaaaaaaatcacttcatgaaattcctgaagtttcattgcaaggcagccgagataaagtattacgataaggtggacaatcgggaattttatatggagagaggattagtagccgatatagaggacattgacgaattacctgaatggattagtgaagtggttcataagagaaatttgggactttttatcaagcagagaggacaggcggttatggaagttgttaaagaattctacgccaattttttgtcccaagaatggcnnnntgaagtggttgtgcgtgaagtaccagtggaattctctgctgaaacagtcaacaacttgtttgagttacaatcaatccagtgccattactcttcccaaaaaaggcaagtgagcgacgagacattgaatgacacgatgtcggagcttgccaagccagagtccgaatgggatctcgataattatggaaaccttcgctttcggcgcactgacttggagcacgatttgaaatgt

SEQ ID NO: 120365 - DNA, 795 bp, Cannabis sativa
  modified_base (272)..(279): a, c, t, g, unknown or other
actctcggtgagaaactcgtcaagatcatcattcgttttggaaatcgataagcattgaaacttttcttttcttgcaattctttgtgtgtttttaattttttgagtttttattatggttttatttgggctctatatgatctaggtaaatattatttctcaattcttttttttttttgagtgtagcgtaatggtattttacaatcatttaataacttaatagcttcaagctcctaggttcgaacccatcacctctccctttttcccatccctcnnnnnnnnctaagctagccttagtggctttatattatttctcaattcttgtcactctgaattttagctttcaaatttttacaaaatcttacaatattattatttttttttttttataaaaatacctttatttgattttgaatgtgaatatccaaactttttagagcaagaaattagatatttaccaatttttcctttgaaccaaaatcaagaatttttaaaacaaaacacgaggagaatgatgagcgaattagggaacatatcgataatttgaattgggaaaatgtgtctactcgctatagacgcttcataaatggaatcattgagagtagacgttattttatgaattgcgacttggcatgagctgtattatctaattaaatatcccttagccaaacttttatttttacctcataattattgttgcttttgttgagttttatgctctaaataaaacttatttcaatataatcagacttattagttaataaagatcagaaataacaatttatgttgcatggttca

SEQ ID NO: 120366 - DNA, 1369 bp, Cannabis sativa
  modified_base (102)..(114): a, c, t, g, unknown or other
ttctactattgttttgagttgttcagttttgtgttctacttgtgttttataaaaacacaatatttttgaaaacttttccatgtgatagtatttttgtaaaannnnnnnnnnnnnccagtatttttgtaagttttcttacatttaatacattaactttgggcccatcttccgtacgatgggagaccacttgatgtcgataggtgacatccgtatgctacctctacgccctgtagttgtcagagtagtggtcgtcagacaaggggtatactccctttagtggagtgcgcactcttatagtctgacgtataggacaaagccctaacattgtggggtttggtcttagagggccttggcttttgggatcatgtcttttggaatgaccctctggaagtatcccaatggctcattcggagggcttctgttgtttcttccttttgggcatgatgccttcccgaaacttgagaggtttgggtcatgatgcaagtggtctatattcgggatggccttgcgactcatcttttagtgtggatctaacccattacttcaattagatccgtgattgggcttttgttggctatctttgacttggatacgttacgtatcctctttgtggaaacacgtacacacaatatgttggtattcaaagcattagtgaccaaatgatgttaagctcaattgcgtcgaaaatcacgggctaatacttgctaagtaaaaaataaattcgccaaagcgatatgactcaaaaactttatttcattctcattctcatcttcctttcggccacctattcttttctcctttcacttttactttcactttcattcattctcattctctttctattaggttttatgcccttatggaactatatttcttctattatacacattgattatcaataaaatagatatatagaaatgaatttatactgaacttaaacaagcccaaaatggatttgaccaaaaaatttgggacaaaaattctaccatgccatggcacatctctcagccttcgtaagaattattctctgccattttttccactttagtgcattggcaatgaatttctatggcatgacactgaaccaattttttcaattctttaattttagaaacccaaaaagtttatcaaaacttcacaaaacttctaaagtatccactttatttggtgcgccaacaacaaatttacatttcttccttatttgttaaaacttgacaacacgaacaaactatattgtaaaataaaactaaataaaatgaaacttgttgacgcggtttttcgtcaacggatctaagaagatcgtaaaacgagcaagatgaacacaagcaatagttaatcaaagtaaaccggtttgcaaaaagaaattcac

SEQ ID NO: 120367 - DNA, 947 bp, Cannabis sativa
attccatttggttttcgagattagcactgggtaaactagatataaagctttcctgaggaactctatagaggttagtttctcgacttctgctttcactacctcagcccagaccatgtctaatggtcttctcttctgtcggaatgggtctgtgtctttgtcaatgttaagagtgtggcaaattatattgggactgacctcagtcatgtccgaatggctccacgtcaatacatcttgattctttttcactatggacacgatttgtctttgaccaccaaaagtaaattttgtcctactttgatgattttcataggatatgtcttattaatgcatatttattcaacttcttccaatagtttgatcattctttctacccatacttgaggatctaattcacctcttctcgaattaccccttatgtctgatgggcaagtattctgggaccctcttcttcaatttcttctctgaccataaaaactgacttggtttagacattataacattttttggcgcttctctgattgccttttaccgcaccaatgcttccattgtcgcttgtgaacttcatgcacaaatgtcaaatgaaagttacaacttcaaaattgactaggactggttatcctataatagtgttgtatgcaatgggacagtccaccactatgaacatgcaataattgaacgcggaggttgtgttgcttctgactacacccccgttcaacgtaactaggagctgaatctttcccataggtagtaaggaatctccattaaagctttgaagctggatagtgcatgacatcaaattagcttcaagtaacccaattgcttggaaggcaaccttgaacaggatattggccaagctttctgtgacagtcagtagtcccgtgatccataaggggaaacaccgggtaagctgtgcaatcccacaccgcctgaggaaggtcaagtgggat

SEQ ID NO: 120368 - DNA, 3093 bp, Cannabis sativa
aactttataatattttattagttgccaaaaacctcggtcaacaataatattataataattcatattgaaacggataataaacatttattttttaaaacaaaatttagtaagtttatttttaaatttcaattctaacttgtaaaattatttgtttagtatttttttaatgaatatgtgatattatatataatgtataaaataaactatattactacataatataattataaacattgattagaataacataataaacatacatctgaattttattggttttttgatgcttttaaaaactataaataaacatacttctataatttaaatacattaatgtttatagttttgatattatatttttatagaatatttattaaattatatttattctaaataaaatgaataataaatatttttttcttattaaaactttttttatatataaatgttacaactgtttaatatttatttatttaattttacaaatttgtaaattttgcatttttataaatatttttaattattaaaaacttcaaaatcattgctaaaataaacataaagcattattattatgatgtcacgcatgaatcgcaataatatataatacacattttgttgtttttttttttaaattacatataaacacacttttaaaatttatatatgttaatgtttataattttaatattatatttcaacataaaattattcaaaatataattattcgaaacaaaatgaataataaacatctatttcttaataattttttttctttataaatattaaaactgtttaatatttacttttaaaattttcacaaaattatttattttgtatttttataaagattttttattattaagaatttctaaattattgtcacaataaacataaagcaattactattatcatgtaaaacatgaatcacaataatatataatatacattttattattttttttttaaattatatataaacacttttaaaatttatatacgttaatgtttataattttaatattatatttcaacataaaattaattaaaatataattattcaaaataaaatgaatactaaacatttatttcttaataattttttttatttataaatattaaaactgtttaatatttacttttaaaattttcacaaaattatttattttgtatttttatataaaaaaaaattattattaagaatttctaaatcattgtcacaataaacataaagcattactattatcatgtaaaacatgaatcacaataatatataatacacattctattattttttaaaactttaaataaacacacttttaaaatttatatacacttttaaaatttatatacattaatatgtattattttgatattatatttcaataaaaaataattaaattataatcaatcaaaataaaatgaataataaatatttattttttaataactaattatgaactttttgtttcttaaaagtagaattgtttaatatttatttatttaaattccatttctattgtttatttcatgtttttataaatattttatattattaaatatttctaaaccactgttataataaacataaaacattttctaacataaatcataataatatataataaataataataacattattattcaactaaaaaattaataataaacattttaaacaaactattgtgttacaaaaatctaattatggtaatttgactcattaataaatttaatataattaaattaacaatttgtatgattttatataaatatgttttcaaatatgtacatttttaaaattgattttttttgtacattttttgtaataaaattgtttttattgtacactaatgaaaaaagccctatttgttatactatataaaaattaattacagtaaacttaaaaagtaactaaatatataactttaaaataattaattagcaatttaaatatttaccaataagttatgtgaggtttttttttttttcttaactttattgtagcttattagtttattaaatagacttgaaagtaatataaatatttttacaaaaataaaattaaaaaattacataaaagtatttaaaacaacaaattaatttaatataatctaaaaataaatacataagttttaaagtagcaaaagggtatataaaataattagtaaaggaaaatagtagcttattatattatatgacaacttattagtttcgaaaataaattttaaagttacccaaatatattttaaataataagatagcataatataactttaaaatagctaattgattattatgatattcacaaataaattttaggggtaactaaaattttatctcaaattatataatttatgataaaatcatttacataaaaataactaattagtttcttatcagcatcacaagtaaccaaaatgtcacttttaaaaatccaagaaaataataaaaaaaaaatgaagtttgggattaatatcattttagaattaaggtattttttaatgacatggcaatgtattattgtaattgagatttattaaaatatttttgtaaatatttatattttatgtatattattgaaaaattccaatttacatggggtaatatttttttttatagttatattatttttaccgtgatacgcttagaatttcttttttacaaacttgtaaatccccctttttgccatttgttagcttaggatgatgtgtttaattttattttttaaaaaaaataaattctgatggaaaacttgttgtgttgcagttttcctattattttatagaaaaaattgaaaaaaaaaatgagagaattagtttaatgtcttattgttatttatatatttatttttattttgtagaggacttagtaaactttcattacttttttttattacttttattactttgatatatcagttatatcttcatggcactttgtttgatttgcttatcaataaatatttcgttttcaaataatattaataagaaatttttacactaaaaatacaaaatacatattttattactaaaatactaccacacggttaagcctacatttttactcttcaactttattttattacaattttac

SEQ ID NO: 120369 - DNA, 1710 bp, Cannabis sativa
gtttgcattattaggaaaagggagccttttctgtttagctaaaggacagatgtgacaaggctcattactatgcaaattcttggtattacaatgtaaaacatcttaaagtatatctaagtgtttatttgacaaatgacccaaacgtttgtgccaaacttcagcagaggtgaaagcattgatggaaacgattttggtatccaaaacatagagaccattattcgaatcacctttgtcaatcatcttcttggtttgtgactcctgtatgtagaatttatcagcatagaacttaatagaatgattatcatctcttgttaaacaactaacagagataatgttaaatttaaaaaaaggagcatacaatacatcacgaagaatcagatgtttgccaagatatacattaccacttctgttcacaatcaaatgttcattattaggtaaaaacagtttggttggttttatagggtgaacactttgaaaggattttatatcagcacatatatgtctatttgcaccagaatcgacgatccaagaattgacttcaggtaaatatgagtaattgattaatactatacctgacttacctgttgatgatcctggatcagtgggctgctgattgcaggtctgggcagcaagaagactcagcagttgctgatactgacttggagttaactggggcagcacagcattgttctcattagtgctggaactggtttcattggaagcatggaattgatttgttgtagcttctttcgacttcccagttttgttatatcacggtggataaccgtgtattttataacatttttctatggtgtgtccatgcatattacagtgtgtgcaaaagggcctgccacgttttggtggttgatttttcgaagaatctggttttcctgtactcttttctccttgaaaggcaaaagccatactaccattcgggtctgaagatacattttgtcctcccctttgattttcttcctgtgaaactaagtgaaaaactctattaatttcaggtaaaggatccataacaagaatattacctctgacttgggcataaaaatcagatagccccatgagaaatgacataatgtactccatgttgtaatggtcttgcaatttcttgactccaacacatgagcatccattgcaggtacaactaggtctgaaattggtcaattgttcccaaacggttttgagtctagtgaagtacatgctcacggtttgactttcttccttcaagttcatcaagtcttttctgagattgtagatatgagcaccgttttttttgttggaatcttactttgagatcgttccaaatagcagaggtcgattcatcatataaaatgctagataaaatttctgtagaaaccgagttaatgatccaagaaatcacaatgttgttatttcgaatccaagcattgtaaagaacatgattagagataggaggtttagaaatagaaccatttaagaagcctagcttgttcttgaaagaaatggctaactccattgcacgactccaagcaacatagttgtcttgtccagtcagcagctgggaccccaagatatttccaggattatcaccatggtgcagaaaatatggatccgagggatcttcaatctgacttcttgatctggttagttgtgcgttgactcctatatcagccacctgactttgatttttgccattgttggacagggtggaggttccatcat

SEQ ID NO: 120370 - DNA, 2593 bp, Cannabis sativa
gagcaccccatttagaggcttaagacatttaggaacaagcccactatccgcaatgtcgtgataaatgccataagaagttttgataaattaagctttaataaagacttcacgatagaaacatagcgaaattaagcaattgatttaatcaaaaaatattggactagttagtctcttagaaataaaagtgaagaataaaaatatgggtcgctctatgttagtttatttcctggttgatgctttactgataataacccttggctagataaaaagagaataattgtggcttgggattcttgtatgtattttatagatataagaatgtgtacgagtcaaatgattcattgtattgctcaatcaattcatagccctgaaaagttttatatcacttttgtgtatggatttaatgaggaggcatagagagaaatactttggcaagacataaaggacctaacaaatgaaattgatgaagcttggatggtagtaaagaattttaatgagatattgaatcatatgatgaaagagtgaagaaaaaggctcacaacatgccttctaagagcttttgagaatgtttgacacaatgtcaaatggaggatctcatgtactcatgttatttctatctttatttggaataataaatagcaaccaaaagaaaaaattctctctaaaattgatcgagctttggtgagctcaaggtggacaaacacacttccaaatttagaagttgttttcctctcagaaagtagctttgatcatagtcttatcttgatttcttttatgtgaatttgattaagaaatccttcagatacttcaatatgtggaagtcactcacaattatgtgaggaggttagaaggagttgggaggaattgatttctggtactccttatgtacaagttagtttgaaaattgaaaaggcttaaacaagtattaaaaagcatcaataactaaggattcaattaaatacataaggcaaaaattcaagtaaagcaagagatgttgattgtctaagatgctctaaataaagacatgttaaatagtcttttaatggagaatgcgcaatgtgtcagagattagtactctcaacatcataaagcctataatttttttagctcaaaaatctataacaaattggatcaaaaatggtgatgaaaacacaaccatctttcatgctgctttaaaaatatgaaaaatattgatctcacttttagctaacgacaatgagtcaaattaaaacgattgtgaataattaaatgacagaatataaataatataaagtaaagaaaatactaaattttatagagattcgaccatttattgatggtaatatccttctcctatttagttgtattgacttgtgagaagatgaacaagaatgtcttgatctctcttgaaaagctcttacaataatctctgagtaatttactcttggatcgaaatttctctctttgagtgttctctctaaatgaatttcctctccctaaatagcaaggtgaatctactatttatagggctcaattacatgaaattagttttcctaatcaataagaaataaaatagaaaactaaatttaggaattatactgttatttgcaagattgagaataaatgagatgtatctctaaaatttataactcacatcccctagtcggtacatgtgagccacttgctagttggatgtttatgcgtaccctgctcggatgtcacagtttttgtatgtgaacttaaatattaatccttactgtacggcttattaagagtataatttcccattcacgtgataaaatgtactccacgtgtcacttagatgaatgccacgtcatcgtgtaaaaatttagataacatttacccttcaagtccgcgcgagatcttttgggtcgcacgtggacttactcgggcacgaagctaatcagatgactgaaaatccaataaataatttaaagattttgtgaagagaaaatcaagcttatttatatttacaaacacatatcttaataaataaataaataaataaatataaattcaataaaaatataaattatttaaaaaaaataaaaattaaattaaaaatgttatgtttacttaaacaaatttaatttttttttgagaaaaagtagattcaaacttgttatatacttttttttttgtctaaatagatttttttaataaaaaataattaatttttaaattgcttaattagttttaaaattataaattatttttatcattcaaaataattttttttaagatctaaattaattttgtaagttttataaaaagaaaatattgaatctttctcatttttatttggtggggatatgatttgatagttataaaagtttaaatgacaaagttgtgaatttacaaaaatacatcaacatttaaatagaataatgtgacagaatctaatagaaaaactaaattcctgtaaatataaaaattcatttaccaagcaaggggtgtgattgtagaaaaaaaatacaaactaacttgtcaaacagtttaggggtgggttcactatataaataagtttgggataattatataaggtacaattttttgaaaaaaatattacatttttatatttaaagattttttt

SEQ ID NO: 120371 - DNA, 5093 bp, Cannabis sativa
  modified_base (4603)..(4605): a, c, t, g, unknown or other
gaataattcggattacattaattcggattacattgaaaattacattgaaatagattattgaaatagatttttatgaaatagatttttattaaatagatttttatttagggcataaaacccaacaacttgggccttgatttgggctcctttctctaatattttactttcatttttgttttggacttccttcttttaattttgctacttttatttctttcttatcttttctttctcttcctcaataaaagaaatacactttaattcctacaaaataacaacaaattaaattacaattaaatattttctatataaaaatatatcttgttaacttcatgaaaatattgatttaaacttaatttattttgaactttaagatcatgaaatgtcaattttcaccattaatcaggaggtgtccaacttgtattggaaccacattgcataatacattatcctcatatttgccaattcagagagacaccaaaacttgtttggtaactctcacttcaccactattattcaaccattacaacttgtaaggacatggatgtttaagtgtcggaagcaccaacttcttaactatggacgaactagcgacgttagtacaactacccccatcaataatcatactacataccttgtctttcacatgacaacgagtatgaaaaatgttcttacgttgtacctcttcctcctcttcttttgcttgcgagtttaatgctcgtctggtgactagtgcaagcatgtcgttgtattctggcacatactcttcatcttctatagaagcatcttctaatggtggcatgttagcaagctcttcttcatcttcagagtctaccttgccattttctcaaattaccataaccctcttgtttggacattggctagctatgtgttctcgcccctgacatttgaaatactttatctcactagaacgggatgatgtaggggttgtttttccttgagggattgtagttacggtggctagtttaggtgtagaggatgaactaggttggtcttctttctttgggaagtttgacctctaggctgttgtatttggattgtgtggactcgatcttggctttaagctcaaactacacttcttgagctacctttcaactttgatttccatatgcaccaaatcttctgattccacattatggtatagttcaactatgttagtaatctcttgattcaatccattcaaaaaccttgccattgttgtctcctgatcctcttccacatcggctctaatcatagccatctccatctccttgtaatactcatcaaaactcttataaccttgatgaagaccttgcaacttgaggtgcaagtctcgataatagtgagatggtacaaaacgctgccgcatcaccctcttcatagcctcccaagtgtcaatctcacgttctccattccgcctcctattgatgcacaattgatcccactaaataatagcatagtcagtaaattcaatagcagcaagttttacctttttaatttcaaagtagttgtgacaatcaaactaattctatctttttcttccactcaaggtatgcttcaggatcactctttccttgaaaagcgagaattttcatctttatatttcccaaataattatttacctggttcctagcttctctatcctgaccatacctcctatggttacccgctgacatccaatcaaactcttcatcagaaactaccccttccccatctacttcattatcatccctttggtgaaccctgttcctccttggcctctattgtgttctctcttctacccaatctaaccttgcatatatatgttcacactcctctctcatcatcttcctcatcttccccattaaagctttatttgtagatttagaatcgtaggtggtgtagtttcattgccagtattttgttctagattttgtgtcatgattgaattctgcaaaaataaagttagaatagatatagaaagacctcaccacactccctcacgtgtttcactcaaaaactaatttatcgctctaattcactagtgtttcactcaaatttgatggcttttaccctcaaataagctcacacctctgccttttttctactcgtattcttctttaagttctttaaatactattcaaatggtacaagagaggattcaagtagcaattctaaccaaacaaaccaaacgaacatcgatgaaaactgaaaaaaaaatgatgatttttggaacattgtgtggggttttggaaaacaagcctcatggagactaagaaaataaaaaaaattcaagagaagtttccagactcttttgttttctctcggtttccttttcttttcctttctcttcttttttttttcaagaaaacaaatcaccaagttcgaaaattcttactagctaatgacacaaaagaaaaaaaaaagaaactaattagacaagctttgtgaaacaattatggaaactgtagaaacaagattggtgaaactaaataaggaaactaatttgtgacacaaatagggaaacaaagaattcagcaataacaaattagagctctagaattttgaatttcgattttttttaattttgaatttttaagaagaaaaaaataagagaaactgatgatagcaaagacacttttaacacaagagtattataaaaatcaattggtagttctaaacaatttcggaattcacaaagagaaatagagaattcgaaacatgaattgacatgaatatagaacacaaagttaaacacgattatagaacatgaattgaatagaaaaacacaaaagaaaggccaaactcgatgatcctaagctttgataccaaatgatatgaaccacacaaacaattgtcatgaaacccgacaccaaatatggcagcctccaagaactcacaaatttggaatgtggaaccgcgacccaatgcttagttaagcatgaaccttgattttctaaagtgtttgcaagactttatatagccaatttacaactaagaaaaaaaaaaagaaacaaaaaaaacaatgaaaaaaaacaaagacaaattcatcctcctaatgaaggctttccaaataataaggacagaaaaacaaaggaagcaaaatttaaaaaaggaaagttgataaaaattcccaaaatccaataacaatgatcgaaaattgtgatcagccaacaatactcctaaattgactctactttaatgagaagcacaaatttatgttctccttcagtgttgaccacagtctcctcttgttttagaattttgtcgactaggatgttaagttcctctttgaatctcttggctcacgcccttgtcactggactaactggaacttgacttgtatctttagccttagtgtcctcatcaaactttatcgctgattatcatgtccttgtaaatctagtgcacagataaatcgtgggactaaatagtttgaaacgtatcatcacaattactttccactatgatgatattattgtaattgtgaataactatatgttctaaatttaatagatcttatatattaaacctataatcatgtataaaacatgtgaacaaagtatatgacaaggccaagatatgatttttgatcttcattgaaaataaataagattacaatgaaattggattttatttaggacataaaatcccaacaatagcgcaaatgtatacttttccaaacatatatctgtcggtatttagtgcaactctaagtacactaataccactcttactgatatgttatctaataagtaatcataaaatatgcacgctaaacatgtaaacacatatgcaattattatactaatcttaccttgatttcgaattcaagtgtgctggtcaacctgagtggaaactgttgctcgacgatttacaggtccctaagtcacaacttatgtaaaattggtaagtgatatgctaaatcacttttcaaggacttaaattcaaaactaaaagtttctctatcgataaatagcgtatcaatactataaaaattaagaaaacattgaaaatgagatttcagaaaaaacacccccaaaaaaaggtatgccagttttcctggtcctgactactaaaaacggtagacctttttggacaaacgccctaccgtttttaactgtagaaacacaaagaacctcatttctcctagaattctaccccaaattgtctataactgtcaagaacacctaatgaaagccatacacaacataatccaacaggaaaaatcatcatcaagcttgtaaaacaaaaatactattaaagggtcaactttaagcttaaaagctcaccacaagtttaatcaaccactaaaaccaacttaaaacaactcaaacaacaacataaaagaagcctactacccagtctgggtctcgaaccccgtactagttccaaagtcgaatggcacctagagggtatgcattgactttacagacttaaacaagggatgcccaaaagattgttttcccctgcctagaatcgatcagttggtggatgcaacagccagccatgaaattctaactttcatggatgcgtactcagggtacaattagataagcattgtaacgccctaaataaataggcacgctacccaagatatttaagaaaccctaatcccctaaannngattactaataaaattagcgcgcaaattaaactttaataacaaacggaatgaaaataaacttgtgataatttaaactttacaaactaaaagttacacatgtcgggatcacaaaaattattttacaaaacattattacaagtcctttttcactggccaacctaggcggcaaaacagtgtcacaaaatgcatcactggtagaccctaacccgcttggtctagtgtggcccgaacatgtacaatcgtcgtccagctcccatattcatggctaatcagaaatagctttactgtttcctgcacagtagagtacccgtgagccaagcccagcaagacagtataaaatatcaataacatgtttatcccactatataaacaaaaattctattctcatatgcctgtataacacagacatgcatgttacgcttacatgcctatttatgtctacgtagcatagacctacatgttgcgctcacacgtctaaatacaataa

SEQ ID NO: 120372 - DNA, 3751 bp, Cannabis sativa
  modified_base (31)..(39): a, c, t, g, unknown or other
tttcataattaaacataaacaactgctaatnnnnnnnnnaactaagcgggctttacacattacctgatgtcagtcttgatgtttgtttagatagacacttgtctattctttccatttgtttctcaaaaggctccatatatattggttcttgttgaagactggtgctctcggggatgatcttatgttcttggaattttgcagtagtgcttaacaatcgccaatcacaatcttgaacgggtaggctacctaaaacatcagcgatctcccagcgagcagaatccattacaggtcatatcggtctatctacgattgataaaaatggacattagcgactatacaaggtaataaaaatatatactaagtatcagggtatgcgacatactaggtcgacgattaaagtcagtcctaactctttgtactttaaacgcgtagttacatttggatttccaatctcccatattggaaaccataccttgtaccccgttaattttagagttgtcccatttactaaaataataaaaatcgttatcgtggccaacactctttatgtcatagaaatagctaaagtcctccattgttggctccccttgaacatactccatgtacatcgcataaaaccctagtattacgtgaaaactgtttggagttagttggaagaaagagacatcgtttgagaatggctttcacgaaggtatgaaaaggcagtgttaccccgcatcgcaaaatgggaattgagacaatcacgtcttgcgtggggatgatcgcagggttagtgaggggaagatgaggtcgttgagatgttgaaggacgtaaagtccctatacgaactaaattcagctgtgcaaacatgtgaaagtctgatttcgtaactcgcaagaccagatcattgcaagaaaatggctcgtttagttaagtgttatctactgaatctgtctcacttccatcagcacccccctcttcttcagaatcgcgatcaggtacctcaaaatcctatcccatttcttcaacctcaatgtcaggggcatgtctcgaatgaacgagataatcctaagcttacaccatggattcgctgtcgcgtatttccaccgtcactggttcaacgagctcttgaaccatcctatctatctcgtcgatagatagcgagccctaacgggtcatggaaacaggggcctcctcctcagatattgaggtgggtatgaagttgtcgctcctttctagctcgtcattgaaagcctcacctccataatcgagcatttggctatccaacaagtcgctcatctgaaagataaaagatcttttcagtgtggtgaaaatgcaagaataacaaagtgccctcacccgcataaaatttaaaaaatacaaaggactggccacacatctctaaaaatggatgggtgtatctcaataacataatgatcatgtcgctacatgaaagttaaggtactgaaacacacccaccattttgagaattcagtcaatcctcgcaaaaaataagttgcaaatataaaactaactgcgtacctcaagaaatggttgggggtatcccagtatcccaaagggcatgcattcctcgcatgaacattgagttatgggacacacccaccattacgaagaacctagttagtcctaataaacgactacaaaataagaaaaatgaaaactaaccgcgtgtctcaaatggctgggtgtttcacagtgacccaaggaacatgcgaaggttacatgagcaataagttattgtgacacacccactatttaaaagactcaaacaattttcataacaaaagtatatataacctgaaggctaaaaaacccctaagaatcattaaattccagcaaaaaaaaaggttaaaatagctaggtaacaatttaattgagtcatttttggatattcagaagtgtatgcgagcattcgagatattcatcaaaaaacttgcgagtattcgaaataatcagcaggaaatatgcgagcactcaaggtgttcttcctaaaacccgtgattattcaagttttaagtacatatttccaaaaaaaaaaaattaggtatttaatcaaaaacaaataaattctcatacgtatatccattatctcatacattttctacccccaaagatacataataagcgtaaattctcagagcaagaaaaacagttaccaaagtttttttttcactaaccttgaaaagtaactccttttcgagtgattctgaggatatcaagaactccaaacttcttctctgatgatcaaaactcagacaaaatgtaaactgattttttgaggatttgaaattcatagggaaaaaaagagaaaaaaggaaaataagagagaaatgagtaaaggatcaattcgtatcaagaagtttaaatactaatatccctcatttattgagatggagacacgtggcatgggaattcctaaggtctcacaatccaacggttatccataaccacgcctgcacgtacttcaaaaagttttgatgacgtggcacttcaaatggattaaaaatgatgattacagtcgtctttttgaaaccctcgattggacaaccaaaagttaccatcccgtgacaaccttttgcttgcctctcgcttatagttttcctcatgacacaactgtcaatcacgaaactagggacatgtgttatagtgtgaatttttcacatagaaactcgagaccagactcccataaaaatgatacgtggactcactctcctcgaggagggctgagatgtcagaagaagacctcttgagtgtaaaccttgcctgaactagactcagtgggatgatgtgacttgatagagtctagtcacattattatgtctcgcacgatgtaggactgaagactgggtttaagactcgcatataccgagatatatgcaataactataaaagtcttcctgtgagttagtaaagatcgattctttactcagcgaactagtccgaatgacccaacgtacttgataacccgatgaggactcgcatgtcctaagttatcaactttttacaagatattcatatatgcgactcgaataggacgcatatatcttatgaatgtgagactcaattagtcttgtacacatcttgagcctgcaagctaatgtgagaatatgaacagacaactcgcaccacaaaggtcgcatacgttgctgtagttagtgaattgggccgaaattgttcttcatttattatatttacgtttaattgatttaaatgtttatattgaatgtaaaaacgaattgataattaaatcaatctttgtgtaatcaaaggacacttgttttgtatataaaggagtgatccaacatgaaataaacaagacagaaaacccttgcaacagtggactaagcagaccacggtctaactgaaccactatattcctctgtgttatttacatttctagtacaataatcgcatagtttgaatactcgttgttctgggtagagtaatcacatattctcatttatattttaattataatattttatacagtgttgtttaaattcctccaacaacaataattactactttagtaattactacgtagtgtaattacacaatttttttttatcaatcaatcatgtacttaattactcaaaaaaacaattacagcctattagcatcttcaataagaatacctggtttctatctatacaatacaatcaattgtaattacacaacttatcatctttctttcttcctttccttatatataaatatatatgtatatatatatatatgtgggtatgctctt

SEQ ID NO: 120373 - DNA, 1696 bp, Cannabis sativa
gtgatctgtgagagaaagagagactgagatcccggagagagaaaaagaaaccctaaatataaaaaaaaaatatacttacacacatatatattatgtataataccaataatatatacagtaagggagagacttaccggcagttccaaaaacgacgacaaacgctaaagcgtcatcgctgccgccgctactcaggatagggcaccgtcgagtgaacgagagagagcgtcgagagtgcaagtattgtggaagagaagggaaaacaagtaaaatattttattgattaaatgaattaaattgtaaagagaaataagctatatataagcagaggagctagaacatataaaccagcaactaacaattgtaaaataggaaaagggacaactgtaataactaccaaccgactaatggtgtaacgactataactaacacagtaacagtaaattagtgaatcttgttaccccctttcaagatggaccatatatgtcatgcatggccatcttggacaaatgagaattgagagtagtggagggcagaggttttgtgaaggcgtctgtgagttgaagtgtactgctaatggggatgagtcgaattgttgaattggcaattttttctcgaatgaaatagcaatccaattcgatgtgtttggtccattcgtgaaatgtagggttgttagctatgtggatagcagattggttgtcgcagtagatgaatgcatgtgttggttgcttgatgtgaagatcattgaggaaatattgtatccaagtcaactcacttgtggttgcagctaaggcacgatactctgcctcagcaaaacttttgcagactgttggctgcttcttagttttccaggagatgaggcagtcaccaataaagatgtagaatcctgttgtggatctacaagtgacggggcaagtggcccagttggagtctgagaaaccacggagatggagagaagatcctggtgagtagaggatgccttggccttgtgaacctttgctattaagtgaggtgtccgagggcaggacatgaactgactaagagtattgactacaaatgtgatgtctggccgtgagagggtcaagtaaaggaggcgaccgattagctgtctatagtgagaaggattgtcgagaaagtcttcttcttggtcattgagtcgtcttggatccattggaaccttggctggtttgctgctggtgtaccctgtgtcagcaagtaattgcagcgtatatttgcgttgagataggaagaggccagatttagctcaagctattttcaaaaccaaggaagtacttgaggggagccaaggttttaagtttgaatctagcctgaagagaatcttgtaagttatggagtacttgaatgttggggccagctattataatatcatcaacataaaagagaagagccacgaatgtgttatgagatcctcttatagaaaaagtgtaatctgcttgggattttgtgaatccttccttcaaaagtgcatcggtgagcttcttataccatttttgtgaagattgtcgaagaccatagatggatttatgaagtttacatacgaggttgttgcctattgtcacaggctcaccttttcaggcagcggaacacccgtgcggcaccttaacttctccaagacaaggttagccttccaaccattcgagtaacaatgggctcatttttcgcgcgaccgtgtgcctcg

SEQ ID NO: 120374 - DNA, 854 bp, Cannabis sativa
  modified_base (812)..(817): a, c, t, g, unknown or other
attttgttaatttttttaaaaaagggacatttattaacttaattgttaaatttagggccattttgcatcttggccctaaaaaaatggtgtgatatgtaaaaataccttaaatatcatctctcagttgtgggttgttggaaaatctagtaagattctcaacttgtttggcccataatactaatgatatattggactcattagtctaatcggccttcttttactaatatactgatacattgggctcttgttatatcgttcagtattagactattactcctcttaaattgatccacatataccctattataaacggattagttgaaaaatattttttttgcatttattaatcaaaaataccatcatattatattttattaaaatatatacactttttttgagtagattgctcaagatactctcactctctacttaagtctaacatataatttacattaacctaagggtctaatgaggacatcatctatttaagtgggtatattttaaaaaatataaaaaatgaggtaaaaattaaaacaagtatagtaaaatggatatacaatgtaattttctctatttttattataaatgcttttgaaattggaaaatctacactctgcacttaaattagatttttgttgttttttttttcttttagaaaaatgctgttttcacactacttttcataacacaacgtgcaaataattttattttgaaaataacaaaaaaataacattatatattttataatatattttattgagagaaaaattaaaatttataaaaatataaaataggaaaattctacaatgcannnnnntaaaatggatatattgatgcacctctatctgttttag

SEQ ID NO: 120375 - DNA, 2710 bp, Cannabis sativa
  modified_base (186)..(212): a, c, t, g, unknown or other
ccaaacccgaaggagagaaagagaaccatgctcagatattgataatactctgcgacacaaaggaacaagggttagagatctaagagaaacgagtcattatatttcgctacaaccatagtaaggttttctaaaacccttatgtgtttaatttcattatttcaaagatattcatatttaggatgttannnnnnnnnnnnnnnnnnnnnnnnnnntcctggtaaaatattcctaacaactcgttcctctacgagttcaaagccccagtgtcatcagtcaagcctgctagtcagcctaaatctaagccgataggaccacctcgtcctccctgtaaagtttctatacctctcaaaagtaaagaaaaaggtcaatcaaaaaccaatgcgtcaaaaagaaaatcatctagtgatcccacttatcaaccatctcctaaaaagaccaaaaccaaatctattcctgtcccattagcgaactcatctccaaaaaattcaacaaaaagatccaaaaagaaagttcctccaaaagcccctatctcaaatgtccacccatcgtctattcaatgatttgttgatgcctctaaagcgtttgtatatcaacgttggtttggtagtcgtgagttatgctttgaacaactagtggttctggatgactttcctgaacttgacgcgttcttaagaattaggaaatgggttcacactgtctctaggttgtctgcacctcatcccatcttaactcgagagttttatgcaaatttagatagaactttcatagcagaaggtcatccaggttatgtgagtgtatttgtcagcagtactcgtattctttttagtccttctacaattgcatgcatcttaaaagtttagtctgtcaaaactccaacctatgggaaacagtttaatccatatcaaactatgatggggagagtgctaactagcaagaatgactatcttaaggaaaagcaggatatttttgctactcatttaactgcattctatagggttcttcatcgagttgctttgtacaattggtttcctaactcacatttttctaatcactattgatatcgaaaagcttatgtatgttgtgggaactcatgtacccattgatctctcatttttgaaaggattctcaaagcctcaaaaaccactggtactcgaaataaacctccgtttccaagtctcatttaacaagtgctcatggtcgctcaacctccactaacaacccatgattatcaagttccaaatccagttcttagtaaaagttttttatcatttattcgcaggcagctcactttgactactcattcaacctcaaagatgaacaaaggcaagttgtaatgacagcatttcataatatggattagtaaaggcaattagcactaattactgatatttttatattatttgtgaatttaaattatttactggtcgcattgctagaaatgggcattaaagttataatttctcaatttcagagattttattaaactctaggtgtattatttgtgttatatgtgaattatgttgtttttttacaatttgtgctcggcaacaatggaaaatgcgatggatggctagtttgatctcatgggtaggtttagaatcttattttttaatgggatgtatgctggagaaaaaagaataccggatttgagcgaggttatagattttgaccattttacacgtagtcttaaaaatgcctaagctattagtttaggggcattttagtcttttgccaagggagtggctcggtggctaccctagattttgacacatgttgattcctttttcagcaaggattaattaacttaatcattaattcatttagagaaaaataaggaaaagcgcaaattgaagaaacctttcttcccttctctctctctctctctcttcgaaccagccaaagaccaggggaatttttgcttattcctggggttttcatcaaggaattcagagagaatcaaggtaaggtaaccctagaaccatggtttttgaacttttaaagctttaaagtttggtttgaatatgtgatttttagctttaggggctattagggtttagctcttgcataattcaacttttaagcttgatttaagatagaattagcttcttgcagctggttgtagtgtgttttgtttgaattgagcaagtttgagcttctgaaacccaaacattggtctttaatggcatatttgaattcagtgggtttttctgggatttactggttggaatatattgtgtatgccctgtttaggtactctagaaggtttggtagcatttggtggagttttgagcaacatttgggttttttgggggacactggtataaaccagtttactagttgaccagtacctgtaaaatcggttaaccgattttggaaggttccccgaacaacccattttctcaattctgatccattttagtgccttagttgggtattttcctatttcctaggctagtgtagttcctagtgaagataagagaaccttgagttgtaggtatgggtttcccgggttagggttttggaaatgtgatttacttggctttattatgtgattatggcatcagcatgagactttccgtttaggtcggccaactcacttgaatcgggaaaaaaggtaagaattgtgtataatgtgtaatatgaatttgcaaatgtatgtatatgttaagtgtatatgcattcttttatgtttgtaacactaccaacactt

SEQ ID NO: 120376 - DNA, 957 bp, Cannabis sativa
attcctattgttattaaagtttaaattccgcgccatttttattagtaattccgtttaggggattagggcttaataagtgacttgggtagcgtgcctaattatttagggcgttacacctttaatacccataacataattcatcacttaattttgtataacactaacaagttatagtatattgctcttctccaagctcttctcctgattgactgtcaagagcagtaattatctttaatcatttttcggttggttaggacaagttagttaattctgttaggactttcctttcctttagttaagttggttagtcacttaattgactctactacactatatttagctacattggttctctttgtaattttagattgattatcaaataatattctttcactggtttcaattcaattctacaatacagtatcagagcgggaaagagaagctttccctcaatcctgattctgaccgctgagtcttcttcttctccgatgtgcttgttcccagagatggtttcttcaactactctctctttttcttcgcctatttttctctgatcgaaatctttgtttgatcttctttcctcttaaaaatttctaatggtgatcatacgaatcctattgcgattggagaccactcgaaccagactactattagggaagccatcaatcctacgattcagcataggaatcctctagaagctccttccaacccttactatctccttcatgctgataatccaggaaacatcttggtctctcaatggctaaccagacaagacaattatatgtcgtggagtagggcgatgcaactggccatttctgttaagaacaaactcgtgttcttgaatggttcgatttctaaaccctctttgaatgaacctaaataaaacccatttcaatataatcacatttactaattaataaagatcagagttaacattttatattgcatggttca

SEQ ID NO: 120377 - DNA, 2820 bp, Cannabis sativa
gtgtatgtatgtatatatataaaggaatgcataaaccaagatgatgactccaatataaatatgttagataaatataaagatttgatttgataactcaaaataataataaaaaatataattaattggacaagatcaaattatcaatcacccaaatatttttggacaaatcaaagcgaagtgaatataaattattttatttatatttcacaagcatcacaatattttataatgatagaataaaatataagtgtaattattcagttatgttagcaaagttagttacataattttaatttttttatgcttacaaaatttgtaaattcctcactcaaattatttaaagtagcttctcatgttaattttgaagggtgaataacctgtgtcatccattctctatagtctataatatcaactcattaacctacatactcgtgagtatgttgaaaaattaaaggatatacacaaaaggttattcacctcgaaataatcataatgacacaggttgatagagcctcgcataaatatattcagtataacattacaaaagtatacgtgagcactttaaaataattttatagaagtataaaaacttatatagaattggactaaatattaagattctaaatgatgcttccactgatgatcatttcaaagtctatttgcatgtttccatatgcaagtttgggtgtcacacattcgccaaccttgcacttatattgtgatagtcaatcggctctctacattgctcaaaattctgtctttcatgagcgtaccaagcatattgaagttgattgtcattatatgcgtgatgccattcatgatggaattatttctacgtatcatgtgtctactgatgatcagcttgcatacatcttcaccaaggccctttgcaagcgcaagtttttgtatctacttggcaagttgggcacttgtgatctttatgctccaaattgagggggtattaagattatattagaatatcacaatcttctatatttagaatatgtatatcctgtgtatctctttgtgatttggtgatctttgtgatttggtaaatgagataatagccataattctagggtaatattgtatatatatatatatatagtacctaaaagtgaatgaaaaagatcaaggaagcacattttaccaattttgtcaatactagacaatcattcaaatttaggagagttctatacaaattttggtgcgcattatttcaatcatggataaactactagtgttacttcatgatatcacatatatgcagttgccgaaaagtaaagattctaaaatcctaagaggagtaagcatatatatagatgtaatgatgaaaaaggttgattgtaatacaacctgtcagatcctactataaagataaatattatatactacacttgatcaagacatgaaggacatgagattaattaaaatacacttttaattttatactaatgtaaatgagagtttgttgtagttttatgccctaaataaaactcattttaatataatcttatttactaatcactaaaagatcaggaatcattttatgtttcttggttcatatgttactttcatgattatatgtttaatacataaattctattaaactccaaacatatagttactcatgattatagtgtagtctacacagtaaaaattaatcatgattatatgcttcaaactatttagtcctcaaagattcccaatagtgcttaaaaaaaggacaaataatcctttaggccaaggggctttaaacctgcttacgaaaaaaagggtagaacgaattttctcccgatctggcttaaccacaataccgtcattctcaactgaggataacaaatcatggataagagtaaagatctttcatattggattgcccgtagtccgtaaagatactattgaaaaaatctaggaattccttccaaatgctggctctcaaagagacccaattgccatgtctatccaaaatagtttcaatagtatttctcttatttcatatgggcaacataaaaaaaaaaatgttgaacacttgtcccaattcttcaaccaataaatttgagactttttcttccataataaagctttccatccttaagccttcattaaggtgacgtttagttgaaggtaataaaatgtaatagaatgaaaagaaaataattttcattttattattttgtttggttacattttaaagtattagaataccattctaatagtatgctctctccaccattttagtggaatgactattctattttataaaggacggaaagaccatttcagtgtaacaagaaaagaaatttaataattttttatcaatttttttttatacattttaaattttattatattttattcttatttttatttctattctcatttttatttttattcttatattttattaaaggctacttaagagaatttcttagagacaatttctccagcaagtaactcattcaggatgtaaatttgagcatttacatagaccccacccatcatcatttctgtcttaattgtcttacttttacagggcatggtgttttgggcttaaataatttattttatattttcttttaaagaaaaaacaaaataaatcttgatccacgtgaacaaatcacggggccctaatgtatttctctaaaccaatattaatattttggacccaggttgtactattgacaaccaacgattttaagagtgcgtttgggatatttttttaagaaagttagaagtatttttttacaaagctatcattcaaaatgtgtttggtaaaattataaaattagttttttttaagaatttaagaaaaaaatt

SEQ ID NO: 120378 - DNA, 2568 bp, Cannabis sativa
ttttttttttatgaaattgagctttaattctttaacttgtatgccatatgttaacgcaaattttcattaactaaatttgagcctaaaaacgacaatctcacagaaaaaataaaagctgtaaaataaaaaagtatgaacacacaggatttttttacgtggttttgcagttaaaattctccatagtccatgattcaatcttattcagatttctgatagtttttcaggacctctcttgtatcattttttcgttcccttattgatctttcttgccactatttataatcatataggggtagttaattacaacgttgactataatctttagaacgttcttccccctgaaattatggggtttgattacaaatcatgtagtataattgttgttattacttaaaaatcgcacaactatgattctcccgcttaaactaggtcaaaatgatcgtgtatttaaacatatatataattgtagcattttgatatgtctcaacagaagctcggtttcagtgtccgtgataccgagctggagcctttaatcttatccttccgaggtcgacgatgtatgccttgtcgcttctttgtttgatagcctaatgcttcatttgaaacaattgcggttttttattaacaaagagtttctcgaggctcatttgaatattatcttctgacttgtcgagattgtcagtctcgctgagaagatatctgaagttaactagggggaaggtataggaatgagtcttcctataatgagatatgcacctcgtctgttaggtctcaagccaacccgattgttatacttagtttgtacattatttgctaagtgttttcacagtcgatatgcgttgctttcgtcttcccaagtataatggaattgatgcctcaccttatgcattcaatgacatacggtttctcgttaatataccaaacaaaagtttgcatatcttttcctcgcataagaccttatagtcagcgagttgctagtatgctctactaattatgcaattaatgagttattccattaagaatgatttcatcattcatattccctttacctccactgagatggtagccaaatttcgggtataacaattgcccctttaaaagttctttttcagtaaaaggtgctttttaataattacaaagggcatttttgtcataatcctttttgggaaaacttgtcctttgatactatcggttgtacagtttctagggtcattatgaatcgtctcttcatattctccctactcccaaccattggatttccctatctttggccttcttgtcactggactttgtgtataaaagggtggcttaagcttgccatatttcacaagcttttggttttttggtgagatccatcttgagatcggattgtctctctcttgctaaaatgtctcatttgagttcagaaatttatccctccaaattcataacatcagaatgcaccaaccacttttcttatttatgcattcccaaggacttcagacatcaattcgaattggaaacgaaggattctagggctgaggagcttctgaccaatccaaaccagggaaaccccgttgatcgttatgggcgatcctcacaagcgatttttgaggttaagtattattccttgcgactggtggtttgaactggataatacatattatttttttttgttgctccattgatcttttatctttgtctccacaacaatggacatagattttgtgagcaatcttagaggttctttccaggctgacgaggaatcccagaagaaagttggcgtggtttcgggttctactataaaacccaaccatcccaagacctaagcttgcacaagaagacctttgtaatttcttgaggctgggaatgagatctcggctgcaagaaatgggatcttctgatgaggagaatgaggtctatgcagaggtggagaccttctacgtgtagatagtctttctcgatctatgcatagctggtctttctccaagctatgtggaaatgattagtctccgagctacatgcagacggtctttctcgagtttatcaacccctcttgtattctttgtttaggaagatgacttaatggtttgcccctagtggcatttttgtaaagatagatttgtaaaccaacttgggttttctcttatcttaaatgccttgtactcttttcaatcaaacttaatataattgtgttttcttgcattttattgacaatgtaaacaactttattttgatcaaatgtaaggtacttttgggtttttcaattgctcgcaatcttcctgtttaagtagttaattatctaccaaactttttgaatttcgagcaattaacaattcttcctcgctatgatagttataatctaccttgagcaaacttgaatataattttaattattttatcactttgtatattttagatttgcttgcatgaatagttaggttatctatccattttctagacttaagtacttttatcaagacgtgttgatatctcgtttagcactttcctagctcgcgtgaaccgttaatattcagctttatacgcgagttataacttttgattttcctttcccgtcatataggtttt

SEQ ID NO: 120379 - DNA, 1197 bp, Cannabis sativa
  modified_base (401)..(409): a, c, t, g, unknown or other
ataaaattatatatcatgtcaatagaagtacaatagaaaatagaacttaaatatatattattttaaaaaaataatatattgttatatcattcaccaaaatatatatactaacaataataataataaaaatatatattactaatatatatgtatactaaccaaattatataccagaaataaaatatatatatatcatgataacaaaattatataacaccattgtatataataaagtataaactaattaaatattatttaaaataaatatatatcatacaattaaaatatatataaagaataattaaaaatctgtagcatttcaataaaattatatatatacattaaaatatttatattatactaacaaaattatatgtcactattatacatagcaaaataannnnnnnnnatcatctaagaataataatatacgatacaacaaaataaaaatacattgtattataaatttatatattaacaacccagtacaactcataaaaaattaaaaaatattaaaataacttttaaataaaaaagattttaatactaatatagatataccataatctttaagtaattttcttttaattctaaaaaaggatgaaaaatattattatattttcttatgtgacaaaagataatataaataataaataatctgaaagagtcattttggtacaagtattaaaatgagaatatttactaatataatcatatgattttgggtcatttactaaatttttctataaattagtttagtgtatgttatgcaatgtttaaattagatttcctctcttatttttttttttcttttgtttctttctttttattttttttttaaatgtttagatcgaattctcctaaaaataaaccattttttacacaaaatatattttcttaatttttttttatgaataatacatgtggcaaggtattaattttcttcttcatcatctaaataaccatataattattctatcaccttagatgaaaactaacataaattcaattcataattcagtaatgtgcatagtttggggagaacacgaaaaatttaaaaggcacgatcacatattgtgtaacgtccccgcttcaagccgtacgtcactctagctgtttcatggactgacgactgaccctacagtccaacacgagtgttttcatcccatcctaaaattgccccaggccaagcacact

SEQ ID NO: 120380 - DNA, 1256 bp, Cannabis sativa
  modified_base (1196)..(1197): a, c, t, g, unknown or other
aagttatcattgttcaaaaatctgataatttgttatttaagatttataatttttcaaattaaaaaatatattaaaaaaaataaaaataataaatatatataaattaaaaaaatggaatgaattaaattccaatttagattaaaacatgaagtacatgttgaatatatgtatatacatagtgtatttttttaagaaaaaaaggggaaaaaaaagctatattaaaattaagacctccttaaattcagaatacatagttttaatgatctaggttaaaaattaaaaatataataaattaaattaaaattaaaattgaaatcttttatgaactgaattatattatgagttgatgataacatgaactacgcgtacatcaatgatgaatatatatactatgtgtgattaaaaaaatgatatataaggtgaaaacctctttaaattgagaatgcataatgatcttggtatatgtcaatgttgttgattctcttcctaagcttgctctttttgttacaacaagcataatttggtggtctggttagtactcaagttgtattaaagaccttattttggttgatgttttgaattaatgaatttccctagctcttgacccctttgagctattggctatttggtggtattttctgagattcttttctaaaaagaataatcttgcaaagaattaaaaatttaatgaattaaattcgaattcaaattgtgacctattatgaattgaattctaataacatgaactcataaactacacaagtaaatgaatgaaagtatgtatagatatttatctttaggatataataattaatttaagttgtgtgatcgatataatatattagaatattcaacttatatgatttgaattacaatataacttaaacatatattatatttatattaaacatatattatatttatatatatgatatgataaataaaattaatttattaaattgtgaaataacattacatatgaatgagagagaacacacaaataaaagaaacatataagaataagagagaaaacaaagaatagatatgagaatataaaaaaagagaacgcaccatatgagaataagagagagacgagtacgtaggttaatattaatgttagagttaacgtctttcctttaattaggtaattagttaaattaatagaataaaaaaaaattaccttatatactattttnnttttaattttttttttaatttacggtttgggtttttaaaatggttgcagcgctagttgc

SEQ ID NO: 120381 - DNA, 1344 bp, Cannabis sativa
atattaaaattggggagcaaaaatcctaattaacctactataaaaaaatattacaattttatttagagcattattgtatattgaatattagtagtatttaatattttttataaataacattttatatatgattaattagtgatatatatttattaaaaaatatttttttaataactcatatgaaaccatactaaattaaattaatagtaatatgacaattaaaaaagtattaagtactaatgatacttttagtaatttatatataattactagtcgttaaacatattttattctgtaaattccaccattaaaatgtattggaacattatttttcctagaaccgcattaaaataattaaactgattgcgtaattgcttagttaattcataaacatattgttacgatttcgttgtcagaggaaaaattagaagaaaaggttaaattaataaatgttgatgtacgaaataaagtctttaatatatacgtgtttgctttggagtgaggtgttttatgtgaaacagtcacctttacgtactgtcatatacataatggttaaaaagtattattacgtgtttggttgactatgttttagaattttaatttttaaaattatgtttttagaattggaaataaaaaataattttttgtcattttaaaaatttaatggtgtttgacacaaattttttaaaattatttttaaattttttcttgttaaaaaaatgaacattttaacacctaggttcgggttcgggtacggttatgaatttaggattcgggtatgtgaggaaaaatataaaatagaatatgttagataaaaaatttgtttttgaaaattgaaaacaacattttgatgttttctattttctagtcttttaaacattgagttttaaaaaactgtttttaaattttttttccaaacgacccctattagtttttaaaaactgttttcagttttaaaaaatagaaaacagtttttaagttataaagccaaacaccctcttggtgtccaataacaatgcttatatatattattggctaatatttaaaaaatactattgagtatatatatatattaaggaattatttcatatattattttttaacttttttttaaaaaaaaatttaccgtttgtgttgctttatgctctaataattctatgggtcagtttggcatatagctgtgttgtgggaaaaagcagctgtagctgtgctgtgagaaaaagtaaccgtagcagcactgtggaaaaagctgagctgagtgtttggtaaattataaattttaaagtactctgagttgttaagatcaaatataatgataatgataatgttatactctagtttatt

SEQ ID NO: 120382 - DNA, 1489 bp, Cannabis sativa
  modified_base (61)..(64): a, c, t, g, unknown or other
  modified_base (1346)..(1353): a, c, t, g, unknown or other
agaccttagaaggtctaattaataaatatatttaaatagtaattttatttgataattattnnnnattattaaatagatagaattagtatttaaatgactagagaagaaaatggcatcattgaagaaagacaagtttgtttcattaaggaaacaaaataatggaaaaattctaacttatgggcttcacttaggggttcggccatgagatgaattccaagccattggatctttctaaccagcccattaagctctaaccctaaacttaatgaattcctataaatagaaaagtataactcttattttcagataactcaagacttcagtctcctttgtcaaacataaattggaaaataaagagagagcttcttcttcttcttcttcttctattttgaaaattcctacttcttcctcataaatttcaaagctcatggtgattgagagtatgcccactcatgtcaaagcaatacctagcatagtgtggaagattgtgtctaaccaaaataaaggagagaagatccagatttagatcttgataatgctctactatataaaagaatcaaggctatatatttgaatggaatgagtcattatatcttagtgcaatcaatgaaaggatttcttaatctcttatgtgcttattttattgttttagaacattcatatttaggatgttagattatagattataatcaaacatatatgttagtaaatctagatcataataaaataacttccaacataaattgtcttatcacctctgtagtttcgtgtgatcgattgttaattgctacattttgagcccctagacttgctgcctgtctatccatccatccttgaaaagcctcttttgatgggcaaattcttcattcatggctgctccggtatctatctgcctgatcatgatgatgggtgttagtatgcttctgaatttaagatactgcttctttcaaattatacaacttggtatcatcatcgatagtcacttgaggttcgccaactggtggccctccggtacccgagctagtttctccaacaccatgggtactagtagtttcagtattttgagtgcctggagtaactccagttccaggagatgtgctatttggatccttaatatgagaatttctcagatttgtaggagtttggacatttggatcagtcaccataagatccgtagaattagtttcataccaaactgtgttgggatcttatgccctaaataaaacctattttaatataatatgatttgttatcaatagaagattagaattcatttatgtttacatgtagttttcatgtttatagtttaacacacaatttttgttaaatctagaacatatagttannnnnnnntacagtgatgtcaacatagtggaaagtaattgtgattatattcttcaaaagaaaatgtcacatcattcatcagtgcactagatttacactgatgtgatagtcaccgatagagcttacttacaccttagataagtgt

SEQ ID NO: 120383 - DNA, 1115 bp, Cannabis sativa
aaggcttgccaatattgttgataactttgagagatgcacgtcaaatgaataagggaatcgaatatgtcctcgtcaatccttgggttatggggctaccaatcgtgagagttagcaacactaattttttgggttaacacttgcccccagtctacaagaattcttttaaatgttctgatagactgagagaattggggaatttgacttgttgtagtgtgatcattatcttcttctcatttatcgaggacgtacccactatatatatgagacctatcttgaactttcacttcacaacattaccttggtagagtgaaaaatctttatcactctgtccaagaggtatcaagtttgatccttccccaagtcactttttccattcttatttctattagttacgcatacatatctttatatttttgcatatatatttagatggtttaatatacttggatattttctgcccttgtcttcaccttacttggcttgtgttacctttgaccctggagtgacatcttaacacttgcattttgatatgggtaataagaatctttactcactccatagcaaattgccctttctttgtgatctttcctgcttcaagaggtaccacacttatctctatctcttccatttttgttacctctgcactacgtgtctaagttgtggtccgtatgttatctttgtggtgccgattggaccacttgcatctcagtaggggcatacacccctatgtataatgtttaatgaccttaataccttgattttacctcttaggtgcgggtgtcagggcagcacgtctctttgaattatttcgttttgggtcctacttgggagtaactcttcaaagtattttatattcaatggcccataggagcaagctattttgcatattccatcacctcaattccatcttgctcattcagatcctcttcagtcaaactcacttctaatgaatcttccatcaactttttcttctccactatattgtcaagagatccacacagaaacagttgtcactagcgtttggaaaagtcattgccttaagaacattaaagaccacttcttccccttgcaccctcagcttcaattcgccattctgaacatcaatcaatgcttgg

SEQ ID NO: 120384 - DNA, 1230 bp, Cannabis sativa
  modified_base (886)..(887): a, c, t, g, unknown or other
caggttgtttgatcaagaaactatttcagccattctgaaagggggtattcctgctggccatggaagtgatagctggttctggactttggaaagtaatggtcgtttctcctgtaaatcagcttatttggcccaagtagtggatagagcgaatcctggtgaggttgccccctctttgtggaacaagctctggaatagtaaaattccagagagactcaaggttttgtggtggtgtattctatctaaggctctcccggttcgttcggagttaagaagaagatttcctatagaagatgagagctgccccttgtgtgggttggaggttgaaaccatggagcacctattcctagcttgtaatgttgcctctcacttatggcggtcgtctccttgggaaattttccccatctgtgacactgggataagattgtgggactgggttaaatttttatgggacctcaaaaagaaaggcatcaatgagcaggaggtctttctttatgcatctctcactgttgacacgatctggcggactcgtaatgataaggtacataataattgtcaagtggatgtttttaaatgcattgacactattcgtttctcttttgcagatcaccatgctttactgctcccttgccccatccctcggccgaaggtttcttggagtccccccccacaagattggttgaaactcaactgcgacatcagaatgaggttggatagcatgtgcgctgctgtggttgcaagggatcatgatggcaaggtgatctaggtggctacttcgaagctggaaatttccaatgttctctgtggggaagcgacagcttgctgtttggcccttgaggaggctaaagctcgaggcgtcaagtttcttattttggagagtgattcgagnntggtgatcaacgctcttaatgggatggaatcccgttgggaacttgataactacgtctcattttgtaaaaacttctcctcctattttattggctgtagttttcagtatgttagtagacaatgtaattatatggcccataatgtggctaagtgggcctttttccttcaaaggtttggctctgtgccaattttctcgatgcccaacactatattttgtaatgaccgcgaggtctaactgccttagttctaatatatgcacgcttttcttcaaaaaaaaaaaaaaaagtataaaaatagtgtaaaatattttgggtgcacaaaattctcttttgctgccattctttc

SEQ ID NO: 120385 - DNA, 1922 bp, Cannabis sativa
  modified_base (520)..(525): a, c, t, g, unknown or other
  modified_base (1350)..(1350): a, c, t, g, unknown or other
gaatcagtacaatagactaatgaagcaatagagaagattaaagccagaatgcttgcctctcagagtaggcaaaagagtcatacagatccgaaacgtagacatgtagagtttcaagtaggggatcatgtgttcctacaggtgtctccaatgaagggatcaaacatttcgagaaaagaggaacattatgccctaaatttataggtacttctgagattcttgagaaggttggacaagtggcatattgtttagctttacctccaactctttcaatagttcacaacatattccatgtttccatgctacggaaatatgtttcagactctgctcatgtactgagttatgaaaaatcttgagctgcaaccagacttgtcatatgaagaacagccagtttagatcccagacagaaaggatagggtctttcggaacaaaaccataactttggtcaaggtactctgaagaaacagtaaggtggaggaagccacctgtgagttagattctgacatgagggctcaatatccannnnnnttcaggttagatttcgaggacggaatccttttaagggggggataattgtaaagaccgcttaactttaattttgaaattagcagataattagggtttaattattaaacttgcatgttagttatgaattatcattttacggagatttatttgaatacagaatacattttatatgtcataaatagaatttcatatttttgcatgttttcaacctggcaacattggaacacgatgtttggctattagaatcacatcttagtatttttagtatagcagggcaatatagttagacattgagaatgtcaggaatagtcaggattttagaagtgaccaaaataaccctaagtgatttgatgactttttcgctaagtggagggcaaaatggtcattttgcctaattgtgtttttgtcttttagtggacattatttggatttgtgtgccgagtttatcccttagttaattagataaaactcatttctattattcattttatttaaaaaaaaataagaaaagatcaaatacactctcttcccatttttctctttctctctctcgtgagccctaaaaaccagcacgaacttgggtttttcttcatcaattctaggaattccaacaagtgtttagtgatttcacgtcaaggtaaggatcctagaaactctctctttagttttcttaagctttaagttgagaattatgcatgatttgtgttttttgagttctgtagtttctgttattaattggtgttgttttctggggtttatttatggttagatatgttgctttgagctggtttgagtggttattttgttgattgagcaagctttganttttagaactcaagcttggctcattaatggtgatttttgttttagagcatgctatgttattcaattgcttggaatatgtctattggggtataatatgcaggtctggaaggtttggtaaggattggaatcgaattggttaggttttcgaatttttggggttttttgctgtaaaccggttgaccggttttacaagccgtgtaaaaccggttaactagatttgctgttgggttccctgaaattttcatgttgtcgattcgtgttagtttcagagctttggttggttaattccctgttagtttagggtatttctatgttaacttttagtagatagatttttagtttaaaacctaagtccctggatgtgatttagcgtgtcacttacccgtgttatgaacggtgtgtttaggggcctgtaattcgccgagtagttattccactcaggtttgctgacacaccagaattcagaaacaaggtaagactagtataatgttatgcatatgtttatacacgtttagcgtacatgttagttgccgtcagaataggcgaaactatagccatcaaattagcatatc

SEQ ID NO: 120386 - DNA, 975 bp, Cannabis sativa
  modified_base (873)..(879): a, c, t, g, unknown or other
aaaaataaacgttaatccatcaatattggtggttcttaatcgccactactaattagaaatgcaaaattacacaacttaaagttgtggagcgtcaatttatctcttggcatggtgatgaatgatgcaccctcaccttatttcaagctttgcatcgatgttgtatctcaactataattgtattcaacttaatatcatcagttgtagtataaaagtgacgctaaagcccattcatctagtagcattttcttagaacaagagacaattgaggtaacacttgtgtatttgtgatagacacatattgtattcattaggggcttcaaccccggtataaaaaataattatcttatttgtagtgagatttttagaaatatatattatattaaaatactttagggttcaatagtaatttgttattttaagtatcaaggattcgtttggtacacaagattagatttgattggactggaaaggcttggattagattggacaatattggactatgctgaaagtaatcatgtgcttagtttaagaatagattgaactattttatttagtttcctttaaaaaaaaaaaacttaaataaattaaattaaaatatataataataataaataaaaatgaataattcacaacaataaaatgaaaaataaaaataattaaattataaaataaaataatatatcatatataatcaaatacatatatcataaatatataataaaataatttatcatatttttaattaataaataattaaaatagtaaattaaaaatacttgaataaaataaaattatttatgctaaacactaatttaacacaaacattaattttctaaaatgttgatataaatttttggggctttttcatttttnnnnnnnaaaacagtttttttttttttttggcatttttacgaaattctacatagaaatccctattacaactagtactgtaacctagattgcaacaaaaaatcg

SEQ ID NO: 120387 - DNA, 1931 bp, Cannabis sativa
tttggtaatccgaatattttacagtgattttctcctctttttctttttctctctgtttttctctctaaatcagtactaataatgttgtgtttctcctcttcttttgcatgaacaacaccctctggctattggatatccgaatcaccaccttggttccaaagcttactccattgtaagcctcctccaagaacccccaaaatcaattggtttcttctttaagaaaaactaactgattttgaatatcttgttctgctattgatctctatttctatagtatattttttttgtactgatatggtgtttgtattgctctgttcttgttttttgatgctactggtttatatatgatgttgtattagagcacaaagagaggagagttagttacaaagtattaataaactttgtaactaacttaattactttgtctaggttacttagaggccaaaggccacataagtttttactgcttgtaatcttattgtaactgttctggttttacaatgaatgtggggatttactttcaataataactgtattttttggtttggtgttgcaatactttttcagtttcgctagctctggagacaactattaataatgggaaggtgtttttttcaatgtgatgtggtgatgttttgaagacgttatagctttattgtctaaatttctgggggcagtttgtcccatgtggctcgggataagaattctgcagcgcatggtttggcaaagtgtgtccttcgattagacgatgagctatcctggttcgaggaggtgtcgtcgccgattgtagattgctgctttattaatcttgtgtgattttgatcaccgcatccaaaaaaaaaagtgtaggactcgatattaaaatacaccaataacagtttatcatctcttgtaatatttggcaccttgaggtaccatttaacatttctttttcttagagtatctccaatggtgcatcatcccaccaaattgatatgaaatcttcaaatcattctactctaaggatatatcaaattagtgtgcaccaaattttacactattaatagtgttggattttaaatctacacatagtcgaccctaaggtgagacgagccaggtgtgcgtctcgggtcccaaaaattgtaaaaaaaattatcagaaaaaaggtaaggattaattcccaacctttacttttaaaattttttttagaaatatttaatatgtagttatggatgattgaactttagaactcttaagaattttaaatatgtttaccactatactaaaataataagtttattattttgatgacaactcacatatttatataagggtccaaaatttaattttgtttttgatttcatataccttaggattgaccttgaatttacatcaaattggtacatgaccttttctttttattttaccctttttttaatttattttaaaatataattattaattataaataattatattgtaaagtagttattattgattattaatgtaaataatataaaatgtgagattttttaaacaaatatttttattaagtgtgatattttgtgttaaattattaaagttgttacattaaaaaaaaaattctatactaaattagtaaaaaaatatacaccacaattgttcaaccagcgaaaataatcttagtcatctcccaattaatctcattttaatacctagactataatatagctaaagttattgagaacgagatagatttaggattagaagcagtacacaagttaaaagtacatcatcatgaatagacttaatttttttagaaaaattatgcacaagttgagagtagatcgatacgtttaacacagaaaattataacaggtcaaataatataagatatgaaataagttcagatatgttttgtcatccctagctattttttttttttttttaaaaatgactgtatctattatata

SEQ ID NO: 120388 - DNA, 1103 bp, Cannabis sativa
attaattattacctaatcccttcaacccaacctggaaagggttctttgtaagtgcttgtaacaatggtaggccttaatatcacaacatttatatttgccttttcttcttctaatatcatttctcccattgcctttgtgaatacatatgtgtttggccatccaaattccttagccctacatattattataaaccaattaatattacaaacaaaacaaatcatgattaaaacataaagaaaattttggataaaataagtattaattaatcatgtaaaccgaacaactcactataagtattaaattttggtatcaatttaattgtagctagtatttttgagtctaatagttgagctgattttaaagctatttgtattctaaattttaatgaagttaatattttatttaaaaaaaaatatgattcatgtataattaagaaaacattttcttatgactaaatatatatttttagttatatatatgagaagaaataatttttattttagttatataaataagttttatctcataaatataaattatattttcataactaattaaagaaattacgatggtgtaaatctcttctttatcccttaactaaatttgacaatctcaataattacatgcgaactatagcactaaaaattatatttaattataaaaacaaagtatatgttgcaatttccaacacatattttctttttgaaataataataataataataataataatcaaaagatcttcggccaatgacctcattcaaattttaataaattatatttttatagaaatttattttataatttaaatttcggtccccgtaaaattaatttttaatatttttatccttattatgtatttatatttttcatttttattattacatattttgcatgtttattcatttatattttacccattttatttttatctctataaaatttataaaaattaacaatattttctgttcatatcctatttcaaagaatattttcccctatttaaaataagcggttagtttcgccattggccattaaaacataattatttagggaaatttacatagtatactaacttttgctattttttttacaaaaatact

SEQ ID NO: 120389 - DNA, 993 bp, Cannabis sativa
ttgcagcatttctgaaatgagaacctaggcatgtgaatcatcgtagtctttacagtaaactttgattggaccctcatgttcctacagataagctcgggccactatgttgtcaatattgtctgagcagagaaataatagctgattagctgccctttgttcatcaacattgtacatgagaggtggctcatttagggaaacaaactccttagaataattttgtggtcgaccctcatcctcataagcatatttttgtggaacatatgcctgatgagccacatgtccttcttcctcatcctcatcctcattctgctcttgtttggaaatatttttcttcagtttaagagatttgatttcggcttctaatttctcaatctccctctgaatctgagccacaacatcaaaaactttccttttcatcccgccaatcagttaaggtgccttggcaaggaatctacaaaccaatatataaagttagctataatttactttgtataactaaggaaacaacttttttcaagtactatcatactcagcagccctgacacgtccaggatgctctggtgtctcgagcgcttgcatcaaaatatcattttggccatcgacctgaacttgtccttgactaacttgctcctctagttgagcctaatgcacatattcaagaaattagtatatgatttatatatattaactcattattggtacaagatcaatgattaatatatacttactatcttttcggcaattttcttctcgcaatcagtgacaaatttctttctcttggtctgagatttgatccaaacacggtggcattacggatcttgaacctcgatgtcctttttctgtattattttataaaaattaaatcagtacaattacatttgtatgcacattattagaaattattaattacttgttgggttttatgccctaaataaaactcttttcaatataatcagatttacttattaatatagataagaaataacatttaat

SEQ ID NO: 120390 - DNA, 1730 bp, Cannabis sativa
gaaaattgggttttagtgacacactttgagtaactctaaaagtgtatagtgacacttcaacgcgcgtcactaatgagggtgactggaaataccgtttttagtgacacctcacacgtgtcacaaaacccttttacattcactttctgcgcgtcactataggcatataacagccacacgcatgaagtgtcactatatctttttttttatttatatttttggagatatggtgacacacaaaaagagtcactgtatttatttatttatttattttaataatttttttgatattaagttttattttttttattttaaaaatatttatttatttatttatttttattgtactgatatacatattttgttttttttttctttgcttatttctattggggcaaaattctagaataatcaaataaaaattaaaattctaaattaattattgtagggtataacattaatttcattcatcataaatgaaaaatcctataaattaaacaaatacaatacaaattaattaagctaatcccatagaaattaacatatatgaacacaaaataaaaaactaactctaaaaaataatttaaaaaataaaatccaacaataaatttcagatccaacaaatccctatattagtacaatccaatcacgttgtcatcgatcttcctcgcacgagccccaacccaactccgatgaagaaattgttccaagctcactggaaaaatcataccagatctgtatataaaataaaaaagagaaagagagaatggagaaggggatgcgtgggtacctgggatttcaagggccactattcatcaaaaataagatgagaggtagaacagagaaggggatgtgtgggtggcggagtagaccgtcgcaggttgaggtttcgaggtcggagatgggtcggacgacctggcaaaggtgttttcgtggtctgccgtgagagaggacgaaagagaaagggggaggtcgccgtgtttctggacggagagagacggggaggtcgccgtgcgtctggacggagagagacgggaagctcaccaccgtctggcctgggcgtgttggctgctgcgaacaagagaggaaaagaaaatatgttagggttttttttttttttcattttaagtgtggctgatattgcagatgcatagggttttctctatgtaccagtaacttctatttttttaatttatatattgttttttaataaagctgaaacaatattaaatatagggagacacgtctttaaaaaaaaaagagagataattttatttatttattattattttttttttttaaaaaaaagtccaatattattaaatattattttaattcataaagtgaatatatagagtcattccatgggagacttggaatatgtgtcctgaaatgtttggtgtgtcactaaagccacttgatagtcatttggttttagtgacgcgccaaacatgttaggatacacattctcagtcttgcatggcgtgactataaaagtgagtatttttaattaaaaaaaattataaaattataagtattactatatagtgacacttcatatttttagtgactcaaattattagacactagcaattaaattttagagactaattatgcatgtcactaaaacctactcctaattttttagtgacccacacttttatgcgtgtcactatatagtgtcactaaaagtctaatttgtagtagtgaaaaaactgatatcagtgtcccgt

SEQ ID NO: 120391 - DNA, 975 bp, Cannabis sativa
  modified_base (26)..(27): a, c, t, g, unknown or other
ttatcagaaaatcaattatttatttnnttccttaaatagaaaatcatttccataaatagaaaattcatttctataattaaaatattctaataatatttgcaccgataaaattatcacccgccaaatgaaaaatagtgcaccaacttttaccaatgcataattgcatcggcaaaacttttcagtgattattttgtcggcttaacaacgatgactaattttttgctggcaaagaaatgcgccagtgtaaagcagttttgtcggcgcaattatgaattgtgctagcaaaaccatctttattggccaggtgttagcggtaggaattgccagcgcatttggcaaaaggttaccgacacattgtgtctagttttgttgatgcaaatttatactagaaaaagtcttttttcttgttgtgacatttagaactattttacacaatctcataagagttatctaacacagtaatcttatatcctctaaaaatttggatttcaaatattatctttacataatatacttaatatattaatatctttcttaacttttcacaaaaatttattatattgttgtattcaattaaacaatataattcatctaataataatttagataaatattcgcaaatgctaaccaaacacaattataatttacagacaatcatattttctgttttaatattctaattaatcaattttttttaaatacttcataccaaacacctcttaagtatagcattaccctaaactattttctcattttctttaacttataattttttgagaaaaaaaaaaactatatttttgtaaagttagccaaaaaaaacatagtaatgaaaatttttcatttttttaaacgaaacttgttcttgtttaacacacactattttttataaaaaaattatattattacatttaaagaatttttttttttttacatttttacaattttttatataaataacaagaaaactacatcaaa

SEQ ID NO: 120392 - DNA, 1479 bp, Cannabis sativa
  modified_base (1410)..(1431): a, c, t, g, unknown or other
ttcatatttagggtgttaatcaagatacttgtgagcagatctaagatcctggtaaaataatttccaacagttacatcataacaaacttaacaacctcctggtaacaaaatctccacgtcaacacaagaaaaggtgctttcggatgagacatatgctaccgggacaatggaccgaagtgtatgctgaagggacttcccgaatagaataagagccagctagagttgactatccggaactcccttccaagaggcacaactagatatccggaactcccttccggaggtggagtagctttcctgaagactacacctggagtacacatgattgtcattcgggaacttcctttcggatggcaacaatcattccacaagacttcttctttatggagatcttttcatttagaagaactataccacatcatcattattgaacatgaaagagggtcccacattcgaaactttttcttgtccagcatgaatattttttttagtttaaataataaataaatatttctctctctatatatatatatctctatgaattagaatttgtattgcttcaaaatcatattacacgcttaacaacaccatacaaagtcggcaactttggttcactaagctttacaaactacaattatatctattataatttctctatccattctaagtaagctttattcactttcttgggtaaaataaaaggcagtctacttctaatgccatgcttagtatatccaataatagttgataatgataaaacttttcggtgccacaaagcttcattcttgtttctccatagatggtaaatcactgcagcaactaccaaactaactatttgcttcttttaactagaccatcaagctctcgaaatcgaccttagcatcacttgaagttgatgccctgttgttctccattccaaccattgtttgatagtatcaatacattttttgctatacatacattcaaaatagagatgtcgaatgttttcttattgctcacaacaaactaagcacttattatctgaacaaacattaaatttgaatagcctctcctttgtttgcaatctagctcttatcgtaagccacattataaattaatgtttaggaacattaaaatacccccaaacatgagttctccagtttacagacaccagactcggtttgagccaagagagtcctttgctaatagaataggggaaagaaataaattattgctttgtacatacctgtttaatcttctctttcactttgattatttgtcgccaataccagctattatttacaagattccaccatgcttggttttttatgtgcataatattgtcccattttacccaaaagatatcttatttggttgccaccctccaaacatacttttccaatgctgttattgttggaatatgttttaccannnnnnnnnnnnnnnnnnnnnnatgttatttaacatcctaaacatgaatatctaaaacaatgtaaataaa

SEQ ID NO: 120393 - DNA, 587 bp, Cannabis sativa
ctggttcgtgaaactgatggtgcacggagaatggctcgacgatgctgtaagtatttcttaacagaattaattttttgtgtttttaaatgtttgtgcgagtttaatgcgatttatatgcaaattagtgacatttatgcgattgatatgtgatttaatgcgacgtatatgcgaatatatgcgatttattcagttctgtgatttatgtattatttgtgcgacatatgtgcgattaatatgcgacatttgtgcgatttaatgaaacaattttttggtaattttcctgtgcgatttcatgcgataattgtgcgacttttatgagatttctgtctaactgttttcttttgaaacatagcaaattgatgtcatggcgcacttactgagaagaagacgaaacctctatccagaagtctacactcgaaaaggtgtagtgttggacacatctgctccagagatattcgccatgtactggaatttctatgaggatgacaagagcaagatgaaatgggatgaggccgttatgaattatgtggaggggatacagcacagacacttgccatgttgggagaacactcgtagttgactatctt

SEQ ID NO: 120394 - DNA, 1893 bp, Cannabis sativa
aaaataatttccaacactttatataaatgagagcttatagaagatctaaaccaaagtaggttaatatcccttaaaataaggagatatcacctctttttcacatattaaataaacaaaaaaataacccattaattgctcctaaagaacagagaaatatctgaagttgaactcatactttcatgggttgttggaattgatttgtagctaaaagtgagcaattgtctatccagggttaaagctgcaaaaacatcaattgtggctgccaacatgaaagctggccgacctaccctttgttgtaggctggccaacacatgctactttgtggcaagccaagggtggtccagccagaccctcatcgtcaaccattttgttgtatctttgtcatgcttgaatatttggactcttcgtcaacttgtaagttgtgcatgatgatactgtcaggttgtactccacgtggcatcaatcatgcctatatagacatgccacattatgtgggtaaaaactaagataacagttggccaaatgtgatagtggtattagtgggtattgttgtggtactgggagtttattttttatattgggaattttggggttaagtgggctatctattagtgacaaatttacctttagagtttattttagtataatggtgtgttggagggcaaaatagtaacttgtcaaattttagttaaataggtttacatgaattatttttttattatcctttactatttattattagtattattattattttatttgatagataaggtagatagaattctttaagaaagctaaaatgcaaaaaaatcaaagtcatatctttctccctttctctctttctttcaacctaaataaaactagagaaaagccatgaattttatctatttttctatccaattcttatcaagtagtcaatcctaggagcaactcaagattgtggtaagttcctttagtttattttcttatttttcaaagtttttagttaggtttttgaggtatttttgataattttaggtctagttattttcgcgctagtttagaatttgatttttatggttatttagtttagatttgagatctggttgttgtggttaggttgttgttgttgttgttgagagattcaagcttgagttttcaatactcaaaatttgagctttaacggtggaaatatatttttcatgtattttttagcttacgagttcatggataaattttaaatgagtgtttgaactgctctgaaggtttattttaatttttaaacaggtgggagtagattgtagttttaaaattttgagttttgctttcctaataccaaccattttactggttcaggattcggttaaccagatggtctagtatgcacttggaaatctattcaaccattttggatccaattaactggatgaggccagttttgagtacctcgatttttgtgttttgtctatatttagagtattataccacgctatttgttaatatagaaatttttttagttttgagtttaagttctagaatatattaaagcaagttatttatcgatttactgctattgtggcataaggctcgaatcgtcgaacgatttccactcaagttgaacgatatgcttgaatttggacttgaggtaagaaaagtataactataccacatagcatgtcaatatatgattcgataattatcgtttataagaaagagttattactctattggttgtctcattatgcaacaatataagaaagagtcactactctaatttgaaactgttgttaggtttcttacttatcggttgtctcattaagcaatgatagtgacataagttttgtaacgcccgtattttataataataaatccgaaaatcaactttaatactttatatattaataatcatatgga

SEQ ID NO: 120395 - DNA, 1653 bp, Cannabis sativa
ttcatttcatcattataatgtcataacaaactagtcttactcattagaagcatttatgcattgctcaatcctaaacaagttctttatttttattttgggatattttaataattatccaaaataaattacatagatctacaatatactcaatatttttacagatttgaagtttttttttttacaaaaatacgaatggtcgttttaattagggtaaatacaatttttgatcccatgttttggaaaagttattaattagactttctgttttgttaaacgacaaaatggatcctgtattttttaaaatagtacaaataggattccgaattaattttttgtcaaaataaaacttaataataattcgatctagagatgttatgggaaaactagttacattttttatatttgtttatgctataaattgtcttcaagttggttatattataaaataaaattatcgaaaaattgggttcagaattgtatttttactattttgaaagtgtccattttattataacaaaatagaggatccaattaataacttttacaaaacgtctaaaatagtatttacccttttaactactatgataatgatgtttgtacaataatttcatgtttacaatatgttgttttcaataaaaatgtaggaaaaaaaagtatctttttttgtaaaaatctcatttattttcatttcatgcagtatatgagagcttcattacaagcatcagcattaggtattggtaagaaagattggggaaaaagtggaccacatgacacagccaaatacagccaattccctgaagaatctgagtttttcaaaagagatggaacttggaacactgattatggtcaattcttccttgaatggtactccaaaaaattgttggctcatggtgatgacatcttagcagctgcacaaggagtattccgaggcacgggagcaaaactatccgggaaaatagcagggatacactggcactacaatacaagatcacacgcggcggaattgactgcaggctattacaacaccagacaccaagatggttaccttccaatagcacaaatgtttgggagacatgatgctgtgtttaacttcacttgtatggaaatgaaagacggggaacaacccgaacacgcgaattgctcaccggaaggattagttagacaagtgaaaagggctactaagttggctagagttgaacttgctggtgaaaatgcattggagaggtatgattctagtgcatttggacaagttttgaacacaagtaggtcagattctggtaatgccttgtgtgcatttacatatctaagaatgaacaagagattgtttgagccagaaaattggagaaatttggttgaatttgtgaggaacatgtctgaaggtggtaggcataaaagaatttgtgaggagtttgattttagtgggagtgagctttatgttggacttgttaaagctaattgtgtcaataaagcaaaggaggctgctcttgtgtagattattatgttcatgtataaaaaagagagcatagattagtatgttaatcaatatatatatataaaggaaagcattagggagttgaggtggcaatctatatgtgttttctatcctattctttattttcttaatttttatcatttatttattttttcaataat

SEQ ID NO: 120396 - DNA, 808 bp, Cannabis sativa
  modified_base (672)..(675): a, c, t, g, unknown or other
aaagaaagataatactctccttcacacaattttataaatactattttgaattgtgttttgtaaaaattatcgaataaattatctattttattaaacgataaaataaaatagtataaataagactactcttaatttaatttttaatataattagaaaaataattcttagaactgattaacttttaaaattcacataatttaaaataacatttgtcctattatttatgttgatgaaagtgagaacattttgatatttaaaatataaaaaataaataaagcaacaataatcgtgagagataagaatatatattgtgaaaaaaagagaggtgtaatattgtagcgtaaagaaaagttgtaaatgtaatagtctaaatatgacacgtatataaaaatacgaacactaacacattaaacgtttcgacacgtgtaaggccacctttaccttgcttgacaaaaaagcaacaaataaattaacatgtacaaatcaaaataataataataatcatgaaaatcttagaaatgaaatcagattgtaatttgtaaccacataatatatatgttagtgttgtaacttgaaacaattagctttcttcaaataaacgaaacatataaatatagggaacatttttaattaataggtattatttaagatattaaataaatttaactatannnnttaattttaaaaatattaagccattagattttgatctaatgacgaataataaaagagaaatttgaatttttacacttaaattaattacttaattaaaaaaaaatatcaaaaaatatatctttttacactatat

SEQ ID NO: 120397 - DNA, 2605 bp, Cannabis sativa
atttaggctacattataccataagcagaacataccaaacaagcacccacaattatccatacttttatcccaaagaaactggtaagagattgcactttcctctttatgtacctaccatcattgttcaactttttttctattctatttttttttcaagaagaattaccacatttattactttgtttttttcttcttattttctcttttttttttctatagatggtaaaggcacttcacctaacaattttttcaatctcttacttccaaaatatttcccactcaaaacacttcatgccccccaaacttaattaaaagcttatgacataataaggtacattgaaaatgaaaatggttaaagacaacacattaggcccaattaagtggtgaaaattttgaaacaggctaaggctcaactttggataaactaaggacaaattttttttacaagtaagcttgaaaggctcaatcggtccaaagaaaattcgcctcaatcattttccaagcaagaatcatcaaggatttcgcttcaagagagtacgtcacacaagttctattccatatcaaacaaacattccacaacccatgtagaatagaagtgatactatcaaaaaatcaatgctttgcatctaaatgaacaaaatttttttgcaaggcatccaattcaactcaaagaattcattaatcaagcacacggttaaaatttcaatctattgcacaagtaaacaaaagcagttcaatcaatatttcggctcagttatcaacacatgacattaaacaaaaacaaagactaaactaaagaaaacgaaaaaaataaactgaaaaaattgaaaaatttaaatctcccaaactaaagatacacattgtccccaatgtgagaaaataaaattctaggtgagagagacttacctgagccccatcagaaggggtttggtggaggtggctggtcataaggatagaagcggggcgaattcactaagaaattaggctcttcaatttcaacattcatccttgtgatcaacgaatttaattgttgcacttgactctcataaaaaacgctcatctgcgccatataattttgcatgtgcatgttctgctgaataagataattcagttgatcatgcgtgtactgcatggctgggtcgagaggcccagcaacacgttgtggtatatcttcttcacgctcttcttcttgttccggaggagggtttctttgagcaagttgttgaccatgtcaatactgcgttgtggtgcagcctttgtatcataggagtattgtggtactccataggcctcgtacaaattggtgataatatcaacgagcccgagtccacccccacaagatccctcaaccatcgaagtaaaactctgtctaatgatatcccccatatttaggttgaagcccttcatgatggcatagacgaatttcagcctgtctatttgagcattagagtagtgcttactaggcatcaacctagcactcacaaaatataaccatgccttggccaccgggtttaattcacacctatacaactgataaggctccccatcatattcatgaaacctgagaccagggtaacccaaagtttcagctatgtcttcataatccaactttttctcttcaatgagctttttcagttgttgctcctcccaggtgaaagtttgcaagttatataaggcatggattgctgctgtggaaaccggcacttcaacccccctaacttttactttttcatcctttctctcaggccaattagcaaagaattctagtgctagggtttggttattcctttctgtaacatccgcaaattttgtccatctcctgatgattacttgttctctaattggctcaaatacaagagggatgccaattctagggtgtctaagatcaccaatctccatgcccctatcttctataatggtctgtttttcaattgtagataacgctcttgtgcctcgacactcacaaacttagccctatcaacattagaacggcctgatgacctaggtgggttagatgaagaagcccctctttcactcactcttgctctttttggtcccattctcacttaatatttctaacacttaagaaaattctagaaaatttttgacagcacctccccttaaaattccactttttcgggcaaatacccaatcacaaattacacaatcttactcacaaataatttttccacagtaaacaatatccaaaaatcacacaaatttcacaaaattctcaagagttcaaaatttccaataacaatttcttagataatcataagaaattatttacctcaatgagaatctccttcactctaccttcattgatgaaaatcttgaagttcttgaggtagatggtgatgaatagtgaaattttgagtttggatgaaatttagggatttgaatgtggttttgaaaggaaaagatggattgatgagagacagagtgttttagagtgattgggaatgaatgattatgaaaagaatggaagaaaaagaattctagtgagatgaggttgaagaaatttggtaatgggggtaatgaaaaataaaattcatatatttcaaaactaattatgttgctaattcaattttaattaggttagacta

SEQ ID NO: 120398 - DNA, 601 bp, Cannabis sativa
ttctccaaattccaatagctatatgtagggttggaaaagtctccaaattgatctttcttcttcttctctttttgtcttgaactctcacatcaaaccaagaatgtgacttttattatatattgtgactaaaaagtctatgactaaagaaatattagtcataaaaaatacaatttattgtaaataaatgtatttttagtcacaatatttgttgtgactaaaaataaattagtgtcacaaaaaaaattatattatcactaaaaataactttttttatatagtgctaagagcactcacataagatgagttataatactcttttcttcaaaatgaagagaaaggtgaaaaaaaatgataaaaaaaaatcagagatagctattttatctcaaattttaaagaataataaagtgtttttctacatataaaggaatactattcattatcgaaacaatactcactacaaaaaattgttacttttagtcacaatacaatttttttgtgactaaacgtgaatttttgtcacaacaaaatgttacttgtgactaaaatataatttttagatacaagttgtcacgaatttagttttagtcacaacaagtattgt

SEQ ID NO: 120399 - DNA, 1068 bp, Cannabis sativa
tggtaaaatattcccaacagattgctcaccccatcctcgtgaggaatagagtacaaacagggcaaaaaaatacttgaggtccttaggagtaaattggttcagactgatgtggtaataattagcaatcttcttgaagtatgggagcaagggtagcattgcaccctgcttggtgtgagctcctgaccaagcacaataaccttctccagggtcagtagccagtttgccaggggagggaaggaagcattcaacaatccccaagagaccacgatcaaacagattggtcatcttcttcgtggtcgccacggatggtggagaaatccatcgatcttctggtggacttttccttctcaaaggatgagcctcagtatactccttaacaacatagtcctagccagcctccagaacattgcctgcctcagatactggctctccttcatcattgtagccgctaaagggcagcgctcgggctaccccttcttcctcatcaccttcagcatttgaaggagtagcagggtggacctcgccctggtcctccacttcttggactttaatgtccccatcagtatcttcctcgttaggaaaggtttgttctgccctgggtagagtggctaaacgggcgatgtgtaggttgttcagtgaagatttcctaacagtcttcttagtttgtgccatcatcctatgctcagatataattttatcagaagtgtgtctggcaatggtcacaccaaaattagcaacaggtctgcctgtagcagcagaatttgggcgcccgtcgggcagagtgtggaccacatttggatggactatatatgtccagttggtgggaaagtggcgcctccaacctttcttaagttcccagatgaaacgatcgtatccttcacctcgaatttggtcgggatagaaatgatgttgcaccaagggctctagggaaggtgtatgttcgctacttacttcccattctttgaagatagaattgaaagatcatcactagacgaagatgggctaccataaggacgatgattgtaatgaccgctctagtaatttggattagtaagggcaattagcact

SEQ ID NO: 120400 - DNA, 1113 bp, Cannabis sativa
gaaccaaatgacacacaaagtgaaaaaaaatacttctgtttctttattgatattgaataatagagattacattggaatggagttttatttaggacataaaacccaacaactttcttggtctaataatcatcttttggctggccagcttgtgctcaaaccctggttggccatacaagctcctcttggccggcctatgtactccctttggccagccagacatggttgtacaacttcttgacaacttgctcaactcctcttgcttgttgcttgacgattctgccataccttgtaaagagactttgtcttgctattgacaaggttgtatttcacgtgttctcaatgttggcttatgtggacatgctatgtcaagtggacaaaatttaggataacacccctcctatattttcttggaaggtgggaaaatgattacaagaaagaatcagcaatattcactttcatagcaataatttgggttctataggtggctaatcatcttactagattgagatctgatttgttcattatatacctgtttattggaagataatgatatttcccaaaaattaaattcttaattcatgaaggaacattagcaatattattattactataaatgtgtacaaaaggaatgacagaatccctaaaatagaattccagaaaagaatctactttttccataatcagttacacaattcgttcctagttctttcatcaactacacacaaagctactcagaacattactctaggctaatatactatattacatgccttctctttgaaatgaatattttgttgtgaaattcagatgtatcgccttatacctggatctgcaccactttaggcatatagcaaagatgaaaaaatgattttggatacatggtaaaaccgtagggtaaacttgataagacttttccttacttgaaacagtgatgattctagtttgttaaagcatgtttatttcatagggattgaagtttttatgatccttgtttaggtgcacattattttttggagtacatgtgttgttttgatgttgtaccagttctacacccttttttattatcttgctgagcctgaagtgtaaaaacctatctaaagtctctaagtctac

SEQ ID NO: 120401 - DNA, 1898 bp, Cannabis sativa
ttaaattacactaaagagtagtatttttttattatattattttattaatataaaaaaaatatttacttcataagtaaattatttaattattaaaaaataaaaataaaaatacagtgtggtctacaatgtcttactattattagtgggacactgtagactcccattaaaataggatgggttttaaaattcggttggactattttgtaaaaaaaattacactatatataaatttttagtgtgccattagagatggcattagatcacaaatatctatctcacatcaattttccttaaaaaaaaaatcacatcaattttatattttttcacaataaaaaaataaaatcattcatgtaaagaatacaatgtagagaagtattattcatatttcaaataatatttaattaatattttatgtatacttgattattgtgtattttatatatatatttaaatgaatccagagaagaaaaaaaaataatgtatggtgtgatgtaaatatttgagataaaaaaaaaaattgataagatattttaaagattaaagtagaaaaattgatgtgagtgctctcgatagtacttatttctttagagttctcctcatagctattttcaatagtattatgcttttttaatttttttttctgggtaagtattacttttagtcacaataaaaagttatttgttgataaatataataatattttatatttttaaaaatataaactttataatatgacttacttgttcatcaatagttctcaagaatctatctatcacactataataaatgtcactaaatatgatgtaacagattcatgtgcactattagttttttttacaacaatatttcataataattattaaattaaattatgtgagatttaatatttaattacaccaatagtaattacatttttataatgtaatgttaggcactactgatgcttatattcacttattttatttatacgtattgctatattaggtaccagtagtgctcaataatttaaaaaatttccttctaatttcttttctcacaatttcaattcgctacaaaagattaacaacgaaaatttagatcgttataatatttaatatattgttgaccaaatttgagttgagcctctgttggactcctatcttgtggggtctggagttatatactaattagtttagtttagatttttgtttttttttcaaccaaactagtattatgatttttcagaaatttaaaacgaaactagactaattaaatactcaaaacaaaccaatcaacttaaaaataaattagtttagtatgaaactgtggtttatatttaataattgttctaatttttttctaagtaattgttccttttttcactacttttttatatttttaaaatttataatatataaataacaataaaaatatataaagtcaatatcaatattttatctaaaattgattctaaatattaatattccataacaaaaatattgagtatatataaaataattaggtgatttggtttagtttaaaccgttggcaagaattttaaaatcatgatcaaaccaaaaattataaacagtctgaattgaccaaaccatttatgccaaatttatttggtctggtatcaaatggtttggataggaatggtcggatttggaactacaaattttgtcaaggccggccctgagttgaaatgagcctaataaaaaataattattttgagtcctacccaaattaattctctaaactaatatttataactattgaaaaaataggattacttttccctaaaccctaaaatgcccttcttattattctcaaccatctctctcttcctcctttctctctcaaatcaaacccaaaaccaacctatcaatcccacactgcgttccacccaaaaccacaat

SEQ ID NO: 120402 - DNA, 806 bp, Cannabis sativa
  modified_base (39)..(75): a, c, t, g, unknown or other
  modified_base (769)..(772): a, c, t, g, unknown or other
aaccatgcaacatagaatgttatttctgatctttattannnnnnnnnnnnnnnnnnnnnnnnnnnnnnnnnnnnnagggcacaaaacccaacataaagtgtatatttttgggatatctagaaggtgtgaaaggatacaggttgtggtgtttagaacttggacacaaaaaatgcttgataagtagagatgttgtgttcaatgaggttgaaatggcttacaaagagaggatagatgtgacaaaatcaaagtcacttcaaacaaccacctctgaacaagatgcgttgaattttgaggtggtgttagatgaaaagcctcaagaagatcatgatgatgatgagccataagaagaaattaatgtacatggtgaggatgaggaaggtataatcttgcaaggatgtacaaaaaatttaagattataagatatgaataaaataagtcggtagtgtattaaagtaatgagaatctttaatataaaattgctaagtacgtgtgtgattttgattcaaatcacttatgtagatagacatgtagtaaaggtactatatataattagattatgcatgactgaaccgatatgtaataaacatctttcattaacgtgtcatttaccatgaaagagttattcatatcacaataatgatcattagtagattaacttgaattctaagtatacatgaactcgtatttatgttcattgagttattcgattcactcattaaagtttcttagagaagatgattcttgcaacttctattttgggagcttaatnnnntgagtggctaggaacatgttatacaatagtggaa

SEQ ID NO: 120403 - DNA, 1687 bp, Cannabis sativa
agcattacacaaaacccggtccaacttttcaaaaataaggttggaagtcctaccattacaccaagtatagtcatctccatccgtatgaatttcacttaagagacaattcgaaattgcaagtcggaaatttttcattaagtaagccggtttgggacctcctccatgtttttctttttgattgatgatttcattaaagtcacctccgcatatccacgcacacgagaacatggatttaagcctttctaataagttccaactatccattcttccacccggatctgggctgccatagaaaccggtaaagcgccaaataaaaccaagattattttcaacaagagcatcgatatgagaggtagtgtaagacttgatatgaaccgtatagtctttagtccagagcagagccaaaccaccacttttacctttagcatccaccgaaaagcaaccttcaaagccaagctgaattcgaatgaattccatacgattgctctttaaacgagtttctgataagaaaatcatcccgggatgatagtcttttacatgggattttagagtgtttaaagtccaagggttcccgagcccttggacattccaaaaaagggccatcattgttctcggcgacccagactcgctgagttcgccgcttccaacttcgtagcaaaggtcaaatcaaccatagaaatgtcctttgcgttttcctccatctctgctgtattagtttttctcacaggggcaccattcagaccaaaatctttgctattcttgtttcgtttcggtgtcacttttcgtcgtttagaggggccttcaatctttttcaaagattcacaaccggtatcataagttattgggacatccatgagagtgttaggatcaatcatcatatttttcagcttctgtgtctgctcaggataatttggtagaacagcctttagtgaagatatatcaccagaggaagttccatcttcatctctccaagaaccactcctttttactttgttactccctgcaccaatgacttcctccataatcccctttcttgaattcacttcatccagagaattcaaattctccacagccttcccatcaaccgaatcactcagaagcacttttttacccttatctttattacccaaaaggaaagaacttgatgaggataaaggatccactgttgtccttcggctctgacccatgcttgacaagttaataggcctgtgatcattgtttatcatagaattaagggggtaatcatatgaagattggtttcttttctctgggaagcctggaggagctgagttgtgtgtattcagaacataggatctaacaggggatgagttataggatgatcttttgtcgtctactttcaaccacgatccgaagcccggcttgatattccccagaccatcgtcaaaacatttagttggttctgcacaaatccgagtatcatgtcccacaaaaccacaattaaagcacataaagggaagacggtcatacctgaatggaagccaaattttccgaccttcactcggaaagaggaacccaggacacaatggttttgttaaatcacaccagactttgaaggtgaagaatcctttagtagcatactaattgaattattttatgtatgctgattgtggaatgtggaaaattgtttgaaataaattctagaacttgcttgcttgctatttgaggc

SEQ ID NO: 120404 - DNA, 771 bp, Cannabis sativa
tcatgagccaccaaccacattagctaggtgtacgcgtatcaccctcatgaaagaccttattcttaaccctccataacttttagcaaacacaactaccaaagatgctaaactgagttttaacattttacgagttcaaaaggaaatccgggttgaaaatccaatccagtagctctaggggtttattaaattggattatcttactatggatactgatagatataatagtcctcttcgagagtccggacaaatctcctagtgtcaattttcaattaagctagtgtcaattttcaattaagctactatttcatagtgtaacactttcttatttttcaaaatcaccttgtcctcaaagtgataaaactagaaaaataaacacaaataaaaaattaatttcagcccaatatgcttttagcccaaatgaagcttcctttaagaagaaattacactatatacctttttgatgtctttaatttttactctctttcaaaatctattatgtttacattttttttttcaatcattttactaattttactcatatcacttcatgataatttttattcttttctaattaaaattttgtcacaactttctcacaaacctaaacatccatttttaaagaataaaaacctataatgtttgaaagtatgtcttagttacgtgagtgagagaggataatttaggtacaatactcataaaaaaaaaaaggtatatatatttgaattacattttatttagatgtaaatttagttaaagtataaaaaaaaaaaa

SEQ ID NO: 120405 - DNA, 987 bp, Cannabis sativa
gaaaaagatttagagttgtacaatcttacattgtttagattgtgtgagcattaaactactagatttaaatgaattaattactactaagtatatattattttctgataatcgaatgtaattggtactacagctataatataaactatatttttaaattataattttttgaaatgcctaaaaacataaaacttattaccagtaaagataaaattgtgtacctactataatgttgtcatatatagtcactgtcgtaccgtacgaatattaaaagctactggaaactcttcgtggagatgtagttaaacagtgttataattagtgtgattgaaaatgagaaaaaagcgattacttcatgagtcactttgattgactatatgtacttgctgatctgatacaaatcccactattagtgatacttgttaaatagtattgctgtttcagtgaactaattaatttcaaaaagatcatatagatcgtggttccaacttccatatatatatatatacatatatatgtgtgtggtccacaattacattaaataacatatgtacatggatgaactcatgctactattaacattgttggaacttgagattatatatatagtgcactagctacatttcagggccggtcctgtgtatcagtataactcacgtatagctcactacatttcagggccggccctgtgtatcagtataactcacgtatttaatatatattattatactttttatatgagcattaatgtatctatatgtgttaaattgtgattgattattagttttctatatagttattaaactacaatatatataaaacgtgatatttgatattgaattaatattttataaaaatagtcattattaaaaaaaaaattattagtaaaataatattgtatgatcgcagaaacacgattttgtacgttgcaaaatgaccataaatttacaccctgtaagtaaattaagtgaaattattttataaatttta

SEQ ID NO: 120406 - DNA, 1862 bp, Cannabis sativa
tttttttgtttctctctctaactcgtgctttgtgattaaaaaaatagagtctttttattttatgagatttatatttgggtgccgacaaaagatattgggtggtgggagcgaaggtgcatgatgatgtggggtggtgcctggtgcggtttgcttagttaggccaacactgtggtgggtttacttggattgggttgtcacttttgccacacacaccttttgacccaacaccacacacacaaattaaacacacctacgactactactactactatggatatattattcattattaattacttatcccatggaaactacgtgtgctagctacaacatctataactataaactatatatatcatcaattacttcttcatctatagtagttgatttatttattatggcacaaaataataaatatatattactttgcgtctaaatattttgtatcctctataattaaattactttctttgcctcatatataatttattgttattaattattatttaatagaatatttgttattaacttatatatatgttacttttaacttctaagtaaataagtaatatttcagtatttagtaattttaatgaattgattaatattattagaaaaaaaaatttaactttccaaaaacaatactataaataaattctataactttgtaaaatagtatttatcatattcatattatttaggtgcatgccaaaaggttatcataaagtagaagattggctttattacaaaattttataaatctgtcttaacattttagtcattaatcagatattgttgggaatatataaaaattataattttgtgtttaataatatttttttaattattaatatttagagataagaaactagtcttaaattagatgttagttagttaattgcaaaatttcataattattttataatctcaagctatatatatatttgatttttatatattcccaacaatatattttatttttttaattattaatatttagagatataaaaaactagtcttaaattacatgttagttagttaattgcaaaatttcataattattttataatctcaagctatatatatttgatttttattacatattaaaatggaatattttcaaattacatgtttatgtttattctatttgacatgaattaaaataaaaaatatatatgataatataattaagtttgatattatggcaagatatatatattttttaaaaaattccactattattataaatcaaaaattatttagaacaataaaaaaaatatgagataaaaaattttctattccaaaaaacatcttcattcaattatagaatgtacttcgctaaactgtgagcatacttgattaatataccaacaaacatatgagtgacaataactacaaaaaaaaaaaagataaaaaataacgtacatcatcaattaattacaatatataccctaattgtaatttgtaactcagatttctcacaaattttttgtcccaatgcctttatttgtgtactgatcattttaatgtccctatgaaattaacaaatattaataaaaaaaaatcaatatatatatatgacttccaatatatatttgatatacatacaatattaaccagagtattgtcatagggagctagctcgtccttatataatataattaattattttccataaaatttaattaactaattaaatatgcctggaatttaacagctaagtattttgcttttaagcaaactgtatttatatatataggattttgtcccgtaatgtactttcacagaatgtattccgtggtacattagataggtcttagggtacattaaataagtgtcagggtacgtttctattttttaac

SEQ ID NO: 120407 - DNA, 2336 bp, Cannabis sativa
gggcttacatacacatgtcaacgattacacagacacgacttacctaaacgtgtctactaagaagtcattttttttcagattgtgggaagccaaaggtgtatttggtcggtgagagtcattgttttcatgtatgttatacatgttaaggattgttattggttgttgaatacatgcatattttggataactctttgatatgttcacttgttgatgcaagccagcggcttaaattcggtcctatgttcgaatggatccagatcagtagttatcatgttttatgaatctcaaatgtctcactacgttttatatttgtatcctgacagtacaatatgatgcataattagttttataaacactagtgttttttgaaatttttgtctgttgacaccattgcatagtaagagcacatatatgtgtaattatgtagtccaagtgggagaatattaaaatattttgtggactaacataatgaagtgttgctcttcagtatcggcattaacatttaatgataactatataatcgataatacataatcgggtcataatgggatggatataatgtacatgctcggaacccatgacaacgctcccaatgtctttacgccagctcattgggtcaagacatctaatcctctctcattgggtatttaggcccaataagtctattatttctcttaaaaaggacacaatcccttttattatcatgtagagaaataaaagagagatgttagagggttctaaaggaagataaagaaaaagtgttcatgtacatcctaagcattttctcttgtttatttttgtgtgatgaaggttgtagaaagctcaaaaataaaaagctctcaacatcaactatatataggtatgtatccattacataatcttaagttggtatatttcacaaatataagtttttattgtatgacttaattaatgagtataattattgttatactttatactcttcacattataattaattaattgttatagttataattaggagtttatagggttttccttgaaaaagggagcatcgtggtcgttccccactctgtatgcatgtctctttttttacgaggattcgagtaagatcgagagtggagagggttataggagtaagaggaaaacaaggaatattttgttttctccatttttttcttaataataaaaattggattgtaattattgttaattgatttaataagaaaaaagtcaaaggggtagcctagccatattcgttgagagagtcccttgatcattacatgtgtctttagtccactatttggtcagccatcccagtttgactgcacataacaaaatgatctccaatgtctatcaaaagtaagtaacagcaaaataatttaccgccgaaaggaaaaaagggaaaattattatatgcatgaggacaaaaaagaaaaattatggatacaaaagaacaagtgtacatctccacgtatgtgggtagcgagataaatatggaccatggctgggggtataatgaggcagaagccatcttattatttattcagaaaaagagtaaataattggtatagattatagaggaagggtatttttgattttgtagaacaaggcccactactactatagcttgtctacacctttattttgcaaagccaaaaacatccaatgatggtgttgcctctgcatggtttttggtttgtgtatggcgtggaacatgcaatgcaacattcatcatcatgtgacactccttataaatctgtcctttcttctcctatacctatatatatggatgcacttctaataagtattacgtagtgttataaaaatttaagttttatgtttaatttttctatctaattataaaaaatctctcatttttatattatatgagttgagattgttctatcagttgaaaaaaaaattaaaaaaaaaagtttttcggcaaaaaaaaagttgaatttaacttaagtattttgtatataaacatatttttaatatagtgtaaaagaataatattttttgatatatttttttaattaaatagttaaattaagcatagaatttcaaatttttttttttgttattcgttgttggatcaaaatctaatagtttaatatttttaaaattaatatgtatagttaaattgttcagtacgtaaccatcaatggaacccataaagaagtattctatacatatatatgcgtctataaatacatttatatatatatatatatttttatagtgtatttgtaatcattaaagggcattttacaattttgtatacattattttaattaattacaaaatatgtgcaaaaaaacttagggaaaaaaacaaaaaaatacaaaaaagga

SEQ ID NO: 120408 - DNA, 791 bp, Cannabis sativa
gggggaataggtcgtcgatccacatcatgacccaatatagaggatcttgtacctcctaactgaacccgcaagaccctaaaattagtacccccaagatctagagcataataagttcccttttcactcctgacccaaagataattaagaacaaaacaaaacaaaaatcaacctcaaatataagctacaactaatgcaagtattattaagatgcataaaaaaggaagaatcgagcgcgtaatcctgattcactggcaataaatgaagaaatactaaaacatgtaggcgaatgctgccacgtgttaataccgaaaaaacaatgccaagtatataactctctaagacttatagattagcttaatcaaaatctgcaatgtctgcaaatggtcatgggcttgtggtgaaaactagtacttaataaacaatgatccacaatatcaccaatacaaaatttacacacacaactttaagaaaaacccaaacagattccaattttcatataatataaacaatcatcaacatgaaaaacaatagaaaaagataaccagaaatagcaaatggaatccaaaacacacttgcacaagacttctagctcactcaaaagtcacatgataaaggaaaggaataaaacatagaacacctcaagattctacaaaccatattttcagagctttagaaaacatattcccaaattaaaatcaatgaaatgcttaatacatcataatcccaaaccgaaacaaaagagtgtattagtaaataaatagattataaattgaaaagtgagtaaaaccccc

SEQ ID NO: 120409 - DNA, 657 bp, Cannabis sativa
tgatgccatcaatgccatgtactctttacttgactactctagagaagatcaacgcctgcagattattgaggaagaagagcaatttgatatggtggatgttgccgagactatgggattctcggggttaaggttccatgataatgatggcaaggaagggtcgcccaatatactgtaccggtgtaaaatcaaccctgtggctaaaacattattgtactttgtgagtgctcagttggtaccgagcaagcatttttctgatatccagatggatagacttaaatatgtgtacaccattatgaaggggtacaatattaacattggtcaagttatccggggtagcattgagcagattgttcagggagccacaggtggtggccttgggttggttggagtgattactgatctttacgggacttatgatgtgcccgaattgcaatatgacaataaagtggtaccgcaaagaaaaatggatgtcagtatggttaacaggcttaaggagcatcatccttatgggcagccacctcctgaagcgcaacaacaaggccgaaggtagcaaagggagccaagtgtagaaaaagaggaggaagagccaccacaacttcttgggcccattgatccagcgatgcaatatactcatgcacagctgagttatataattca

SEQ ID NO: 120410 - DNA, 3994 bp, Cannabis sativa
tttcttttgatcaaacggtgatcagtaattgggtataaaattggaggtaaaagttcattttgccatttttgcgtttcaaaccttcaaacctttctgtagaaattttttctgattgccctttctcaaccttgcataccctcattgtgccttacatttttctttcgtattacatttgaccaaattccagctctaaaaattgtcaggacctagcttctcaatctttgagatttcatttgcaaagatccctgttgcccagaaatcctcaacaagacagtaagtggcacactctcttttctttgtgattttttttttattctgttttcataatttggttagtgttcccctgtttgaaatgttttgctatttaggtaattttgattttgtttgtctgaataattctagggctaggaatatttttaagttattcgattcgtagattttctgggttgagtttgtgttctattgttctggtgatcgggatattgtttactataaatatgtcccaatttgttccagaaatcacagtcccagaatttctagaatcagattgtccttaaatttctaccattaaattcaaacccaaaatacaaatacccaaaaccattcttgaactaaacgatgaaaaaatttgggatcatctcattaaaactagtcaagacaaaacctcaggtcaatatacgtgatttttacaagaaataattaagggtaaacgccactttttgcgagaagctgcttggcctgagcctaaaaatttatctgtcattcccttagcgaggcctttatttttacctccagtcactgttgctttttcaccaggtgacttagatttcaaaatcatgacttcaaaagctcaaaaatcaaagacccctcaagaccctacagtcacctttgaggccaaactaatcgagtctaaggttagatccataggatcttatgtggaagaagtattaaggtcacgtggcatcaaatagggaaaaagatggcgagttaggtctgtcgctcctggggaatttggagcctcgaatacattagagatggagtagtactccctctcaaggactattacaaagtcttctgcaattacctcgaaattgcccctttttcagctgattccaaactcttgtagaattttggccagcttgaaagttttataccaaatcttacagtgggagtgtccaaccccactagaaattttgtatttctattctgtgaaggtctgtcgcgcaaagaagcgaggattaggtggtttttattatctcgagacccacacgaatgatcaaaggatcatcatgaggctacccaataagactgaattcagaaataacttcttctagatgtctggcctcgccccaatgcatttcgcatcatacgtagtattgcctcgtctcaaaaacatggttttgagtttttaacttgtttattgtagacatttacttattttgtttgttttattgatagcggttacgaagaggcctattccaactcccaagatggaaaaacgacacaaaatcctttttggccttccttttggattgcgatcagctgacttcttattgaatgggatcaatttaaagacctgcagtcttctcagcaccgactaggctacctacgattttaaaaacccaaaatattctaaatggcagtaggttccagtccttgctgacgaaaaagataaggattatgtggcttgtacccatttcttgaggaatatatcccctcagaaagctaaagaagatgcatcctgaggtaattattgtggacggtctcccacagtacttagggccaagcgtacttccttagttaagtttaaggatagtcaatataatttttaaatctggaactgtgttgatcgcatagcccataggtttgatagttggtatcacgagtgtcatgtccaattaagttgtaacagttcttattttggaatcgcccaacaatatggtactggctttgatagggcgagccttcaagattgggatttgtctcctctaaacacctttgatctcttcatgatcactagttctcgggagtttagtaattattatatagttcctcatcatcagatgattatggtaatttttctgagtgggagattattctccatctcctttttgcttattttgaacaagtgttgacatatttctttttgctttgtagatatgaattatgaaagccttctctcaagccctctaggttctacgaaaggtaaaaaaggaaattacttcctcaaaaacttcttcggaccacagtaaacaagaaacatgccacgactcaaatggttattgagcttaatgatcccctaaataatctcctcagtcccaactactgcgagtaccgatgaacatgtcctaggatctattcatcaggttaagttctcaggttcacaacccgagatggtattcttggagccctctcgccccctgccaagtcatgctggcagtatgggctcggatggcctgttcgcagcttgccacttcctgttggtgccactaccaatctttccaacaagacgactgggatttcgtcaaaaatggggacttcaagagcccatccgagaggagtttaaatctctaaatctcgataagtttttatctttatctcgttattttaaatttcttaatctccccttatcatcctctccctgaattatttttgtcttggaggcatctatcttttctaacttagctcatcaaagaggccttcagagaattaagcaactagagtctgagcttcgcacaatcgttgagcaacgtgaagttgttgtgaggcaatagaatgaatctcaaacagagattgctcgagtaatgaatgaagctgaggaacagaagaaaagccataagactaagctcgaaggtgctaaaaaaaggctaaggatctccatgaagctcataagaaaattcgtaaagagcttgacaaggcgaaccaaaagcttaatgaggctaacaagaaacttgaagggtctgaggagaatgccatagccagagttaattcgatggataaatggtgtctatatatcgtgcttgtggatggccaatccaaacatggatctaagcttttttggagaaagagtcagagagatcctggctttatttgagcaaaccaaaaaagacaaggctacggatgccaatgatgaagaagaagaagaagaacccaccatgtctccaaccatgtagacttggttatttttatttaattttctaaacaatggccttttggccgagacattcgttgccccttgtggcattttgtaaaaacttttgctttgttggatgaccaatgttacttatttatataattttactttttatgcctcttaccttgcttttcttgagttatttatgtttgtttattgcgttataatttacaattaaacactttttctccctcaattcaacttaagatatttttgaggttatatgcattccaaatgtcatcgtcttgatttatacgagtagttaatagtctaccacatttttcgcgagtagtttacaatctactatgttatacacgagtagtttataatatgctatgtttttaaagaaaacttcaaatattttgaataattcactttaagaactactttgaatatccttcgattgctcatatgaatagttaatcctctattaatatttttagcttaagtattatttctcaaggcacatttgtgtgtaataatacattctacaataatgcgagccgtcacttactcagcatgcatatagctttctgttgttttatgagaacaaatctcacttacaactgctatcttattttttttaaaagaaaaggtttttcaattcttgacttcatattatcctttcctttgtgatttttttttttttttttaatttttaggcttttgcaatacagtttgcaatgcagtatatatttttatatatatgccccaagtaattttaaaggaaagaaactttataattacttgaaaaaatttaattttattcataacaataattaatcattacagagataaata

SEQ ID NO: 120411 - DNA, 899 bp, Cannabis sativa
aatttgactaaaaaattatttcaagtgctaaaatagataagggtacatcaatgtatctattttaagggagtgcattgtaaaattttcctaaaagacttttgcttctttcgtccagaagaattaacggtttcctaaggtgatagattttatggtattttttattaattacttatttttatatttattgattgaattttcaaaaaaaaaaaatacatagtcctaataaaaaaaattaaccagaattgtaataaatattaataaaaaatatcgaaatttaaagagatttagctccaaatattaataatagtctactcaccttgtattttattaatggtggttgtaaagttaagaacaaactcttaaatgtaaggaataaaaatggcagagtttctactcgctaagtgttgatttttgaatcctctccccaaatcatgtgtaaagttctaacctttaagaatgtcacgtgtgtgtacttttataaactaatttataataataaactcatagtttaatgggaaatagtagtaaatggccttttatttatttttattgaagcttaatgtcattttttttaaataatatagcaaatgacctttattattttttagtatctaaaatactcttagttatataagggtattattaacattatatttattctccaaataaaaacagaagctttgctctaaaatttaaatgacaaagcctctctctccttattttttccggttagtttggatttcttcaaatatttttggtaaattatcgtgatttctcccaaaaggtgatgaaatattaatctctcatccatttattcgattcattcgttggatccaatcattttccttaattcctcacaatcgaaagcgacgaagctctgctcattttcttcttcttct

SEQ ID NO: 120412 - DNA, 2084 bp, Cannabis sativa
ggcctttgttaattgtatttagatcttagaagtatatgtgtccctctttcggcaatatgaataatatttactcctaagcttttagaaatttagagttgcgaaggcttgcagtcttcctttcagatggtatgaggacacatggatgtttaaaaagcatggccctttttaaattctaagccaataagtggtggatgacaacttcctgctttctaaatatgacttatatgtggcattattttcttggttcgtgaagattaatgcgttggggaaacaagtgaggcctaaatatgcgaaatgacagttgatcatgtcaataggtgttccgaggaaaatttcatcatttaaattatatcgattccttactagtcattaaatgttaacccttccgctttttgaaccgtaagacgcaatttttgttttcttgaaatataatctgaaccattgactcaaaagcacgcagatcaccatttttcctataagtaaagcgaaaacatctgtttgccactttcatccattttatattctgagtttgaattttttttttgtttgaagttgaggagagaaaccaggagaattgcttttggtgaatgtcccattactttgacgagtgccttcgccttcttcttcgaattcattcgcgaaaaaatccaagaccgcatctctagactgtacgattcattcttcagatccattgaaaccactagatcttcaagcggacattgacggactcatagcttgtgttcgtgatcttcaatcaagaattgggtatctcgatcaaactccggttactgtaccttcaattcacccacaacatgacatcaaaattccttccccaagactttttccttcaacacgtaagtaatcttttgcatttatggagtttaggattttctaaaatgcaattaggtcttgtgtaagacaaataaattgcatgatagcatatctagtcgattttgattttctttttgatgtttgcatgtctagtgtggtagatcataatttggatttaggttttcttgagcaacttgaacattacttgaaataggaatgttaatttatccttatactgcttgtagaaaaaaattaagttttgcgaactctgtttttgttttataagtttctgttgagtattcaaattcaatgaagtgtctttgaactttattgagcttgaatcctctatcgggaacccttatgattctagatgaaatgttttatacactttcagtcaaaatctatgttcacgatctgataatctggaagcaatgttccctaaggatcttgctcccggatgtggggtgaggtgggggacctctccaaccagtttaagagaaagactctcatgtacccttgctatatctatttattaactgcttggttttttcccttattcttttacggctgccatcatggttgatgcaattcaagctaacgaggtggagattcttgaacaataaagaattgaagcaccacaagtagtgtataattcatctcaatgggagatggattaacaactaataaattcaaaaactatgggtcgatgtgtgcctacaaagaagagccccacctcaaaaatatcctccacttattttggaacaggctttctttgttaagagaatcatcgttcaagtgcgcggatggatttggtgtctggagctgggcacatgtgaaagtagctgcacattgtgacgccctactagattaggcacgttatcatattttgtaattaatgtgcacttctttactaatcaaagagtttattaaaaacatgaataattaaaattttgtaaataacttaaacttaaaacatacatatacaaatgcatattctgagatcccatttaaaaagttacatttatttacaaaatacgagagttacaaaagttatcacctagtgactatcaaaataaatctctactgtcacgaagatttgaacactccaggtctaaccgcctcgatatatacaatcttcatctagcatgatctcactgctgctcagcctttgctttgtctttacctacatatgtaaacaatatttgtgagtcaacagactcaataaaaagagcataaacataaacatataacta

SEQ ID NO: 120413 - DNA, 1578 bp, Cannabis sativa
  modified_base (1247)..(1247): a, c, t, g, unknown or other
tgcctggaactagggttcttggccggcctctaagctgggtcttggggtctgaccagcctataggacctagaaccttggctggccaaggccaaggctctaagcgggcagctagtttttttccctctttggacaacggttagagttttatggtggccttggaggtatatacaactgtagccttatgcgtggtttctggataaggctagataatgagtccatcatagtcaattatgcaacttaggacttactgtgtgtcttggtaattgcacctaagacgatacttggtcgttggtcaaccttctacccttcatttttttggaagatgccgctgagtgtcgttaacttgatatatttgtagcttttttaggctgctcacctcccctcatttcttccatgcaggtagggataggtgtcgaattgggggaggtggcagctgtgtaggtcttctgctctcctcgtactgatggcaaggaccaagcaaactttgcatagggctcccccatacgatccacatgtggccatggtggccacaaagggtcgaatcatagtgggggaagaggctcccctgcctcctgttgaggctgaacctgaggtagactcagagactgggagcttcgatgtggaattcaagctcgaggaggctgctctagtgagggggaggagatataggacatgttttatactccctaactgtcccttgggcgattatgatgcccgaggcaatttgctgaatggtcttggcgcgcctttagtaataggactagatcacgtcgtagaacaatctctcgtgctagatatattggattggaagccacctaagacaaggtgggtttttccagcttcctctctttcaaaacaccatatctccttcaatttttatcaaaatcgagttccgtaaaaaactaaaattacttaatttttcacaagaaatccaaataaattattttcattgaaaaattttgtaattcgcattcaatcatcaaatcacacaaaaaccaacatgaacacatccaagtcaacaaattcatcattttaaatccatatttcaagaaagtaaatcattaccacgactttgaggccagttgttgggattattttacaaggatctagatttttctaacatgtatatttcattaacaccctaaatatgaatttttaaatacgatgaaattaaacacataagagtttagaaaaccttacattaatgcagcagaataataatgactctttccgctcagatctctaanccttgttcctttctgtcgcaaagtaataagatgatctgagcctggatctccttcactctttcgggttggttaccaccgtcttctgcactatgattgaggacttgactagctatgtgtgggggcatgacactctatcactgtgggtgaattggtgaagaacaatgaatgagggttccaaaacactatagaaagagtctctcatctactagttgtctgacagagttagaaaactagatttggtaggttgaaggtgttgaatgagaatggcagcattatgttccatttatagtatttcaactatgatttaggattgaattatatggattaaaaa

SEQ ID NO: 120414 - DNA, 529 bp, Cannabis sativa
cacagcttgataagtaacaaatttaattaagcactttaataaatcttaactaagaaataaccattatgtattattcattaataatgaatatttctcaccgcacaatatgtaaatgtaagttggtttgcaagtagacttgtcattgaattggattactttaaatcgtcttgacttgtaagttgtgacctataaaatatttgaaaagtatacaaattgtgaatattcccaatatgtagtttataatttatcttatctcaaagaaaaaaaaaaagaatatgcagtttataagttattcataatttaatagagtttttacaaaaaatattagattttgagtaaaaatttacaattttactgctacacggaattttttataaaaatactgttttttataaaacaaccatataatttagatgaaataactaaaaaacaaccgttgaacaacaatgaaaacttttttttttagatgaaatatcaacttcattgcataatttagcattctgaatacaaaagatgtaagagttcacca

SEQ ID NO: 120415 - DNA, 702 bp, Cannabis sativa
aaatagattccctcttattgtatgccgcaagcttgatgtattccaccttcaagtgctcaaactcctttcgctctccttgaaaactgcttgcttcctcccgtggcaagacttgaaaagctatttcccgaaatcttgtagaaccttctcccaaaagtagcactattcttcttcttcttttgtagacttgattacagactcaagataataaaaataaataaacatagaggaagagacgaacacccttctcctacacacaacaaagacactcttttctcccaaaatacgaataaaattcaaagagatgaaagagatacaaaatttagctgctataatatgtatttataattaatatacaccttataaacagctcatacacggcctaaataagaccacagttcataataaactttcctaaaaaagatattcaatcagctcggcctggaatttttacttctgtacctacatgatcgtgagcaataagtgcgactttccttttataaaaaaaaaagtcttaattcgacttcttcactcaagatttgatcaaatcatttaagaaatgaatattagatcagaataaaatgagaaacacgactcgaaagataaacaataagaaattgatttttctaggggtgttcattggatcacatccaatgtttttaggcctattcagatccaatccaattatatattggatgttagatt

SEQ ID NO: 120416 - DNA, 686 bp, Cannabis sativa
  modified_base (219)..(234): a, c, t, g, unknown or other
  modified_base (621)..(624): a, c, t, g, unknown or other
ttttgtccacctgacgtggcatgttcacgtaagccaaagatagagtacagatggagtacaacaccgttaatagcataacagatcctccgtgcaagatatagcaaaatcgtcaagtagcgaccgaaggaagtaaagcgatcccttaaggaattgtactaacatcctttgccggttaagaggagcctacaggccgaccagggtgagcctataggtcgaccnnnnnnnnnnnnnnnnctagccggccaagaagtgacttccgaacccaaggagactctgtttggccaaggaaacctggcatcttcatggaaacaatgtacaaatttgccctcaatttgtaaaaggttggcctcctcttggtggagctatagtatcctgccagaccctgtaggccttaaactgccaagtcctggcaggaccatggcccccttgacttccttgtaggccttttgatggccaagcattacttggcaagactccatgtacaacactatacgtggaccaaggcattggctacgaattgagccctaaaagcccaacagacaggctgagaagtatctagaatctaagggcattgtggtcttatgtaaagatctagctaactatcctattttcaagggattnnnnttgtaaacctagggtttaaggcttcctatataaaggctttaaccttaagctaaaaacctaag

SEQ ID NO: 120417 - DNA, 3096 bp, Cannabis sativa
aagtaacgagtaatttttcttttccctacccaataagaattactttcacctgaagaaacttcacaattttccactcaaaatatctctacactactacttccactcctcctatctaagcatcactaatctactttctttcttcttctttttctaagacaattattaagaatttcttcaaaatcatatccacatatatcagataaaaatcctattatataattaataagattcagtatctatctatctatctatctacaatttattgtatatatgtataatagttgttaattaaaatacccctttttaaacccgcgcaataattaattagcttattagaaatcgattacttataaaatttcacgtgttatcgcatgaaatcttaaccatttatacagaacaatactaaaggaaaaatccagcttcaaaaaacaactgagatcagataaaccaattaaaaccaaaactccatcacattggtatttattatataacattattatttaggtcagtatatacacatttcctctactcatacatatatattttatttatttatatatatattcacatacctgaataattatataaataatttacaattcaaattagaggatttgttaagctataaatctcacataaagacctgaaccttttgtgcttcctgtgaggcccaatctcaaatatcgtggttggatcatcattatcatcatcttcatcctcatcatccttggaagcagtactaataagatcaaacgtcgtcgtatcgctcatcgcctgttgatcgtgatcatgatgagctgctccgaattcgagtacttcgaccgatactacggcgtcgtttcggttgctgctttccgagtcgccactgagttggatgagtagctcggccgcgttgatttctgactcggagaaaaccgacgtagaagagagcaacgacgaggaagaagaagaagaagaggaggacgagattttcctcttcttggttttggaattgcatgatgatgatgttgtttccttagccatgtttatttttcgttttggttttagaaagagaaagttagagagagattgagaaaatattagcttatatagaacgaaatagtttaggtcggttgtaaaatcctttgtatttcattttaggataaatattatgtttagagcatatattttataaaaattattaattaaattctttgtttggttaaatgataaaatagaccttacattttttaaaattgtacgaataagatcctgaactgattttttttttattaaaataaaacttaataataatcttatgtagagatgttatgataaaactagttacatttcttgtatctgtcatattagaaattgtcttaaagttagttatattaaaaattatttttttttttaaaattgagtttaagatcttatttttaccattttggaaattatatggtctattttgtcatttaacaaaacagaaggtgcaattattaacttttgcaaaacataaaatctaaaatggtatttactttttattatatttatttatttatttatacaaatggaatgaaaagatttttctttctgtccacgttagagcatcggccatgcttagtcaatgaaatttattaatatataatttttttatatatataaaatgaaaacacggcttaataattaatatattaataaaattaaaatttattaacgatatctaaaatcaaacaaaaggtgtggatttgccaattattatattaccaaacaaacattagatatcttcacttatttaatatgaattaattaattatcttcttttttcatcgtatttcttttgaaagatcgtattattgttttgattcttttatatgcttctattacatttttcttcacttatttaatatgaatttattaattatcttcttttttcatcgtatttcttttgaaagatcgtatttttgttttgattcttttatatgcttctattacattttcctatctactctccccgacatatattttaaaataatttatttaatagtattatatattattaagtggaaattaattaattttatgatgtatttttatttaaaacaatatacaactacttttgttttttgaaataaaaaaataacagagagagaacaaaaactattattacaaaaataatttatcttgaactccaatttcaagtacattattctttaaataatttgagatgagtgtactagttttcaaataaaattcagttttatatattcatttagggagcttgcaaacaagttgtgtattggaagaagtggttgagagtacagtgagtcatttaggatgactcaggaagagccatgtaaacctccttgttgaggtctccattaaaaaaagtgttgttgacatctagttggagaatgtgccattgtttaatggtggaaatggccagaagaagcttgaaagtaaccattttagccacaggtgagaaagtgttgtaaaagtcaattccttcctcttgagtgtagccttgtgcaactaagcacaccttgaatctctcgattgaaccatcactgttatatttaattttgtagacccaacaacatccaatgacacgtttgttcggaggcaagggcaccactgtccacgtcttgttttttagtaagcaaaaagttcatattgcattgcttgatcccacactttgatttgacacatcttgattgtatgtgatgggttcaaataaggtttgttactgcaaggataaaggttttacgagaaggagaaagtttactataagagagaaatttatcaagagaatggggagtaaagtgtaaagactcaatttttcgagtcaaacatatatatataaaataataataatatatatgtatatatatatatataaaaaaatagcagacctcctatcatcactctctctctctctctctctatatatatatcgatatctctctctttttctctctcttcaaaacacaaaaaggaagccacaaagctccatcaccggcggactccggtgacccacctccggcgtccgaccagccccacgcgccagaccactcgaacccctggtgccgacgacctcaccccccaagcggcgctgct

SEQ ID NO: 120418 - DNA, 1029 bp, Cannabis sativa
atatatatatctatctatctatctctctctctctcttatttgttttgaattgggtagtgactttaatggaatctgggtttatctcttctggataggtttatgacccatttcgtaaatcgactcaccataatgcaaccatttacatttactaatttttttttgtctccaccatattgatttcataaatgtcactagtgttttctttaaggttagaacttttttttttttataaaaggccagttaagcataaattgagatattattatggagtcattgttttcctttgggaccaatccaaatgaactagaaagagaaagagtaaacaaatctgttaatgcaaagatcaatgatatataatataaaatatatgttgagatatatattattttttctgtaagaagctaccactcttgactttgaaactaaaaaaaaaaaagtttgttcagtttgggcgagttaactcgaccaaatcgactaaactgttggtcagtttacagattttttttaaatggggtgcgtggtacttaaattttagcaacctacactttagattggtagaaaatatgtaggataaattacccaaaccaaccgacatacaaccctaatcaatatccacagaagaaggctaaacattagactcaaggatagaaggatcatggatgtcagcaacagatggatctacatccatattagatagagagagagcattagggaatgcacagagaaggcaccatcaccaattgaagaactagagaaatcaccatcagtaggaacatcaggacgatcctcagaagattttaaaacctaagtcatagcagacaacacatcaattacaaccttctcaaatcgacactgtctgatttgatcacgtgcataagcttcaatgaaatcgttcacccgagagaacaactaactttgccaagttgcaggactgtacccttctagaggaactgaaggaacagttgaggaagaagagacattagaggcaagagcctcaccagcagcaggtgttggattttgtgccctaaa

SEQ ID NO: 120419 - DNA, 668 bp, Cannabis sativa
agatataagagatttcatcttgtaactcttgtaggttagacatatccaccaccttagcacatagtgacttgaaaaaaaagcacaacctagttattatctctcgaactgttttcggcaagacagatcgaatagccactggtaatacatgttgcatcagaatatgacaatcatgagatttcatgccactcaaactacaagtttttatgtttaccaacgaaattatatttgaacaaaatccatctggaactttcatattgaacaaacaagaacaaatttcttccttttcatctttagttagtgtgtaacaagcccgaggcaaatatgtcctacttttcacaatctttggagccaatttttctcacattttcatttcaaccaagtcttttcttgccttaattccatctttactctttccaggaatattcaataaagttccaatcaaacaattgcaaacatttttctgtatgtgcataacatctaagttatgacgtacaaccatgtgctcccaatactcaagataaaaaaaaaaaattgatttctttttacaaagtgacttaggttcctccataaccttagactttccacgacctttccgctttttagatgcacgaacacttgacttccctaacttgaaaacaattttagacatcttttgaagtacctgggtt

SEQ ID NO: 120420 - DNA, 903 bp, Cannabis sativa
gtatgccaattatcatcaaatcccaatttgtttaagtagttatgcaaaaacatccatttttttttaaaaaaaattaataccactactaaatgtcaagtgggactacacggtgtacaccataacggaggaagaaaacatacactaaaggaaatttacgaagaactttttttaagagatcaaataagtaataatattaaataatttaaaattaaaaattaatcaatccaaaataactggttgaattggatttgaactattttacagattgtattggatccaaaatataatattcacatttaatgcagattgaatgcactataaacaaaaaaagtgcagattaactaccaacaccttataatctgttgcatgcataatatttttcttttattatatacttgagcaacaagttatttaaatccatattttgatgcactaaataatttggtacctcgatcaaaaacaacacaattaatataatgcaatgcaagaattagaacaaattaagtaaactaacactaataatgatgaactgaattaataaacaaagcaacgaacatttaaacacatcaacacatgaacattacgaggtttgatgcctacctcttggctagaacagcccaataactttggagcttcattgagctatgaacagagttggattacaagttgattctcttaatgagtactcggactcaatcgctcgatgaagtagaacttcattacaaagttcctaacttgtggcaatagggatcagacacaccttatgccattacaaccctccatctctttcttttctttctcaaaagctcactatgttgggttttatgccctaaataaaactcatttcagtataatcagatttacttattaatatagatcggaaataacatttaatgttgcatg

SEQ ID NO: 120421 - DNA, 546 bp, Cannabis sativa
  modified_base (517)..(520): a, c, t, g, unknown or other
ttagtaggaaaaaaaatatagaatagatacttagtagaataacaatactaaaaaaatatgaaaatacttaatagaatggatacttattttaataaaatactaaaaaaaataaatataagatggtagaatgtaaaccaaaatcaatgttatgctttaaatacaatcctaatttgctgaaaggaaaaaaaatacattagaaaacttaaaacaccaaaacatatttaaactttgaaaaatataaaatatatataatggactaaaaattaatactatgctttttttatcagaaaaattactactatgttttaaatactaattaatagacaaagaatcattgaaaaaaatatgtaaataagtactacaaagtatacaatctaacaacatatcaatgcaaagaaaattaaaaaaatagaccgaaaaatcaatgctatatttaggataccatatactaaatacagtagaacctctatccaagaaacacttgggactaagtaaataatattctaattgagaggtnnnnactaaatagagttacacttgaaaaaa

SEQ ID NO: 120422 - DNA, 679 bp, Cannabis sativa
tagggcacaaaacccaacatattcatactctacatttatagaatactattcattgctctaaatatattttattaaatattttaaattttaataattagtttatataaagatatatgtatacattaatattatacatttgaaataaataaaatataataaaattttaaaaagtaagatttgggtgatatattttaaaaaagttgatgtatggtgtaatgttaaagtatgctataaaatagagaaagtagaattttaataatgtattttaaaaaaaaataaaaaaaactattgagaatactatatttgcttcactcctaacatgagtctcattacactttgagaaatatgagaattacaactaaatatataaaatacatgaaaagtattaaaacaagattatataagaataagaaaaagaaataataatagtacataacattatatgaatataaagaagaggaggatctctcaaagacttaaataaggtcaaggatctttgtcctaaaagttattttctcgctcacatagacacttagaaattttttagaaatgctcttaaggatttcttaaacctagtatgctcaccctagtgtctaaggatgagtatatcctcacaaggttctaaccaaacaaatggtttcaaccacttcttatgcaagtgaacaatatgacctctatt

SEQ ID NO: 120423 - DNA, 1484 bp, Cannabis sativa
ccccttgatttgtattgacttaagaacaaagaatgaagtgattcttctcttagagttcttacaatgatatctctgagtatatactcttagataagtgttttcaaccttttgcccagtgagaatagatcactatttatatggctataagcttgagggaaagtttcccttctgtttacaatgtctataattggtaatattacacatcaaatacaaaatacaatgattaagggatttggacaacttgccatatctctgcgatatgatcccaaagttatagggattgcttctgtgattcacgatgcaagtgttaaagttgctaagtgttggcatgctgttcggaccgtccactgctctgccaggaaggttttgtccgtgtagatatgtgcagtgttcggtttggcatatctcttttgagcagatacgtgaagtcaattccacgtgtcactaatatgtgatcccatgtcagagtaccgaaattgggataacaatatactccgagaagtgcatggtcgaatttatggcaatcacacaggaggtaattcccttgctttgaaaattatgcggcaaggatattacaagccaaccttgcaagcaaatgcaaccagctttgctaagaagtgtgacaagtgccaacgaattgtggcctatgttaacagcccacggagctaattaaactctatcactagtccttggccatttgtgatctgggatatagatttaattggtgaattactgaaaggaaaaggaggagtaaaatatgttgtggtcgctgtagacaatttcacaaagtggaccgaagctgaggctcttacaacaataacaacttcaaagttaggcgagtttgtctatcgtgctattagttgtaggtttggcattccttacaaattaatctctgataatggaaaaaaaattattgtaaagaaatgcataaactctgcgatgatttggggattcaaaaagctttctcagcggtcgcgtatcattagagtaatggacaaatagaggcagtcaataaaatcatcaagcatactatagaaggtaagcttgaagaaacgaaaggtgtgtggccagaagagcttctggttttgtggtcatacaacacctcactcaacgactggtgaaacccccttctcactctcgtatggatgtgaagccatggaaccagtcgaggttagagtcgggtcgttaagaagagatgttttcaatatcgaaagtaatatagaaaatcagttgatccaactcaatttcctagaagaaaagtgcgatcaggctcatttgaaaaatgcagcctatcaacagtgcacaactcgctatttcaactcaaaagttaaagaaaggagcctgtgagtaggagatctggtattgcgcaaagttatgcctaatacacgcaattctgcacatggcgtatttgatgataattgggaaggaccatatctcattgctgaaaaaattggcaacgcaacttactgttggaaattatttta

SEQ ID NO: 120424 - DNA, 1630 bp, Cannabis sativa
gatttagaaagaagtgtatagaggttattcttatttataattagttcaaattgaaacttaattatttataataaattagtgattattttttaatatgatatttttatatagatggtttactttatataattgagagatttaaaatggtgaggtggcatgctaatttgtttcctcatatattttaattttattaaatggtaggtggtgcattttattattttgtctttttcacaatgagaatattagaacttagatccgcttttaatatttgtctcaatacggtttgtaactttgtagtggttgacataaatttataagggcatctttaacattatgctcaagtagtaaaatattgttatattttagaagttgttaaatcattttcaattgagtactataaaaatggatttccttcgattttacaaaaatgggtttattatggttcttatattggtttgggtttgcttattcttcgatttccaattatttatggggtgtgttcgtctttaggttagtttgatttaggatttttgttttgtagatttgtattcataaagagtttatttttattttatttacccgtttctttttttattttaattttttttgttttaaattttagttcataagctatatttctaaaaatattattagttaattttaatttcaagttatatttccaagttttttagtggataatgccacatcattggtatttttatgactggtcacttgtaagtctacctgatacttggcttccgagccacataggcagaaaatgggatttgttagatggggaagtatttttgcttacagttttgaggtttaggtaggtttacaccaaaattttagaattaggggttagttgcaataaactagacatatttatgaggggattatgccacaaattactcataataactgccataatttttgtaagatacaaagaatttcccatatttatgtaatttttacctaaaatattaattctcaattatcaaacaattctcttgaagaacaattttcttctaaatatgtccttacactattataaaatagattaatttacggtgataatacctaagtttattttttagttgtagattaatacttaaatattttttttggcagtaaaaataccttctattatacttttgttgcatttataagtacctaatcgttgagcacatgtcactctttgattggtccacatcatttaatttatatattgtatttaacaattaatttaaacatttaaaaatctttttaaaattaaaaaagttttttaaaaaatcatttaaatatattaaaaattaaacatagtctattaaaaggaataaaagcataatgaaaataaaattaaacgtactttaatattcatgcgcatcaaagttattttgaagcctaccagtgtaatcttttttgggctgcattggagagttacccaaatatcagtactcttcgtggtaaatgcatgtctatttttgacattttaaaaaattataatttaatttttttatatgacgatatgtattatgttatataatttaatatagtaatatgtaaattaaaatatggtaatatatgttattatgtgaatgatatatattaagtgtttggtaaataaatt

SEQ ID NO: 120425 - DNA, 1318 bp, Cannabis sativa
  modified_base (1240)..(1240): a, c, t, g, unknown or other
atcaacaaataaacaatattcatcattttaaatccatatttcatgaaagtaaattattaccatggctctgaggccagttgttggtaatattttaccatcatctaaatttactaatgagtatgtttcattaacatcctaaatagtgtagtcgatacgggccggactttttgacacgacacgaaatcgatacgaatctgagaggcacgagcacaatctgacactaaaaaatataggcttgagcacaacacggcatgatactacaaattagcacagcacgaaaaaatagacttaagcacgacacgacacgacaagcctgaatgcaggacacgtaagcacgaatataaaagccttaaaagtacaacacacaaataaatatgatttttttttattttgtaattcataattatatattttgatatttatatacatttttatttttaaaaaataattttcaaaaaaattatttatgtataatactatttatatgtatattttttacaaaaaaaaaatagtaatattataagtatattgtacatatatgttataaattatattataatacaaatatattaatgatatatcaaataaaataaagaccgaagctcatatctttttctttaaaagcccattttttcctaatgctcttatttactcctacacctattataaatatatgttttaactcattcaaaccctaaaccaaatttttctactctaactccagccgctctaagtctcagccaaatctctttattgctctcatctcatatcttctacaactcagtctcactccaatctcttagtctcagtctcagccccctagtcgtaagttaattcaatctcctccttctatttttttcttctccctctcttcctaacttgctctatgcttctctctcattttttttatctcaggtgaggcattactgtttcgggctccttcattgtaggtggcgagcatggcttgttaaaaaaaatctattggtcggtttaacaaagcccatttaaagcacgatttggacccgggcccagcacgattttttcatgcccatggactgtgtagggcttgacctatggaaatatgggcaagcacagcacgactcatatttctatatgggccagcatggcacgacccatattttttgggcattttcaaaacggcccaagctaggccgtgccagcatgaatttatagctttaatcctaaatatgaataactctaaaataatgaaattaaacanataagagtttaagaaaaccttacgttgattgcagcagaatataatgactccttccgcagatctctaacccttgttcct

SEQ ID NO: 120426 - DNA, 665 bp, Cannabis sativa
tgatactaaatagttacaacgtaggtgatcataaaaaaaaaattagattaatttttttaaaaaaatattaaaacaaataaagaatttaccaaaacaatcatttagaagtggagtgagacttacccaataatactatatatgtatgtgattgaaaatattggtattggtttaattgaataatgaaactcctatctcatgtaataatagtataatatatagtcatatttatatgtggcttattttgagccacgtctcccaataccatctttttctctcattgtttttggtatgtgacttaacacataactatatataaacacacatatataatatgtatatacaccatattcataatccaaactatgtgtatttacacacatacacaataccatatataaatttatctcaaaatcatcaaaagaagaaagatcacaacaacaataatgatttgatgatgatgatgatgataacaatggaggagagatcatcaagagtagagaaaaccaattcaactccaacaataatggctgacgactcaactgagataagcatattcgatgctcaaaaatacttcaacgacctcaaccttctaaaccctcctcaaaaacccacttccactcccgccgtcgccggcgccggcgccgccgtatccggcggcggaagtg

SEQ ID NO: 120427 - DNA, 4309 bp, Cannabis sativa
  modified_base (37)..(44): a, c, t, g, unknown or other
  modified_base (4260)..(4265): a, c, t, g, unknown or other
agggtcctatttgtattattttagaaaatacagggtnnnnnnnntcatttaacaaaatacaaggtccaattggtaacttttgtaaaacagagagtcccaaatggtatttacccgtaaaataattccaacaggtacgacttggagagttcggtcatgggcttattttgtagtcgttgtgcgacaaagatataaagtttattttgattatgtaaaaaaatttaaaaagcgggatcccgacctttttgtatggttatgtgtaaatatttataaaagttttaattgatcacgattttcgagaaaactttttgattagcaaaggagtgcactataaaaaaaagtcactgtagcgtgcctaatcattaaggtgttacaattttggtatcaaagccgccaggttttttattgaagatcgtcaagacatgtccaatcatcatcaaagataagctcgattcactgttcagtaaccctttacttgtttagtaagttaggtgattgggaaatcatgatagtaatatgttacttattggaatgcattacctaaaaatccataagtgcggtatttagaatatatttgatcgttgtctgacttacctgacttatgggtttgcaagctacgtcctatactatggatgcccaacaaaacacgagaagttagtgtaatatggtcgagaccgaaggaagtcagggaggtcaacatcctcaaaattcccgtggacgcggcaagatccgtggaagatttcaaggggtggtcatgaaaatccaccagaagctccttcagattgggagcaatgggttgcaaaattgcaagcatgaatataccagcaagatgaggagatccagaggctgagacaatagggtcctcctgcaatgcctcctcagcaattgccagctaccttggttctagtagtgccagcagaacaacctgttgttggaaaccgaatgaagcctttgtatgaaaggtttctcaagtaggagcctccaatttttctgggaggtatagatgtcatgaaggtcaaatagtggctcatagtaattgaaagaattttgaatttcatgggtgtcatcaagaatgaccgagtgatttgtgccacttttcagttccaagaagacacactcgtgtggtgggaggtggtatcccacacccgagacgtcactactatgaacttggaagaattttgggatttatttaatgtcaagtattataatgagactgtttgcagtgctaaaaggaatgaattggtttagagagaggccatgtcagtgacaaagtatacaacaaagtttgatcgacttgccaagctggcttcaggtatagtgcccaaagactttagcaaaaagaaaaatacttggcgtgattaaatgccaaaattagacatgatttggtgatacaataaatgacataacaacctacaccgaagtggttcaaaaggctctccaagctaaggacgtggtggaatttcttcatgagccccgatagactccaagtattagtgggaccaccacccttcctgcttctagttatggtagggatggtggtgatagcaatgttaattacaagaggaagaattttccaacatctagttgttcaggacagagtaagaggttttaagggaaccaaggtagaggtggacgtcagggttattcttatcctgagtgccctcactgcaagaaatatcatcttggagaatatactcaaaaggcatgcttttagtctggcatggttaggaatttaaagaaagactacatgaaaaaggaagagcaaaaataggagacgaaaaccgtacctactcgggtgtttgccattacgcaagcatatgctgcaaccagtcctttggtggtaacaagttagatttttgtcaatgacactaatatactgtactatttcactctggggctacacattcatatgtggcgtctagaataattaataaatttgggtgtactttgtgattttaatgagatagggtgtggaatcctactacctagcggagagttggttatctctaaatgctggattaggtctataccagttagaattgaaaatagggagttgagtgttgacctcgtggagttggaattaacaaattttgatattatacatgggatggactttttgtccaagtattcagtcagtattgactgtaaactaaagatggtaacttttcaggcggagggtgaagatccatttgtttatgtcgggtccgttcagggttctcagatcctgattatttcatttttaaaggctaaagatttattacacagtggatatttaggatttttagtagttgcaactgactgtagtagatccaaaacaattgggcctaaggttctcagggtagtaagggaatttctagatgtttttcttgaggagttactagggttgccgccacattgagagatagacttcataattgacttggcaccaagggcagagcctgttttgaaggcaccatataggattgctctagtacaactcaaggagctaaaaatacaacttcaaggaatgatggatctaggttttacccatcctagtgtattgccttggggagctccggtttttttttttgtgaaaaggaaagatggatccctctgaatgtgtattgattaccaggaattgaataagctaacgatcaagagcaagtatccattgccttgaattgatgattttttcgatctgcttcagggtaagatggtattctctaagattaatttgcgtttgtgttaccatcaattgagaatttgcgaggaagacatcccaaagactgcatttcggaccaggtgtggtcaatatgaattttaagtaatgtctttcaggttaacaaacactcttctaacctttatggatcttatgaacagagtgttcaaggatttcctcgataactgtgttatagtatttatcaatgccatccttgtatactctcagacagaagcggagcatgagcaacatcttcgaatggttttgcaacgacttagggatcataagctatgtgcaaagtttaaaaagtgcaaattctggttatcaaaagtgccctttcaagggcatattgtcaggaaagacaaaattatggttgattcgaggaagaataagtcagttaacaattggccaaggccaagaacagttacttaggtttgaagttttctcagattggcagggtattatcgatgttttgtagaaggattttctaagacttcaatgccattgacgaaattgactaagaagaaccaacagtttgtatggatcgataagtgtgaaacgagcttccaaaagtttaaatagtggctgatcacatcactagtgttagctttacaatcagaccaagaaaagtttgttgtttattgtgttcttatgcaagctgagaaggtcattgcgtatgtttcccgttagttgaaggaatatgagtagcgttattcgacacatgatttagaactttctactgttgtgtttgccctaaagatatggcaatattactaatacggggagaagtgtgagatctatatagaccacaagagtttataatacttctttacttagaaatatttaaatatgagacagagatgatggttagtactagtcaaagattgtaattttgtaattttatatcatcgtggaaaagccaatatggtggcagatgctttgagtagcaaagattccgagtaggtttttagtaccataatgatctcacctcagtggacttcggatatggttaaagttgatattgagtttgtggttgggaaactacataacttgacacttaactcagacttgttagaaagaatcagaaaagtgccattggaagactctaagctaggcagattatagaggaggattggtgggttgacctaaggacttctcaatctcaaataatggaatgtcactttacaaggctcgagtttgtgttctgagcagtgatgagctcaagaaagaaatacttgatgaggctcatgctacaccttattcaatacactcaggtaccaccaaaatgcatcaggacttgaaaccctactattggtggtgcaaaatgaagaaagacatagtagaatatgtggctgaatgtttaacttgtcaacagatcaaggtagaacaccagaaatcggcagggttattacaactattaacacttcctgagtggaagtgggatgatgctacaatggacttcgtagttggtttacctagaaccacgaaaatgtatgattcagtatgggttgtagtagatcctttcttaaagtcaggacacttttttgttggatattattttaccnnnnnnttagatctactcacaagtacgttgtttaacaccctaaatatgaa

SEQ ID NO: 120428 - DNA, 892 bp, Cannabis sativa
  modified_base (772)..(777): a, c, t, g, unknown or other
ggactactgactgtcacatttatccacaagttgtttggtgatattccactatgcaccattccgttaaacattttatgtaatgaccaggaggtctagcttttatttttattaattaagtacgctttttcttcaaaaaaaaatatcctcttaatatattagagatggacatgacacgtgttactatcagaagagttgttgggatgacatgtcatggaacaaatggggcacacctagcttcccgaagatcgaaatggtattctcttaagatagaaaagacaggtgagtaaaatcttgtaaaagtctaatacggtcccaaataagggccccctactgagttagtctcgaatgtatttatcctctaatgatttttaggatggcttattttacactaattatatacgcccacgacaagttggaataagttgaaaattatattcttttttggtattcattaatcaaaaatattttcatattatatttcattaaaatatactcacttttgtgagtgaattgtctaatatatctttattctccacttaaatctaaaacataatttacattaacctaaaaggcataatggagacatcatctataaagtgggtatattttaaagaatataaaaataaaagtaaaaattaaaacatataaaataaagtgatgaatttaaaatgtaatttcctcggacaagtcactcatcactctttgtgtgccgtgccggcctttgggcagaattatgtaaattgctatatttaaaaacagaaaacaaaagtgnnnnnngtaaagttcatttttatttttattttttgattttatttacgtcaagtctaggttcgtggttagattcgggttcaggtcagaggtcgggttcagcgccagggccgtgagaggattt

SEQ ID NO: 120429 - DNA, 1310 bp, Cannabis sativa
taatcatatagattgtaatataagctttaatgataatcatatgtttcattttactgtttttatggttgtccttcttcttcttatcgatctgttacttggaacttattggataaaatcttttataactcccctaatctcccttggcttatcatgggagactttaatatttttttggattttgatgataaatttggtagtaattattataatcttactgatatggaacaattttctcaatttctccataaattttgtctttctcctctcaattttgaggggatatacacttggcataatagttctgtgtgtgagcgtcttgattgagctattggttctgagccctgaaggactttatatcctaatgctatgttgtatcatctgtctttttatggttcgaatcatcgagctcttaaggttgttcttcaccctaagaatgactctaataggcttcttgtttttaaaaagcgttttcattttgaaaatatttggcttgaaaatcctagtttttatactactattcaggattcttggcggaattcttctcatccttctgttaatgagggtgctcttggtctctttctttttcgtcaaaactcctgtgtctctgctttgaaatcctggaataaatctgttaagccagttttccagtctcaaatccaggatattcaaaaagagattgttaggattcaatctttggcctctgattgtagagagtctaatattccacttaagtaccttcaatctcagcttgatgctcttctttacaaagaagaagtttattggaggcaacgggctcaagttagttggcttaaggcaggggataaaaataccaaattttttcataggtttgcttccccataggaaaaagaataataccatcaggtatttaaaagatgatgctggtaataccaccagtgatcccgaggctatgtttgacataatctcttcttttttctcaactcttttttgttctgaaggttgtgatgctgaagctactaatcaaattttaggctgcttagggcccccctagaggagtctgaaattgattttttggctcagcctttcacatctcaggaagtgaagaaggctatttttagcctttctggtgataaagctcctggccttgacagccttaatgcttttttctaccagaaaaattgggatacatttagttaagattttattcatgctgttttagagtgtttaaataaccaggttgatttttctaatattaataataccctgattgttttaatccctaaaaaacaacatgctaatactatgaagaatttgttaggttttatgcccta

SEQ ID NO: 120430 - DNA, 1300 bp, Cannabis sativa
aaatattaaaccattagattttgataatttgaatttctatatttaatttagttaattaaaaaatatcaaaaaatatttctatttatactatattaaaaattaggcatggctaatttaatctttttagtattataataaaaaataaatattattaatataataaataataatttgaaagttattttaacaaatagtgatattgaaattatatatataattacatattagtattattgattaaatttattaaaaataacttcataaaataataaaataagaaaaaattatgtctattcacaataattatttattattatttggaggattattgaaaagttctgttctataatttatttatttatgggtaaatatcatttttgattatgtgttttgtaaaagttactgattggaccatctgttttgttaaatgataacatgaaccctatattttctaaaatggtaaaaataggatcctgagtttacttttcgataactttttactttaatataatcaacttgaagacaattcctaacacgaacagatacagaaaaatgtaaacagttttgttataacacttttagaattattcttaaattttattttgacaaaaaatcagttcagagtcctatttgtaccattttaaaaaatacagggtctattttgtcatttaacaaaacagagggtctaattggtaacttttgtaaaacacaaggtccaaaatggtatttaccctttatttattatgaaatttgaaattatactaatgtatatatagagaattttaaattcttttgttaaaaaaaattattattataaaaataagtaaattaatagggtggtgtagaaaaaaaattagagtgtttctcataaatataatgtataatttttatatccgatcatttaattctatctcatttgttgtctcaccatatctcatctgtagttatcattgtatttcattcgttgttatcatcgtatttcactgtattagttaagaatatgttttgtcccaagacataagaatatgttttgtcccatgacatagtatcaataactgggacattcaaattggctttatatagttagctattatagatagatattgtattttttaattataaattaaaaaatcggaggaagaaaatagaagatttcaaagtaatatataaatcgaattaaaaaaaatacagaaggtgagataattgagagaatatatatacttatttgggtgtattcttaatgggtattacccatgaatgggtaaaatttgaaaattttgagtttttatgcttaattttt

SEQ ID NO: 120431 - DNA, 1338 bp, Cannabis sativa
  modified_base (143)..(144): a, c, t, g, unknown or other
atgaaaaaaattagactaaaaaaattttttagatgctgaaacaagtaaagggtgcatcaatacatccattttaaggagcgcagtgtagaatcaccctaaactattaaatgctttacaaataagattttttatttatttatttnnttatttatttatttttaattttcccaccttaaaacaatcatatatatcaatctataaaataatgttttaagaagatccctcagtccacacacaaataaaagttacaatactataattaagttaatttttgatcgatctaaaataatctaaaaaaaaagccaaacaacaagtgtgtacacttggagctaggaaatgaattgggtctaaattaatgataaaattgtaaagaagagtactaaattacaaatatattttgttatgtagttgcttgacctctaatgtcgcagccattttgccccaattcttagggtgctaacactcaccttgggataaatctaattcagaaaaaaggtcggtttggaaccctgtaacatatcttaccctaatacaaaaacaataacgatagaaacatcgaaaatgatatataggaaaataaacgagcaattaataagaaccaatgaatgatggcatgaagtagtactattaatactattaatatataatgggtctctttggaactttggatttggattgtattgaactagacaagatttagattgtactaaaagtattgtaattttgtgtttagtttaatctatatatatttatatataggagatatttatatataggagaagtatgaggttggtattctaaaaatagttttatttatttttcccttaattcttttttttttattttattttttattagtttgagaaatattaattaatataaaatatatttatttactccttaatttactttttatttttttttttcaaaaatgatatttggtttattaacttttttaattctcatcacttactctttttttactcactcatttatttttattgttttaaataaatgataactctaacaaagttttggctttttttgaaattattttctaattatattttattatttttttaaaaaaaaatcttctactatggtataaacatttatttactaattattttattatttttaaaatatataaatatatataaaaagaaaattaccccatatatatactatttttttctaattttttttttcaaaatttacagtttgggtttcttcggtgatttctttggtgatttctatgtgggttgctatacgatctttggttacaatttaggttgctctgttagttgcaataggggtttttatgtaaaatttcgtaaa

SEQ ID NO: 120432 - DNA, 4368 bp, Cannabis sativa
cttccagctttgtggttgagttatctttatctaccttctaaattaaagcaatgttttgcttactgctctctatttccaaaagattttgaatttagtaaaaaagatctggtctttttgtggatggcagaaggtttcttacattctgaaaatggaaagagggttgaagaagttggagaagagtatttccaagatctaatctcgaagtcattttttcaaccatcatcaacggaaggaacttttgttatgcatgatcttatacatgatttagcaatgtttatctcgggagacttttgtctaatgatgaatgacagtaataaatgttctcccaaggtttgccatttacgttgtgaagaagcgggtatgcttaagaactttgaggaaatatctaaagtgaagtgcttgttgcgcaccttattattgtcaggaggatcagaaattggtgaagaattgttgtctaagttgcataaatcattcccacgcttaagagtactatccatagattccatacacgctgagcagatccaaacttatcctgattcaataggaaatttgaagtatttaagatatttaaagttaagttgtcgcattaaagagataccgaatacaatatgtcagttgtataatttggagacactattgttggagggatgtgcaaatcttactagactaccaaatgatataggaaatttaatcaagttgctacatcttagtgtttctcgttcattaaaagggatgccactgcaattggggaagctacaaaatctgcaaacactaaatgcatttgttgtgggaagaaaaagagattgtggtggtattgaattgttgaaagagtttcaagatttacacgggagtctttctattacaggactagaaaatgtgaatgttggtaggcttgaggaagtttcagatgctgcagcaccattattaaagagtaagaagtctcttagtcacctatctttgctatgggatcataatcgtgaacttgaagttgatgagttgcacaaacaaagagagctattcggtgccctcgagcctcatccaaacttgaaggaacttagcatttggcattacaaaggcaacagtttcccaaaatggatgggagatcctcgctgcttgtgtaatttagtaagtttgaagttgatgtgttgctgttgcagcttcttgccgtcgttgggacagctgccttgtctcaaatatcttcagattagttattgtggtgtggtgagaatagattcagagttttattgttcttcttcttctgttgcaataccaacaaagcccttattctttacatctttggagaccttgacatttgaatatttgtctaatctcgaagagtggtcatttatggaaggtggagcttttcctcgtcttaagaagttgatgattgaaagctgtcgttacctccgatgcttgccgaaagaactacccgcttctctatctgatcttcatatcacttattgtccattgataagaccacgagtggagagggagacaggggaggactggccaattattgctcacatcccaaatatcattgtcaatggcgagaatatataggctgtgactgactgtgactgtggtctcttgttttaaatcaactattaattagtgtttaatagtagcatttggagtcatcagctaatttgatgcgtacatatttaatttaagcatgtgaagtttagttgatgaagcaggtagaacataactacatatatcatgattataatattagttggtgacattgaaaataaaggtttaattttgtattatttgagtgaaattacacgtgaatatgtaattagtctgttttagcagggtaatcaaattatatatgagtagtgatatggaagactgagttgaaggatggaagaagtcagttaccaccaaataaacacatgactatgatgagacttaacctctcttaatttgcttacttttagtttgactctgattgtgattgtgtataattgtaacaagaattactgaagttgttattgcagattgagtatattagtgtatacagaggttgagaagagcaagtatttagattgatgataaacagaggttgtgtaccatggtttgattaaggggtttttgagattgaaaagagcaagtgaagttactcaagtatttagattaatgttttaaagagaggattagaggtgcctaatttggttattgtaatttattcattggaacttaaaaaactatctacaacattgcaattttccaaaacatattttgtttttaaatattataataaatttaatatatatttaataccaatgctctaacataatagaggtactaagtttggtgttatgacaaacatacaagacattattccatgatctgattttttgagctgtattccaattaacctctacattttataatcaaatattataatgctacttacttagttatctcttattttcatacacgtgaagccacatgtaatggggtattattttatttctttattttaaatttatctaaaccatgcacctaggaccactaccacagtctactaaaattaatttaacatataattagcattactttacagtaattaaggaagtgttattcatgttttgttttacactattatccatagaacaaaacaaactcataataaactaaaaccatacatactacactaactcagctctgtttactacactcactcatattacttctctctcctttaatccttttcgagtttttgaacatctgatggctgctgaattggttggaggagcgcttctctctgctttgcttaatccattggtgaacaagttaactacagagatgaaggatttcttcaaaggaaaagatgccattctaaagctgcttaaggagttcaaaacattgctgtcctcggctgatctgctgctcactgatgctgaggagaagctcatcaaagacccaagagtcaggaagtggcttgatgatcttaaggacaccatttatgatgcagacgacttggtttacaagatcgacactgaagcatggcgaaaccaactggaaggttgtagtcctcatcaatctcatagcggctgcacttgtactagtaaggtactaataagtcaattatagtctaaattttaaatttcaacttcagtatctaaataaattaaaaaatataaagtatgaattaaaaacggtacatttaatcatattttctaataaaaatggtaaatctgtttattcaagttattcaatccacctattgtattaattgggtaatttggtttggtttcagcagtttatttgaattagagtgtttgtaaaagaattgtacacccccaaatagttatacaattccttactctttcactatcaattaatctatagaataatacttgtcaggcactcatgagactcttctcatcaactcctttaacttcttttgataagaccattaaacccgagatagaagagacacttggaaaattgaagcttcttctagacaataagcatctcggtttggaacgtgtgaagaatcataaacttccagaaagggtgtgtgctcctttggtggaagaatccgatgtttatggaagggatgttgacatggaagctattgttaagctgcttcgctcagatgatggcaccagtggtgacaaattgttagtgatccccatagtggggatgggcggtattggaaagactactcttgctcaactagtgtacaatgatgagagagttatgaatactgtgtttgataccaaagtgtgggttactgtgggagataatgacaaagtgaatagttctaaagtgatgaaaacaatcattcagacggtcacaactgccaaatgtgaaattgaagaggagttccaagtcttaaatgaagtcaagaaggttttgactgggaagaagtttctcattgttctcgatgatgtttgggatgaagatagcaacagatgggaggtcataaaaagtacttttcaatctgggttgcccggaagcaagatcatagtgacaacacgtagcaatagggttgcatcaattatgggaactaagccatcatcaacttattgcctaagcactatatcttttgacaaaggttgggagttatttgttagatgtgcagcaattgatgtcaactcacatgagtacttagatctgcaagtaattggtcgaaaaattgttgaaaagtgtaatggtcttcctctagctataaaatcacttgggggtcttttacgtgggaagcataataaggaggattgggatgacatattaagcaatgatatatggggtttgtatgagagtgagagtgttggtattcttccagctttatggctgagctatttttatttaccttcgcatttgaagtcttgtttctcttattgtgctatattt

SEQ ID NO: 120433 - DNA, 1870 bp, Cannabis sativa
  modified_base (417)..(424): a, c, t, g, unknown or other
agagagagagagagagaaaaggctttttcttgaattttctaactttatgttaaatgagataaaactaatttttatctatctaaagcaaaggatataatctcaatatttaatcaaatataagcccactaaagacaagttaatcttagggccaaaaagcttttaaaccacttagggttattttggtcattttcaaatctcgactattcctgacattcccaatgtctaactatattgcttcgctatactaaaaatactaagatcttattctaatagccaaacactgcgttccaatgttgtcagacacaaaacatgcaaaattatgaaattctatatatgacatataaaatacattctgaattcaaataaatctccgtaaattaataattcttaagtaatatgcaagtttcataattaaannnnnnnnatctgctaatttctaaattaaaattaagcagtctttacaattgataccatttgtaacgtccccgctttaagcctccactgggcccttacacccacggaatgatggctcttatacacgagtatgtcactctcgctgcttcatggattgatggacagtctgaaaggacaattcagatactagaagatatttaacgagcctgtgttatggatttcaagggctcctagaataagtatctaccactgatagagttctcgtataataacaattatcagagtacaatatagggatgactccctatgagttgttgtatggaaaaaagtataaatctcccattcactgagatgattcaagagaaaggtaatacttaggttcggaatcagtgcaacagactcatgaggccataaagaagattaaggccagaacgcttgcctctcagagtaggcaaaagagttatgcagatccgaaacgcagaaatgtagagcttcaggtaggagatcatgtgttcctactggtgtctctaatgaaggggatcaaacatttcgggaaaagaggcaattatgccctaggtttacaagactttttgagattcttgagaaggttggacaagtggcatatcgtttagcttttcctccagctcttttagcagttcacaaagtatttcacgtttccatgctacaaaagtatgtttcagatcctgctcatgtgttgcgttatgaaaacctcgagctacaatcagacttatcttatgaagaacagccagttcaaatcctagacaaaaaggataaggtccttcggaacaagaccatagctttggtcaaagtactttagagaaaccacaaggtggaggaagccacttgggagttatacttcaacatgaaggctcaatatccagagttgttcaggttggattacggggacgaaatccttttaagggggagataattgtaaagactgctaaattttaatttggaaattagtagataattagggtttaattatgaaacttgcatattagttatgaattattaatttacggagatttatttaaatttagaatgcattttatgtgtcatatatggaatttcataattttggatgttttgtgcctggcaacattggaacgtggtgtttggctattggaatcacatcttagtatttttagtatagcggggcaatatagttagacattagaaatgtcgggaatagtttagatttcaaaatgaccaaaatacccctaattggcttaaaagctttttggttagcaaagggtaaaatagtctttttcgccctaagattaatttatctttattgggcttatatttgattaaatattaagattatataatttactttggttagataaacattagttttatctcatttaacctaaagtttgaaaattcaagaaaaagccttttctctctcttcactccctctctctctctc

SEQ ID NO: 120434 - DNA, 845 bp, Cannabis sativa
  modified_base (512)..(513): a, c, t, g, unknown or other
gtttattgacaggatttttagaagttatgatttttgggcttccaaacatgcaaaaattttcttaaattcatttactacatcagattatattatattatattatagtagattgtatcgtattgtattagtattatttaatacaataatatgattagtattgacttgtattaatagattgtgtaaaattataatatatttttaataaacttgatcccaatattaactccaagtcaggtccggagtccaggatcagagatttggtctaggtccgggtgggagttttgatccgagtctcgatcctcatcttggtccgggtcactagatccggatcgaagatttgggttgatcccatatctttgtaaatattataatataagctatatacagaccaattggtatgtacttaataatacaacttatattgtattaaaatttttagtcgtaataattaatataatatattactttatttaaacataatattatttataaataacataaaataactcaanncagttataattaaaatagaaccggctctataatagtattataatgaattaaaacaaatatcacgaaataactcaaaccggttataactaaaatagaatcgattatataacataatgaatacaaacaagtaacacgcaataacttaaattgattacaattaaaaataaagaagaaatcagttcctaaaatattgaaatataaattagaaacaaaaatagtttgacaagaaaatacttcataatacataatacctcataaaaccggttataattttttttttaaaaaaaaaaaaagtggggatcaaatgtctcagatataataaaaatagaatc

SEQ ID NO: 120435 - DNA, 932 bp, Cannabis sativa
ttttttttctatttgtaattaattaaacttttacaacactctctatcaatttctctattttttatttatggtattttctccgaaataatttatatttatatatataaatattaacaaaaatatctgcatataaagcatttaaagaaaataaaaattctttaaaatagagaatgaatctacatcatttgttaagaggagtattttctcttttgttattcaatttttttaagaatttccactataaaaaataattacttttagtgataattttttaatcacaatataaattttttataactaaatatgactttacgattatgtactcgaatctctacctattacacataactttttaggcattgattactattatgttgtactaaacatattaattttttaattttaaaaatattattttgtacttttttttttgaaaagaacaacaagttcattaagaagtggaaagataattgggagtcacaagggattccctccccatgcacaaaactagcatcttgactagacaacctatagcactctttgctagcgcatcagcaaacccattacaaatacgactaataaagaaaaacttacaacaactaaaaagcttaactaaatcaataacctccgacgagatatttaaaaagttccagtcaggtggacattagcctgctgcaaaggcgccaaccacaactttagcatcagaaagaacatgaatatcattccaagagcattgtctagctctttgcatggccatcaaaattgcagcggtttccgcttccaaaattgaccctgcattacccttagatgaagaaagaaaccagttgcccgtgactgtattgattagcactgcccctaaactagcaacaccatctgtgtaacgcccgcattttataataataaactcggaaattaattttaataatttatat

SEQ ID NO: 120436 - DNA, 1563 bp, Cannabis sativa
agcacaaattcaaaaaagagagatgttagagagagacaccttcaaagaatgaatgtgcagagctttgagcttcgagctctgtgtagggtttcacaaaaccagtcgccgcctcccttcccttggtttctttctctcgtttatgtaattttcaataaaataaaaagaaacaacgtgcatcttataatattcgtttgaggaattttgttgctactcaaagccggaaaaaattaagaaaaatgaggatagatttaggaaattagagcagcaacctaagagaaccctccaagaataatgtatatatgactgataataatgattagggttgaggcaccttctttcttcgttctcaaaaccctctaacagaaaatggatagagtacgtatggtatggtacggaggagagtgggagggagtgggagggagtggtgactgtgtccactgtcactgtccaacctatacattcttatatataagagagagagaaagagagagtacgtatggtaggtaggtaggtaggtgtaattcagtgtagtaataatgaatatcagtttaaataaataccattaattagtacaaaactaatacatatattatacattaattaattacacttattttgtctgtatatataggatccatatatttttttttaataacctaattattaaagggtacatgttaattatatataaaaataaataataattatataattttattttatatttgatgaataaggttgagtgagtgagtcattggttatccaaaaaggcacactcttttggctctcatttcatttaaaacgctcgtttcacatcacacgtacgaggattaactgaaaagctaaactcaatttttacaactttttcatttttaaacatatataaatagtcaaatattaatgaatgagtatagtttagacataattttcattgaaaatatgtatatttatttcaaaaggtctttgactaaagtgcctttttaatgtaaatatagataataaagtttaagtttttaatttttggaaaaatctttagtacacctattctaagcagaactttttagtaaaaaaattatgattacattcacatacattatttttatagaatcacttataagtttttagaatattctgaataataaactgtattaaaataaagttcaatcaattgttttcaagatatttaagaaaaaaaaattatgcatatatatatatattaaatatttaaatattattttcggtaaattatttatattctttaaatatttacaaaaaaaaattccaaataattataatatactgaacaaaaaatatttaaaaactttcctaaaagtaacaaatagatagaagtataccgtttattaaccaataaaaaattatataacaatataaaatacacaaaattatcaagtatactaatatttgaacccactatcatatcacctaacacttaatcaccattccattttccatcaatagaatataaaaagtccttaccttccccactatattcattccttaaatatatatatatatctattctatataaagtgtgcttatata

SEQ ID NO: 120437 - DNA, 1235 bp, Cannabis sativa
gccattctaggctgaatactcgcatttgtcatctctcaaataattctctcttttaccagttaaattgtactttttggtgttgcgaaatatcagtaacaacagatcgttattataattagtgtggtttaagtgatcgacgacgattttaaataatgaaacatgatttaatattttatattttagtttctttttccaaattgtaaagataatttggaaaagtatatattgatcgatttgacactatttaagccccaaattaattaaactaaaaaacaaagactttgatctaacatgtatgccttcttcgccaatcgccaagatcagattgggctcctctactaaatgtttagtaaaaataattttttattttttttttcttgttttaaaaataaaatttgtaccttgaactatgtcgacatttatagacttttgcctcagttttttttttttgggtaagaatttccctcaaactttataaatatcaatatatttgcccatttggttacagttcgttcatttacgcaaacaatttcataacgtaaaactaattcatagctaatctacaatataatttgagttctaagcaaaaatataattacataaatgatctaaagataaaatataggattgtatttcgtaattttagagttaatttatgaatgtttaagatcattatacttgatttcagctagcttaagttatttaaacaggcctcgtactataattatccgcgtgaatcattgccacaataataaattatctcaaaatataagcaaaatgcaacctaagggagaaaatatgaaattattcccatagttcgaagggaattttttacaaaaaataataatttatagaacccttatatacaaatgtcataatttggagggtaaaattcttagttatatgttatttcttaacaatgttagttttttttattgtttttgtcataataattacaaggaatataacacatttacaaaaatatatttagtaatattagatcatcttttgtaaggtgttacaaatttaactaatattttgttagttagttgatttattttagttttaaagatataaggagaaagatttagttggtttgcgctatcaaatttctataattactattcaatgttatttaattatacttaagggaaaaaaacaaaaaaaatacaaaaaaggaaaaaaaaattcaaaaatactttgggccagcccattaaacatttatacagtccaca

SEQ ID NO: 120438 - DNA, 1637 bp, Cannabis sativa
aagttgatcttctgtcatcaactctgagcccaatcagcatcacagtaggctttgatttcaagatgttgaggttttttgagatggagtccatagtgtagagtgcctgcaacatatctgagtatccttttgacaactaaccagtgagtatggagtggtttttgcatgaattgacatactttgttcacactgtatgacaattctggtcgagtgatggtgagatactgtaatgctcccactatggatatgtacatatgattcacttccatatgctgagagtttctggccacttatcattggtgttgtaatgggttggcatcttgcatttctgctcttagttgcaaatcttttgcatactttgtttgtgatagaacaagaccattactgatatgagatacctctatcccaaggaagtatttgagttcaccaagatctttgagagagaaggtattgtggagatgggagatcagatcagacactgccttttggtcacttccagtgaccaatatatcatcaacatacacaagaataagtgttattgatgatttgttgtgaagtacaaacagtgattgatcagacttggatgatatgaatttaaatgagagtagacattgatgtagcctttcaaaccatgccctgggagcctattttaacccgtacagagctttgtgaagcttgcacaccaaattagtttgaatggttaaatcaaaaccagggggttgtgtcatgtacacttcttcttggagcgccccattgagaaaggcactatttacatctagatgtctgacatgcaagttgtgtgagatagccagagttaggacaactcttattgtgactagtttgactataggactgaatgttttagtgtagtcaaaactaggttgttggtggaaacccttggctaccaaccttgccttgtatttgttaagtgagccatcaggattttcttctattcttagaatccatttgcagcctgtaggttcttttcctggtggtaatggaaccacagtgtatgtgtggtttctgagaagagcaagtatttcttgtgacatagcttgtctccacttctcatactgcagagtagatttaaatgtctttggtatcttctcagaaagatatattttgggtttatcaattcctactttggccttggtggtcatcttgtgtgtattggtggatgtggttgaagttgaattggtagtaggagcaggtgtgaaagagggtggggttataggaggttgttcttttggtataacaggttgttgtgagggatcaggtgaaggtggattataagggctactgtcatttgtttatgtgagattaataggagtgggattaggaatgagttgagatatgggttgtgagacaggtgagatgaccagattgggactatgagatgacacaagaatattgggcctaacttctaatgtgactttgaataactatcatgttgagaagttggaattaaagcagatggcagatactcaatctgtttagcaggggaatcagattttattgtggcatagggaaacacaaactcatcaaatatgacatccctagatatgtaaattcttccagatgaatctaagcatttaaatcccttgtgattgatgctgtaacctagaaatgtgcatggttca

SEQ ID NO: 120439 - DNA, 2036 bp, Cannabis sativa
  modified_base (1975)..(1982): a, c, t, g, unknown or other
agaacattcataatgactggcgggcctgtgaaccagaacccgccccaaacaagttttttgaaataccatcaccttttgagcccaaagcttctttacccgtatccgtgtcaatcacagttgaaggattattttcaataatgacaccatcagtaaactccatttcattaggcccattagaagcaagatctttagaagttgacccaataggcccaagaggaccctccagtaaaactgttttcctttttttcgaatctgccaactggaaaggatcactataaatagcattaccattaattgcacccttcaatctctccaaatctctactattaccaccagatatctcatgaacattatgactccccaaaactccagccgagaatcccctaaatgcaggaatatgaatatttgatccctgattttgcggctgaacaggtgcgctctgtcgacccccattatcggaacgttgatgactcgcctgagaagttgaactaccaggattggacgccggaccagtacgcaaccattgggcgccgatattatggtgtcttctacgcgggggtgctttcaattcaaggttatatggtttctcgatcaaatgcataggaatatcgaagagacgatcacagaacctttcggaatggccaaggattctgcagataaagcagaaggttggtaggtcctcatacttgaaattaacggtacatgaagcaccactcctcatctctaacttcatattcctatgaagtggtaagttaacccgaattgaaacacgaattctgaagtaattccgccagaccccttggaaattattaggatccgacttaacgaatgaaccaatataattccccacatccttaataactttttcagacataaacttggatgtcaagtcatggagttggacccaaagatcaagcgtatccaatgctagtaaacgtggattctcaccatgattaaccctcacaaagattagtggcgcacgatcaaacgtccatggacttccctcaatcacacgttcaatgtctacctcatggtagaattggaaaatataatgattagggctaagttcttttacataaacacctctacctggttgccagagagaagccattttgttttgcattgcctgaaaatcgatgttacgttttgtgaggaaacgtcccaccagacaccatcgatcaccgaattcggacagttcaggatcctcatcatcaaacaccaatctacccataggagcctcttccatcctaacatcaccatattcgtcttccatatctcgaaagagcaagagaacacactgaaaaaacaaatcaaaaactcgaaaaaaaactaacagcgaaacacgaactcttcacaccatgtcataagacaagacaaagattaaacatttttaagaaatgaatacaattgtcacatgtacattttaataactaacaaatcatagtaaattaaatgtacgtagtaatgacatcttaaaaagaaattgatttaattggtggaaataggtttttttttttaagaatttatgcaatatccgacattaacgatatgaagcatttccaacaccatttaacaaaatattcattggtataatttaattttaagttttatatattttattttatattaaaatacatgtaaatattcattgcaacaaaaaaaaaaaaatacatgtaaatattgcatttgacatcgtgggcatcgtatcccaataacaatttattcatttcatatactcggatttcactaattacatacaatactataaatatatactattactattatatataattttaaagtaaaaaatgtaaggagacaccagtatgcacaatactttcagttaatatcatttttagtttaagtattgagtctcatatttaatatgtaataatttttaaagagtatcattaactaattgtaagcgatatgtttagagttattaggtgcacatcataactaaaaaattgttttnnnnnnnnaaaaacagaaaattattttttgaaaacaatttagcttgtttggccttatttttt

SEQ ID NO: 120440 - DNA, 1003 bp, Cannabis sativa
  modified_base (44)..(46): a, c, t, g, unknown or other
  modified_base (963)..(966): a, c, t, g, unknown or other
actatatgttttggatttcacagattttgtacacattaaaccannnacatgaaaactacatgtatacataaatgacttctaatcttctattgataataaatcagattacattaaaaatgggttttatgtagggcataaaatcccaacatgtttcttccttgttaagttagaaagaagggtctagagaccttccctcccatcttttaaggcattaacatctctggtcagagcctcaacatccgcttcaagctgagcagtggatgacatgtcctgaatctccttctccaatacctcaactctcttattggtagccaaaagttgttattcacctctccccgctttgcacccttatcctcgacctctttattggctttctccacctccttctagaagttggtggtggcggttataattttcaaggtcgtggactttgctcgggagtaggtgtaggtcatcttcaagttaagctgcatgaagaaaagtaaaaaactacgtgggtaaaagaatgatataaaagccaaagtgaaagtatttactcggttagccttctttagtagcccgcccataagcagctccacagacatatattttcctccagctagctaattgttcacctcgaggagtaaccggtcctcgtgaaattggagcatttccttgtccttcttagattcaggattcagcatgatagaagtaactaaagatttaggaagtctggatccattcgtgcttccccatttggtgctcttggattttgagttcttcttggctggtgggtccacttccgacaacgcctcctcaaaaacctcaattggaggaacaactaaattcttctccttaagggtgctcgagactgtgtctttgggtggaacttcatccacctttgaccgtttggctggagatattcagccagagctgtcgcccgaccccttcttcaaagcttgcaactgttggaaattattttannnngatctatttactatcatgtatgttggattaacaacct

SEQ ID NO: 120441 - DNA, 1732 bp, Cannabis sativa
  modified_base (1432)..(1442): a, c, t, g, unknown or other
aaatcccataacacttttttttttatattttttttaatgtatttttgagggccccaaaatttatttcgtcttgggctcatatattttcagggccggccctggccaaaaatatattacttttgtttggttatttacattaatatttcaccaaatttttatttttttattttaccttaaatatatatttacattaattataccatacattagtttttttttttttttttctctacattcatttaaatatattttttttaatatatatatatataaaatacaaaataataaagtatgaataaaatattaagtaaatattattaaaatattatttagagaataaaacagtaacaatttttgaaattttggctaaaataactcatctaatgtagctaggttttttttttttattatttattcacatttctcttaaacataaattttgaagaaaatgcattattgctcatctaatgtgaaagttctaatatgttacgtataaagttgtatatccttaatgtaacattcaaatatatatttattttttcttaaaaataaaaatagagaatagagtaacctctaatatatggggtttaattttttttttttttgagatagtattgagtgcattaaatagggtgtcaaaagatgtggaaagtgtttaaaagtactgatttacaaattacaataatcatcaaaatgaggatgaagtacaaataaatgacaataaataaatataaatacatatatgatttttcttttttgctaaacaacccaatttaaatatacatgatggaatttgagtgagttggggtttcaattttttttttttaattagacttcttacctgtataaagtcaaacaaaaatgagatatatagcacaaaatatagtgctaattctattaaaggttttaatacatctgtccctagcattttcatgagggtaaaaaggacttcttactttaatcattattaatgagtttttaactactaataataactccactagttgtacattttgaaagtgaaaaaatacaatctgatgcttagttacaacttagtacagattaggtgttttaatctcaattagaacaacatcatctactaataatttaatgtattttgcatcaagtgaacagacgtggaatatacacaataccttatttagaagataaataatgtacaaatattaatatatatacaataaatagattattttgaggtattattccacaatcaacaatggcattgaaaagtatacatgaacatgaacatgattaatcataattttctcatcaaggtgaacaatgttgcttttcaagttaaaaatttattgttacttattaggaggtacttaaatttcactatagaaaaagtgagaacaatttcttcatgttttgagaaagcatcattgcacaaataataataataataatnnnnnnnnnnntaataataataataataattttccgcaatcatgattgttaaaaaattaatgacgacacttacatttttgtttgctaaaaaatggcatggagaatatgatttccaaacattgtaataaatttttaaaaggacatgtgaaacatgcttacattatagtgtttattacatgaataaagaggaaattacacttagtatgatattttaaaagttcttatgataaatatggcatatttaagtttggctaatttatatggtattttttgtttttaagttttttatagtatttgatat

SEQ ID NO: 120442 - DNA, 1806 bp, Cannabis sativa
tttacatttctctatattcaactatttcataagtttctcacaaaaaaaaaaaaaacactatttcataagcttatttttattttatttttttaaataaaattaattatactaaacacaatattcatacataaactatgtgtggacaatattttcttttgaaagatataaatttttagactgtatattataaaattaattatcaagaaaaaaataagaataaattcaatacaagtgattaaaaaaatgagttaaatttggtcaaaatattttgggagtctatagtacacttccaaaatatgtgttttggatacaatccctcaatgttttacatcaaagagagccttttatttcattttttaagggtgatttatattgtagttattttgaattacttgcatttttataaaattttgaattatttatagtgtcgaaaataagatttaaatttttatttactacgcgtataaaaaaaacaatcacgcatgtaataaaatattcaaactttatttttgacactataaattattcaaaattttctaaaaatttataagtgatattaaatatatttaatatatacgattataaagaaaaaatagactaataaaatttcttaaatgacccataaataagaaaaaagttttcttagatgctgaaacaggggactgaacacttgtgtactataaactttttcaaatatttttattattaaattttttaaggtaaaaaattctatagtgcaaccataaaaaaaagtataccaatgcctctattatattttcagggacacgattttgtcacgtgatgtactttcacggaatgtattccgtgatgtacgacatccgttagatgggggagttatttgatctgagggctggagttgatctaggggtaattagagataaaaaatggtaacgtaccctgagacccatctaatgtagcacgaaatacattccgtaaaagtatatcacgggacaaaatagtgtccctatattttcaatatcaaaatagttttaatcttaatctttttatattataatgtgcaccaaaattatttaatacctcctataaattttcaaaatttttaaaataaattaccatttttaaaggtgcaccatagaagacatgctcattgctcatcaatttaagaaatatgtggatctttgtgtgaatatggtttaggatatatacataaaaataaaataaaaaagaaaggatttggaacttcatactttcactttatgaagaatgtgtaacacatactctaagctatgtcaacataaaattctttttatatgggaaatttcataatccatatctaaacaaatattcaattacttaaacaacaccccctaattatactataccattttatcttaataatttatactcttactcaaactaccatttctatttaattttttcaaaaatatcaaaaagtctttctctctctaattctcccattctctctcgtgcctaacggacccgatcgaccctcctcctccctctctctatctctgacgaccccttctactcaccctcgacccactgacgacccacttcacaattcgacaattcgatgactcaaagccctcgaccaccaccattcccccgctgtcgacccaccccctcgacgaaaggttagatttttgtttttttaaaaaaattgagttaagaatttatttggtagatttagtttaatttgatcattgtatgtattgtgatactgtgtttcttagatttctatgagttttttgaatttgtgtttgtttgagactttagatggtggtgggtatggttttttcagcc

SEQ ID NO: 120443 - DNA, 1419 bp, Cannabis sativa
  modified_base (1372)..(1389): a, c, t, g, unknown or other
aggcggttttttgataaaaaccgtaggtataaaattgcattataccatttagaggcggttggaaattaatttttattttttttttctgaaataccctatagtatatccaattaaagttaactgaaaaaataaaaaaacactgttaaaataataattctgttatatagtcacactttatatataaagagatgcaataatagttaatatatttacatacttaggaataagaatattgtaattgggcaccagtagtgtctaacacctctagacatgttgtcttgcgattaactagcaataatacttttttttaaaagttattatattaaatttatatgaaactcgatacttaattaaactattaatagcgatattaattaacacatggtgttaggtactactataatgtcttttagcatgtgggccctcaatttttaatttttttttttttatattaatacccttcattaattaatttttttgggtgctcaggaatataaagagggacaagttgaagaattgaaagaagttgttaggaaagagatattccatggaaataataaaagaaatattattaatgtttcgaaacaattaaagttaattgatgatgtggaacgtttgggattatcttatcattttgaaagtgaaatagaaaaaaagctacaacacatttatgaaattactaccaataatattgatcatcaagatcaacactactactactccaaccatgatgaagatctacatgatgtctctattcgatttagattactacgacaacatggatttaacatttcatctagtaagtcaattaatttcatataataataatattcattttatacatatatatatataaataaataaataatttatggtgtaaatatttaagttttatttttttagttgtaaataaatatttaaatttaatttttaacgtcatcaataatacttaagttatatttttaaaagtctataggtacatgattgttaaatgttaagtaaattaccacgtgacaatgtattttaaaaaaaattaatttaaatatatcaataaaacacacgtaaataatgagttgtcatttaacagattcctataaagttttagaaatataattaagtattattactactaaaaattaaacttaagtatttatttacaattgaaagttaaaattaaatatttataccataaattactctatagcatatgtttatataggacggagctactttatattgcaattttatgttaaacatttgaaagtttctaaaaaattatgtatttggctacttttaatttcttttgtttatctttgttttttgagatattctttttttatcttttgaaaaattatagggtaaataccatttnnnnnnnnnnnnnnnnnnaaagttaccaattggaccctgtgttttgtt

SEQ ID NO: 120444 - DNA, 1980 bp, Cannabis sativa
gcccagcctatccaagatactactcatggctaaccagctttctacagcagcacctatggccgaccaacttgcaataacatagaaaaaaagtgaacaaagctaaatgtgcaacttaccagggccaactcctaaagactgagggaaaagagcctctctggctcaccggtcaccaagctcctacaactctctatccatagtagggtaggccttatccatacgcttacgagccacctccatggctctctgccccatggctgagcctgctccctgactaggcctcggggtgcccctgcccgaaggccgttccctcctcactggagggtcatccatcatgggctgcctagtcggcacagatcctagaagaggaggaggaagaaatgaccccgcgacatctccacacgggtggtttgagctaccttggcccttggacgacccaaaggctcctttgaaggtccactagctagacctctcaacatggaagacatatctacaaggagaaagtaacaaagtcagaatacaagttacaaatgttcaatgcaaaataagaatataaaagatggtgcaatcaactatcaaataccatcatcctcaaaagaagaatcatttgaatcctcaacgactgccttgcccttgcctctagatgcaggcaaggggtaagtaggccctgcagagctttgtcctccaagcctaatccaaagagtggcatccccaactgtgcccatgcaagccaagcactggcagagggccctctctctcttttctagaccccaggctattcgggacagaggcacacggtcatccatgtccatgtccaccactaggacaaacctcctcagtagctggggctccatccacaccaactgatgggccctcagcccccataactctaaaagcaagaggatacaagccgtacttctgaaagttggccacactggccaacctgattatgttcctcttcaccacggggagggataggatgtgattcgccctatccctcatctacagagtaaggatggagcgcttgtatgttggcacttgctagaagaagtgatgtcgaatctcatggatatcttaggaaattaagtagtttcgggcatctccaccaacttttgacataggcgttctgttggtgtcacccaactactgatggccaacctgactgaagtagaaatacctcgtccgattttattttagagcatattttagattaaagtagtatccaatctcatacaaagtaggctgaggccagcctagctctacatatagaacaaacatcggtgataagtattttatactttttggggtgatttgtgttcaacacattccaaagtaagtagcaatatctcaaaattatgggtgcaacagcaacatcaaccccctcctgaatatggcactccgaccatgccatccaaccgatggcaagccggtgtgctctatgatccctcgtgagtatctcacactggacacctctcaatagtccactggctagtatcctgtcaaaagtctcgacaggaataacagatgtgggagagacccacttgtctccttgtgatccagcatcaagaacctgaggttctgaagactgtatcaagacatggtcactgaaggatggcctagcctattgaatggcttcccatcacaagttctgtaagtcctcctcctaacaagcgcaacctcctccacctcacactcagtgtcataactctcagtcccctggtcagcatcaggcacctctccctggtcgacctctagatctatatcatcatggggttgtgtggtctcctctataactctaactctgcccatcattgccaccctgacaacataagggtcatatggtggcgcactacaacacgatcattttgttctagccatagtatattactattagttcagaaccagttagaagggagcaaggggacaaactgaatgctatctctcaaaagcaaagttgatgggactgttggaatttattttacc

SEQ ID NO: 120445 - DNA, 4909 bp, Cannabis sativa
ggttcagttgtgtttgtacaaaaatatgtgatgtaaaattggtagtttgagcaatacaagtttccttattcatcaaaaaaaaaataatactatttagatcactatagtaatgagatttgaagtggctctcttaaggttacaatatgagaatcaaagttggcaaatctcaagtgaaagtaaagtattgggcgtgtggaggagagagagatgagttatcagactttgagcataaggcttagggtttgagacttcaaacttagggttttagggtttgactaaggctctttgtataggagagcttacatccctaaaattccttaaaaaaggtagataaagctataatttatataataaattgataaaatacaaataactaaattgccccttaaaatagggaagttgttaatattttccctctatttttgtgggctgttaaggcccaatttgtggtctggcttgttgtccacgtatgaaagctacacaccaaaatcatgtcaggccaaaggctggttgtccatgcacctggagagtgcaggctagctgaccatgtgatgtccagaagttggtcagcttatgctggccatagggcctgcaaggggtggccagccagcccccttgaggtggctactttgtcacttcgtcatcctgcccgagtacttggacctctcgttggttaaagtactgagtagatggcttggcctttttattggcgagttgtactcccacgtggcactgatgttggccacgtaggcatgccacgttaggtggcctaaaatagggataacatttcccccaagtcccagtgcaaacatctatgcggatagggacttttcaacttagttgggactggtgtagccttaactggaaaaatcttgcagcatatttagcctttgaaatatttgttattgactttctgatcaccttcttagcagtacgttaaccgcatttttatttgcatgctctttagttacacactgcatggcaagtaaaaacgaggtcccacaggagatatataagcttatgggagggaaaccactcttcacttccacatttcaatctctctctacaaaaagttactattgaaagatcctccttctctctagaagccaacgcccataatgcttcaactcttgggatttttacaccattttaaggattcaagcttcccatcttctccatcaaatgtttctagtagtgggtaagctttctaatcccattattcacttgtttagttaattttgccatggttgtatgaagcttttcttcgctttgaatattttctgattctcacgttaaattgtaatctttttggtattttgatcatcatgctagtcttaggatgtataatgtgtgatttcctgatgaaaaatatctgattttgaccttcattgtgattcttgactctttgagtcacgaagaacatgaagaacgtgtttgagtttttgaaaaacacacatttagatctaaaacacacactggtcgcccataagggtcctgttcaagacatggccgaccatgggtctttctcatggaagttggccagccatagggggtaccccaaaagtttgtcagccaatgcctaagcttagggtccctggccggcccttggctgggtcatggaaccttggtcggccctctctaagcttgggaaccttggccagcgaaggccaaggttccaagcggggggccaagtttttgtccttttttgacctcagcaagggttttgtgaaggcattgtaggcatatacaactgtaatctcatacgtggctcccttgggaactttgtataggacttgatggtgagtctattatagtcaaatgtacaacttaagacttgccatttatctaagtaggtatacttgagacgatacttcgttgatacccaagtacccttgggtacaattggccagagttctgtctgttaaactttgagaatttaggaaaaaaaacaatatcatcagtcatctactcaatacttcagctgacgggaggtccgagtacttaggagggacaaagaaatgacaaactagccatccttagggggttggtcggccacccctaaccgaccctatggctagcagacattgtagggctgaccagaccaacctacacttggcaggtgcatggccgaccatcctgtacctggcaagcctttggtgcatagccttcatccggggatagcaagctaagttgtaatttgggcttcaacaactcatgaaaataggggaaaatatcagttacttccctatttttgagggataattaacccattaaatgtttattatttaattatgtaaatcaggatttattttcttattttaaaggatattagtggttaatcttaatgtaagctctactatataagaaacactaacctaacccttattctctaagttctaagtctctaagctctcaagctctacgtctgaaactcaaactccctcttctcttctctctcacatgccttatgcactctctctcacttgagattcgctaacttgattctcacattgtaatcttaagagagccattccagattccacaacccttgtaatttgagtggtattgtctttggtattaatacaactaaaaggggagtagatcattactcgctaactaagggggtcgaacctctataaaatcttgtgtctcttttaattttttgttcttattgtgtaacacgtggaaatcaacagtaataaatacgactctgatgtcggttggccaaatctgaggtcaacaactggttctccaacacgtggctgtttaggctttctttcttctacaactagaactacatcagatttttcatattgtaaggctcaggcatacttttctccagcttttcttgagtctctagcaaggtgggggcctccaatgataacctgaagatgttcgtccgctggtagaggcattaactgattctgggtgttatctgtttgggcgaccctttgttcttggttggtcttgacatatttttgtaagtgtgtattatttttcctaatgagaaagtctatttctcacttcaagttattgcattcatttgtgtcgtgatcgtagtcttcatgaaaatgacataacttggtggtgtcctgtttgtgcatgtccttctcatgggagaggttttttctgtatggcaccataaactaggtggttgcatagattgtttctatgtcttctattaggatagtaaatgccgtgaacttagaggcattttctcgaggatgttgttcggagttgtcacctaacatgcctttctttccatttccctgcctgttgccattgtttgacctctttccacctttgtttgaactgttgtgattttgggaattctggtctagctcaatggatgtattggctgcattggtgtgttgttgagttttcttttgtctaactatatccacacgtcgtactgcttctttgagctttataaatccatctactcggtccaagaattctgccattcatcccacagtcagtctttttatgttttccactactacaaaattgagttttagtgacaccttttagtgacacacacaaaagtgtgggtcactaaaaaatcaggtataagtttcagtgacacacacaaaatgtctccgaaatttcaatgttagtgtctcacaatctgagtcactaaatatatgaggtgtcactaaagagtaatttttataatgttatattattttctttaaaaaaaataatattaaactatagtgacgtgaaaagtgcgattggataaatatttccaaacacgctaggagtgtcactatatcataacaattaaaaacaaaatcagagcgtcactatatatatcagcacaattaatatatatgaaaaataaatgaattttaagaataaaaaaataataaaagatataaaaggacctttttttaaaaggtatataagggttatttagaaaccctaatttctctatcttatttttctcttccgcctcttcttcttctctctttaatatattgcattcatctcatagctaggccggacgggcgtctccggcgttgtaatgccgaaacagccaccaccagtagacgtagcacccgccgaaacactgttcctttcttggttgttcgtgttctgccctctgcgaagcgagacagaacctctcgtctccctctactccatcgacgacttctcaacctccaaatgccaatggtctcctttcctctcccttaatatattttttttgggttaaaatctctccccctatctctgattttttcaggtgtattgtgtttgaaggtctttgtggatctagttgttcgaacttcgtctgtggtctatggtggtggggtttgttgttttcatcgtttgaaggctctggttcctggtttacggtggcaggtttcatgggtctcgatgtttgaatgtcgacgagtctgggctcgtggtctatggtggccgcgtttgtaattttttttggttcagatttttaattttttttctagatgtgttagatttgtatttaactgatctggaatttttgtggatgtataagttgaactttgttataaaaggttgtattttagattttttcagtattgaactttgttaaatctttaactgggttttaattttttttttcagatacagtttctaatccattccttaaaaagaaatataataaaaaaaattatataattttaatatatattttttaattagaattgatttaatctgtcaaaattatataaaaaaaatatatatatataaaaaaaataaataaatggagggtttattatcattatatgtaaaataaattaatattatttatcatatataaaatttgaactaaatcaaattaaatattatttttttttagaaaaatatttaatatagtggcactttgtgtgtcactatatctccaaaaatattaataaaaaagaaa

SEQ ID NO: 120446 - DNA, 1271 bp, Cannabis sativa
  modified_base (1159)..(1170): a, c, t, g, unknown or other
atatctatatatggctgtatgagctatatataagagttattatttggccttttgctttaaatatatgttgctaggtgtatgtatgggactctttcgattgattattcctagaagtcccatctatatataatttgacttaaatgctacattttgaaaaataaaataaaaaaacttgttttttctcaaggagagggagagtaggagtttgcctgttgtagatggaccaacgcgctttgtcaaaagacactataatcctcacacccagcacacagtgagaaaggctaatggatttttagtgtaatttcgttgttaggtagcgttttgtcggaaggaataaatatatgaataagaataagaataaaaataagaataaaaatagaataaaataaaatttagaatgcataaaaaatattaataaaaatatcattaaatttttttcatagtcattctacttaaatagtagaaatgatattccattagaatattatattattccaatactttaaaatacaactaattaaagaaatggaatgaaaattgtttcctttctatttcattctatttcattacttccaaccaaacgtaaccttaggtgtaatttaatattaagtcccatttattttactttattaaagattacaaaaaattgctaaccaactttgctaggcaccttaggtggcgtttggttggaagtagtgaaaatataagaatatgaatgagaatgagaataaaaataggaatataatagaataaaatttaaaatgcataagaaaattgacaaaaaaaattattaatttttttttcacattatattagaatggtctttctttccatttcaaaataggatattcattccactataatggtaaaaagggcattccattggaataacattccaatacattaaaatgcaaccaaacaaaagaatggaatggaaattatttcattttcatttcattgatccattcctttctatttcattatctccaaccaaacaccaccttagtgtcccgcgatactcaaattatatatgcggtccttaattaaaacttttccacattacactattataggtattttttttaaaaaaaataaattcatcttttccaaaatataatttagtgacaaattattagaatttaatatatatatatatatnnnnnnnnnnnngggtgcactcttaatgggtattccccatgaataggtaaaattgcaaaaaattgagtttttatgcttaatttttctatctaattagaaaaatctctcacttt

SEQ ID NO: 120447 - DNA, 824 bp, Cannabis sativa
gagacttaaaaaatatataaataattacaagttaaaaattattcttatttataattagttcaaacttaacattttatatatgtatataataaatttgagattatttagactatttttaaataaaagttctactataattataatatttaataccagtagcacaatagattgatattgagtaactttataatttatttgttagagttgtgtgggttgatttttaataaaaaaggttaatttatttttgacataataaatgatttttgtatatatttttaggcaattcagtacatattgtctcaaatggtcattcttgtacactttatttgtaaaaaaaaaaaattattacttaaatattatttttagcatagtaaaatattcataattttaaaaatttacggataactttaaataagtactactacaattcattttttaacaaaataaataatactcgtcaataaaatattaatgtaaagacacaaaaattacaattataattacaatatctaataccagtagtagggtaataccatagattgatgttaagtgactttataatttatttgttagagttgtgtggtttgatttttagtgaaaagataatttatttttaacataataaattacttttgcatagatttttggtaagggatattggcggctaaatcacccaaacattaaatttttttacacttaaccataaaaactaaaattttgacggaaaaacctactaaactcagtttctgttttgctctacacacttccatccaaaaatctcaattaagtgccacataggactatccacgtgtacacaaatgtac

SEQ ID NO: 120448 - DNA, 2850 bp, Cannabis sativa
aagttttcaaaatgtataagtttttaaaataattttttttgcacattttttgtaattatgttgtttttgttgtacaattatgaaaaaagcccttaacattattcacccccacattaccccaaaattctgtggaggcacaagcggtgctagtgaattggtttggtcattaccaggctcgtgaaatcccaaaattttgtagctctaaatgttaatttgtaattagaatgcaaattatatgattaaatgtaatatgtggtcaaatgaccaaaatgccccaaaagcataaataatgacataacatataacaagggtaatattgtcaattcaatcacacatacataacacattaattcaaattttctcatttatcatatcaatgccaaaaataaattttgaaaatgtattttgggcctcaaatctggttcagtccaaaatacataattgtaactatacccctgacttattaaaaaacacctggagatagacataataaacataatatataataatatagtctataagcacgatatatcataaaattacagttttaccttttttgggtcaaaattacgaaaatacccttaacacacaaatagagtcttaaaatgtaatttatcaatatagtttcacatattaaattatataataatataatccattaatatataattaatctagttaatcccattattaaaccttaaggtattacaagttaggatttggtctagacctataaaacttgaggggaatgataaaataacataagttagttttttttttttgaacatacataagttagttagaaatataaattcgttaacttccctttgatgttattcaaatgtattattctttttttttttcggaaagattattcaaatgtattcaattgctttatttttttagcttgtaaatcctgagtatatataaattaaaagctttgccaatcagttagagattaagcaaacccttttcacatttccactctctctcttgtttttttgtcttcttcaagaatctggtttagattcctttagcagcctacttcgatgatttgactttatatcataattcatagaaataacgttttgcttcattttcatcaaataattacatgtacatcatctttatttcttctgtaattgaagaaggtaaaaaaaaaaataatgaccctttgtagttattatgttatttattatttattaacaaataatgggagaaggtcatattatttattattaaattttattaaaaacaataataagagagatgtaaaattaaattactataactgagtgaaccagtgtatagtatatttaaaaattattatgaaacgtactggtttttttttaaacaagtatagcctttagtttctgatattaagaatattaagttttaaaataaaaaaataaatgtaatgcatttggactcttcacgtgtctatatttatgagttaacggaagtggtagtaacaggtgtaaggaattgtaacattaggtatttttgcctctaaaaataaaaataaagtatttaagtatataaaatctaaaatattaggtatttatatcacaatttacccttctcataatataattgttatatactttttaattatatgtatgtatatatatgtttactaatacaattacaataataaacccataaaaaaataactaatatctatgtatatgttgataaaaaataaaaatttacatggtataatatattacaaaaattgtatttttctatacaaaaatttgactatattgcatattaatcataatataattgttatgcttttttttttaatgaaacttttgacagtaatattattctacaatcacattattttagtatatttatatatatgttaaataaataataatatttgaaaaatggtgattcctttgttgattcctctcgtcaaagtgttcttcattaagtgttgattcttttggagaaaatattgtttcctatgatactcaaagcgagtcaatactcacttataatgatctacatataatttttatgaaagcttattatcacctatatagggtaacttgttatgtacttttttctatggtttgcctctcctcaagtttcaaatctatgaacttgcaacttacaataatcactagtttacttcaaaattttatatatagataaagtgataaaaataatcaatactacaatcattatttttaaaggactcttgactttctattttcctattcatattactaacattaatattacttgaattcactttattacgtacaatcaaatgttattatttatgactactgggacgggatcatgattgtatagtttatatagtctattagaaaaatgatgtaaaattacaaactacaaaagctaagaaatgagataaaagttaaaataagctcatagaaagcggtcacgtcaccgacttagctttctgctttatataaatatatagatagattgtgattatttagtagcggtaaatgtaatagttcaaaaacacatttattggataattgttcaaaagaaaaaaaaaataccaacttatttttacaataatttaagttataccgtaaatataaagttaactataatagtagcataagtatccaaaattttaaattcgtaagcggcataaacctaatgatttttttagcggcataagtaccaaatgtttataaaactgtaattttcttccagttttatcagtacagactctgttattatcttaaccaggacacacataagacttaaattctaaattatttggtttggacgaaaatatgtagtatcagttacttccaattttttttttaataaatttaaaacggagcctgtactgac

SEQ ID NO: 120449 - DNA, 2258 bp, Cannabis sativa
  modified_base (824)..(826): a, c, t, g, unknown or other
ctttgaagagttgtaaaccaaaaaatgtaccttcccattcacaaatcccccactcttggagatgaacgaggatattcctttcactcggtcctcattccagtaagccatgagaaggtcgagatgaggagaagtgtacaacttcctttttatatagctccaataatgtatctgaaaaaaaaaattattagcaattaaaactatagtgaaagggatgcataattaattaaaagatggtttaaaacttacctgaaggtaaatagcgcaacccaggagataatggaccttgcccttagcttttaaattattaagtcattttttatgtgcttttagattctcgtgtaaaaacttaaagatgaacgaagcccagttcaacttctttatccgcccaacatctaagagtgcatttatgtactcctttcttacctacgttccagatgtaggaaccaagaaggatcccaattctaccaacataaaatgtgcgacaaacataacatcagcttcttcagagttagatataagctcgaccaagtaagtgcacctaatgggttttttgaggttgcacaattcatttcgaactttgttgtcaatgtcaacataatcttcaaagttgatgtcctcaccaccatcttcgattttcataattgccttaaacgattcaatagtgaaaggataagttaccccatcttggactagttcaaatttgtcaagatccatatggttgtacaagtaccatatgagggaaatatgcactgacggaatttcttgattaaggagggacccgaagcctatatctgaaatgactttcttttgtgcttcgttcaaannnatcacaatttctcttaatctttctggattgcatttacattggaccctacaacgatcttcgtcgttgtcattctgtaatgttggctccttaatcttttcttttgcagtgatcttccctgcaattattgatgcttttttttgtagtaaacgttgcagtgcacgttcaagtgagttgtttatatatttttcttgcaataatgtaaaagatcaaattatttataccttttacacataggtcaagtatatctagtaatacaatacaataataataattatgtgagagcacacatttacgtatacatgttaaatttacctcattcgtaattatattttccccctttatcagatgcctttgtgcgcttagcatctgacttgtcatcatccttgacactgtgcttcccgaagacatctacaacaaacatttaaatcaataaaactaaacatcaacaaatatttcaagcccatgatgcaaagagatagtaaatactagatccactaaataaaataaatacaaaaaatgagatagtaacaaagatgtaaaatcacttgtggaaaagcctctaaagctttccaaaaggactggtttccagtttccaccagtgcccaaactcatcctaaacaagatatttaatgaacgctgatcaggatggtcacataccgtacatcattgtatattctcatgaaaagttttcgaaatcctacacatctacccactattttaacttttaataacaattatcaatcttataaaattcacttcccacaactgaaaaaaagtattaagagatcccaaagcacttacctaatctttggaactaaaagtaatgtcgttagctaagaaagccataatttttagccacttgatgatattgtagacaaagtgcttattaaaggccaagaaaatgatatttttttgccacttggtgatatttttttgccaattggtggtttagtccttctatattatttactaaattcctaccaatgtcaccaacataagtgttgatattttcaacactctctcttctcttgaaaaataccattgagattcaaagcaattgatgattatatacttcacaaaaattaggatcttcgcctaaccctacagtatttggactttggagaccaataaactataacaattgttattaggcaccttatggtgcccaacaccataccgatgcgcaccaatagcggtatgtcacctcttgtagtgctttgcaccataaggtgccccttggcatttctctttctctatagggatccaagagcgactcagacctctaatcttgtgggagcaaatcatatgcgtgacaatttgaactattcatcttgggtaagccatggatggatagttggatactgttggaattttatgtcctaaataaaactcatttcaatctaatctcatttgttatcaatgaaagattaga

SEQ ID NO: 120450 - DNA, 1705 bp, Cannabis sativa
  modified_base (228)..(234): a, c, t, g, unknown or other
  modified_base (1646)..(1653): a, c, t, g, unknown or other
atggattttgccctaagatttataggcttgggttgggctcatatgtatgggcttaataaaataaatataaaaattgaaattttaaaagatgcggtgcggtacggttttgaatcgcggtttaataattcaaaaccacaaaccgcaccacaccgcgcggtttgggaaaaattcaaaccgcaaccgcaccgcgaagaatttcaaaccgtatttttttttgcggtgcgggcnnnnnnngcggtttgatgtacacccctaaaatatatataaaaaaaagcaagtaaataataaatcttcttttattcaataataattataataataatatttgacatttctttgtacacctcaatgtctgatgacatttggcaatgaaatggtaagagttttatctattcgattaagagtgtgtatcggcctcttcaagagcttaaaggtgagttagttggaattgataactcagtattttagaaagagttgtgagatttgagagtgctcttaaagttaaggatttagttaggagggttgctttcaattatcttcctacccgtgtccaactaaacgtgaaacatattcctcttccctcattgttgtgtctaaggtgcttgcgagttaaagaatctatttatcattctcttgtgggatattcgtttgcttttgcttgttgacagatgacgagtattttagtgatagagattggtgacaaatcttttggggatggcttcatgatagattttattgttgggattctaagatgacacatagaattgttacgctttgctgggcgttgtggtctgtgcacaatgataatgtgtggaatgataagagtatgattgttaaagatgtggtattgttggctaaaggtagttttgatcaatggagttgtgtcaagttaaattttttggattgcaccgattgataatacgatcaaaattaatgtcgatgcaactatttttagcaatcagaataagtatgagtatagttgggtggcgcgaaactcttctggtcagattattatggctcggacagtaagtcgaatgtaggtggttgatcatgttcttgttaaagctattggggttaaggaggtgttgagttggttgaaagaaacaaggcgatgtgatgtggtggtggagtcggacagtgtgatcacgatccaagctatcagaagttcgttagatatgacttttatttttggatttttcatattagagtgcagacagattctttctagtttaaataatatctttttaatttttgtcaagcaatttactattcgtgttgctcagtatttagctagagcttcgtagttaaatgctagttgtacctatttaggttctatgatttcaagtagtttacctgatgttcttttaaaagatttgagttaataaaattgcatttctattattaataataataataataatccttattctcttcctctttttgctattgatcaaaattctccccacaaaaattgtatgatcttttcgtagcccaataaaggcccatcctcagccttacaagaagatgaggcccaatcacattacctccacgatagagacgtttacaatgacatcctatggtacacttttattttctttataagagttttaacacaaattctttaaaggaaacttacaaaaatactnnnnnnnnggttaacttttacaaaaatactggcacacggaaattttttcaaaaatactgt

SEQ ID NO: 120451 - DNA, 760 bp, Cannabis sativa
gtttttgaccctggtggaagttttcgcagctggttggagttgattttccaaacgcttccagaggaaagtgtgtgtagcgttgcaatggtatgttggtctttatggatggcaagaaataaaactgtttggaagaagaaaagtacatttgttatggaagtaattgcatcggcaagaacaggtcttgatcaatggaaaaaagctcaagataaaattgctctaaattccctgtgtctcgaatacaagggtgatggagctgagctatagaccaaacctgaacaaaactcaatcaagataaatgttgatgcatcgactttcgaacaagaggacaaatatggcttcggtattgttgctcgtaatcaccgtggcaaccttataattgccctcgctagctgttatggaggtaactttgctgctgaagtcattgaagtcatggcaatcaaagaggcactcagttgggtaaaaggccaaggaacgggtaataattgagatagacagcttgttatcagtgcaagctatacgcagtcagtaaaaaatgttttcaaattttggtttgattgttgcggattacaaagctctactctctacattacctaatgttcagttactctttattaaacgatcagagaatcgggtgacacattacgttgttaggaacttccgtttcaatactggttgtagcatttctgtttttcatgttacagaagacttaaaaaatcttatgtattcggaatgctaattattttaatgaagttgatatttt

SEQ ID NO: 120452 - DNA, 874 bp, Cannabis sativa
aaaagaacaaaaaagcccaagatcagcgaaaggtccgcagaggggcaagctccctcgagagagtattcgccctcaggaccgaggggaccgaaagagcgtatcagtgcatcaagaacctggggaaagtgggaggaaaagtaggaagcatcccccaactgacttaagacaaaaacttaatgataagcacggtgacttgagaaagcacctgaaaaggaagaagcaggcgataccggtgtcggaagatgccttgaatgagggaatcttagctgagttggcgatcctctgcaaagacatcgctagagtctcgcggagacagaagggagatgactcagagtccgaccgcgaagaccgagagccttgcgccaagaacatcttggaggcagaactccccaagaatttcaaaatgcccaaaatggcaatgtacacgggggattcagacccccaatgaccatctatccggattcaacagagtaatgaccgtcatgagagtcagaattgatgcaaagcgtctatggtttccactgacgctaggtgggtccgtcgaagattggttcaagaagttggagccatgatttgtagactcttggaacaagttacaagtcagttttcagcggcagtttgtggcaatgaggaagataaaccttgaaatgagtgcccttaccaatataaaataattaccaacagagaccttgaagaatttcataaagagattcaaagaggagtcttcaataaccaaaaaggttgacgatggacaacatttagccctactccaagctgggatccgtactggaactcccttatgggacgagttacaacaggaaggagaagctagcctccaagaatttcaaaagagagtccagaaatacattaacct

SEQ ID NO: 120453 - DNA, 1829 bp, Cannabis sativa
aaataacatggtgtttggtttttagaacttgttccttttaatgaagcacttttggcttaggaagcttggtgtattgatcaaaattatcctaatttatacccttttgttctttccttgaggccaagatttcttcaaaagcctcttatctttggaaaattaagtgtgttgtggggtaaggaattacttgttgaagattctcaatggcaagagggttcaagtgctaatattttcatttattataaggataagtggattgtgaggggtggtgatttatgttaaggtggattcacttaatactgcttcctaatgggtaaatggaatgttccaattaattgagaaaatttgaattttctagaaagttaaggccattctttcaattcaagttaaacaatatcttgtatggcatcatgaccaatctggtcaatatttagggtgcaatgactaatggcaaggggtttatatgaaaggcatatgggccaaagcatcctcctttttcatggccttcaaagtggtggaaggtgttgtggtctttaaatataaactcttttggtgataaataaaaatgaaaactataaatttacaacgataaaaataaaaatatacaatgataaaaataaaaaagaaatatatcaaggacatatatgagaatatatataaaaaattatgtaataaattaatttattaaaaattgagtgggataatgtgccttcgcatgacctcacctcctttcgtctcaatatattaattttaaattatattattaattattgttgtcgcaaccattaatttttttctcaaacgatataatttttttttatgaaaatacttattagcccctatgttttgcgagaatacgaaattgatccttatattttttttattttattttatttttttggattttgtgttttataaaaataatcaaattgatatattcaactcaatttaggtttgataatttttcaatataattaaatttgaagtcgtgtagattggtggagttacacggcccccaagaaagtacttagtattgaaggaagataatagcaatcaaagacatagttggaacacttataaattcatcttccttcactcaaagcaagtataaaatagcgaaaggatacaggttgctttgtccgctgccaggtcgagttaattggagtaaagaagtgtggggaagattaaatactctaaagcatagctttggattttggcttgcaatttaagatagattgaagactaaaaaaagattgtttcgattttcaacattatctctacacttgctgtcagttttgcaatatgggatgaaacaaatgatcatttattttttaagtgctccttctccaatgattgtctacaacaggtaaaacagtggctgctatgaggaacatcctctagtcacctcgctaatctggttcgacagattggaaggaaaaaaataacagtctttaggaagaaagtgttttcaacagtatttgttgtgttggtgtattagctatggagggctagaaatgaaagtatttggctctattcccatgataatccaaagaatattgtccagaaaattaagattgcatgtaagaatagaattcatagcatgttgccaaaaaaagtttcagtagaaaatttagaatggtatactgaattataaacacggtcaaatctgttttaaattcaaaagttcttcaggcctttattaaaaaaggtgttacagtagaacctctatccaagaatacacttgggaccaaataaattatattctaattgagaagttataactaaatagagttacactagaaaaaaaaaataaaaaaaccaaaaaatatcaa

SEQ ID NO: 120454 - DNA, 2454 bp, Cannabis sativa
ttctcataaaccaagaattttagttatataggcacactttatatagaatagatacagtgtatatatcttacctctggtatttacccatccagacattcaaatgctgttagaagatacacaatgcaggtcaaattatcaagcaagtaagaaagaactctttataagttaggattgttttgaacttttacacatgctactggttgaatggaatatggatgtcaacataattacaagagcagctaaaaaggctgaaacaaaagtaaaaacataaacaactccagaatgtgccttcatcccagaaggttgtttccacacaattgtaccgtaccgtgattcggaatcattatttgctatcacgtacaaacaactctgattgagtgacgtttttccaacactgcaccggaggaacaaatcaggtttcccgaatacaactcgtgaatatccgctttcgtctaaaggctgcattgaagaaatttatcatttaaatttagagagtatagatttagacattcaattgtcctaaaagtacactataatgtactctataaaactatgtggtcctaaagttcttttagagagatggtacaacaaaactagctaacgtatgtaaccccttcaatatgcataatcatcagctcatgtctttatgatactgtaaaatttaatttctgaaactattttttgtgaaattggaaaagatagagggtagcaagtgagtaggaacaaaggacattggttttacttaccgcatatcttgcatgtaagggaatctttaacttgaaatcaattccattcttgtcacttaagatatctggattaatatccatgtgaacctccacagaagaacgattggaaaggaacgaaggtgattccaagttcgtatctccaaaaacagcaatgtcattaaagactgcattaaacgagtataacctaataacttatcaagaaaataatgatatacccgtaattatcatattcattaattaaacaagatgaaagcataattaccaccgcgctgaaggagatgttgaagctcaaatggatctgcaaaaaccccattaggcagcctctcaataaaaataagtccacaactatcgaaagagatattagctatggacacagcaggtaggttgctaattctcatagatgaggagagatggcggtgggaaccttctccaatcaatttgcgctctatacttaaaagactaggtacaagatttggatcatctgattgaatgtcacacaagccaaatgggagcacttgttctataaaatctttataatgtgaatcatgaagctgttcatatctttcatggtaagatttcataatatactttgtagcacaaaaagaactactatatgagttcttggaatcaagatttgaatcacttgttcccacctgaaaattagaaaagaaaaacaagagaaaatccccatatcacatgaaaaaaatcatcaatgaagaaacaagaatgagaataaaaatcaatgttctaaatttacgataaagtaaaaaaaataatattaaggttccatcaacgagatcttacaaaattggctaatataatgaatgacaagatggttgtacagatgaggacagcggaaaaaaggtgtatagaataactgtatagtaacctgcgagcatttctcatatcaacaaatcaagttgtttagtttggccaaagagggtgatcgttataattgaggtgaaaaaattacattattttttcaaatccaatcccgactgactagtgactatttttaacaagaatatttagtgcagactctagagcctacaggtagtggtaacagacagaatggaaagcttcacatcttttggctcaatcaaagaaaggctcggttgctatcgacctaaattctagatggaagtatcaaacataaattaaagcataaaaacttttaagctattataagaagatgaagaagaaacaatagtcatatatgatcgagtcatttagaatagattaagagtaatatagatctgcaaatcaataacagaaataatctcctttgacaataattctacagttagcatattgtttcttcccattttcgccttccaaatcgtctaagacattcagaataatataatcacgacaatagtaaaaatttaacaatataaaaatcccctgccatgttacccattcactaaacaaaatcccatctacgatatcataacccctctcatctcatatatgggccatgagggtcaagcaaatgctttgaagttatcagatgcaaaaaggtgtcactaactatagcacgcacaaaaacaacaacaaaatgaaaataatacaagcaggaaacaatgtatacatattttatatagaaagaaaacatttcttataggaaaaaaaaaatgggatcactgaccttgcttgaaaccaacgatgattctatgcagcacccaagatgagggatgattatcacaga

SEQ ID NO: 120455 - DNA, 1081 bp, Cannabis sativa
gacaagtagtgatcattggggtataaagtattacaaaaaagataactttaagagattggtgcaagtgaagagccaagttgaccctgataacttccttcaggcatgaacagaagtattccacctttaaattactagtacatttgggaagattattatgaaattttctcacatgtgatttcatttcattgcttataacttttatttttatgttgttaaagctggacagaatagatgattatgaaattgcatctcacacatgtatgtatactgtgtaagggcctatccattaatatgaagaaaatcagttgagggtaatccaaatttcttccatgtctaagcctaaagcatatttggagagtcaatgggcaacagtattggcttcaaaaatatgtacattgaaacactcgtctgcacaccaacgaagagcatgtaagaatgtttgggcctctattgtggtctaatgatatatgcctttcccaggggccagtttgctaaattataatataaaaagttaatatgttgtgagttataaaacttacattattgtgttgtttatgataattacagtaatttgtgggcataaaattattgaaacaatattaagggctcgttttagtaattagatttgtatgtaatttaaagtaattatataatttgacatatttgtttaatcatttaattacactaattgaggagttcgaattatagatttctaaacacaatttactacaaaatagtgagcgaattggtaataaatttaaatatatattttttatgtcattattattagcatctattacataaaaatattattattaatattttaatagatttaggtagtgaaatgattaatggagaaattatttatttgtgtcttatttgaatggtattattataatttataagagagtagttggtacttaatatgttgtcggtcacatgtatgtgggtctcgtctcgtgtggcctttagcataaaatggataggagaacgtttcaattttggcaagtattcaaaaggagtaggagaggtggtaaattatggggtaagttgaaaaataccccttttattaatcaattaa

SEQ ID NO: 120456 - DNA, 1283 bp, Cannabis sativa
  modified_base (827)..(829): a, c, t, g, unknown or other
  modified_base (1253)..(1256): a, c, t, g, unknown or other
aagataattctagaaaattcaagagtactcaaacaaacaagaaaactctagacactttagtaattgtaagaatagtctagaaactttggtagcaacaaaaaaattctaaaaattaactatattaaatcaagtttagtatttcaacacccaacaattccactttgactgaactacttaacttgttgataaaactgtaagacataatgcttataacaacttcaatgaaaacacctcaaacctagtaaccatatctgaatacgttgaatcagttgttgtgaaggcataagcaatttggacgtccttatttccatatcgatcagttaacttccttttactaatttggccatatgtcaaatgtcatagtttagtcgtttctacatggtcttagatgcgactgtagaatttacaccaccagcaaatttcccttcaagaaatacaacccagtcttgacgcatgacaactaaagaacctcttaatactttacatttttgtccaaaagtctcaattaagtgtcacagttaattgctcacgttacataagtgtacacgtagtaaatttttagtacttaacgtaatattaattatttgaatatattaaaattattttaaaatgtaaaaaataagtttttaaaaattataactcttcaacctatttttctttttctctgaaaccatgggaaaaccaccaccacctcaacatatttcttcaacacacccatcagcctccaccaaaaccaccattgcccaccaccaacctccaccaaaaccactattgcccaccactagcccccaccgaaaccaccaccacatagagagagagagagagannnagagagagagagagaatttttttatttatttttattattttaaattacttttaaaaattttaattaaattttataaaaatgaaaatagttaaaattatgtggataaatcaaaatatttgtgattgtgtacacataaacttttcacttaggcatgtacttaacaaaatcattttatcgcgggtgtaaaaactaaaacagaagtgcagttaaagtaagttggccaccaaaaaattaatttatgtgattcaatgtgttaaattgtacaattcaaataattttgccaacaccattcatgttattcttgtaaagaaaagaaatacaaataaaaatatcttacaaatattcctaaaaaaaaaacctttcaaaggctatatatctattctatataaaatgtgtctatataactgaaattcttggtttatgnnnnatttatgggtgactttttatttttatt

SEQ ID NO: 120457 - DNA, 1234 bp, Cannabis sativa
ttctattttaccagcgcaataccaacttttgccagtacaaaaatgtgttggcaaaagagacatttcttgtagtgacactatatctctcttagttttatcttctcttaatttttcattaagagataatcaagagtgaaaataaatcaatatatctatatatctataaaaaagagaaaaatagggcggtgatgtagtattttctatgagttctattccaatatatcttttattatatttttttacattttttatttacttttttaaattttattaatttaactttttagtgagttattttgaaaaaaatctcacatattgtttaaaaatgaatgtggtgattcacttagagcctatttatagtctatagattactatttctttcactttgatttgtgcaaaattaatattgtgtaattgatatttcttacttataattattatactttcttagataaatgcaacatatattgttgaatttttcaaattttatcaaaacttcaaatttctttaattacttttaacaaacagaaatattttattaaatttcggttattttaatttttaaattagttctttttattatttataaatatatagtattaaaaatccaaaccgtaaattttaaaaaaaaatagtatatggggtaatttcctaaaaaaaaatatattgtgactaaaaaattatcactaaaaagctttttttttttgtagtggttacaaaaagtatagactaaacaaaaaccctattttactaacccctttaaaccccttataaaaggggaattttccggggtcactatagttctcgagaagatcttcatggcgtcggtgaagactttttcggggaagccttcgaagcccaaaaccgaaaatcttagtgggggcccaatggaggaggggtttccatcagaagatttcgcccttcaagctcttcttcattcttggtgttatcccttatgcaatcactttaacttttctttctcactcttttgtttcatgttattaattattatgtaggaagtttaaaaaatacatgtaatattttggaatctacatacatacatgtaactctaattaaattactatatatatattaatatattaatataataagagtaataacatgtacattcatatatattacacaaacaaaaaataagatttattaactatttaaataaggacttttttttttttataaatatggaattttttaaatgcattttgaaaaatat

SEQ ID NO: 120458 - DNA, 562 bp, Cannabis sativa
  modified_base (484)..(519): a, c, t, g, unknown or other
tctctctctctctcttttctctctacctctcattcaaaactctctctcaatcgtattcttagtcttactttacaaatgatgataatggtagtatttataggacgaggatatctaatcctaaaggcagtggttgtaaagactaagtagttaatttggttacgacttaaccgactaagacttaactagctccttacagtgagatctccaagtcagctctagcaaagagctctctagatatgaactacgcttcctgctttctagaagaatgtctcaagctgacaaagcatattctggaaggacgtctcggataagcacaaagcaaactggaacaagctattcgagacccccttctggaagggacaactatagtcctctagaactcctttttgaaggacaactagcttccctgaagactttatctggatggaaaagctagcctttcggaactcctttctgattgataaatatgttgggttttgtgccnnnnnnnnnnnnnnnnnnnnnnnnnnnnnnnnnnnnaattaataaagatcaaaaatcattatatgttgcatggttcaca

SEQ ID NO: 120459 - DNA, 1420 bp, Cannabis sativa
  modified_base (30)..(50): a, c, t, g, unknown or other
atctatattaataagtaaatttgattatannnnnnnnnnnnnnnnnnnnngcataaaacccaacaataaatattttcattaaaatacttttatcattcattttgtaaaatattatgtaactaagattggactaatctattaaaaaaaactagaccaattaacttatagcatgtgatctattatttattagattggtatggaagatttggtaatgaattaagtgggaggaaggagaagcgaagtgagagggagggtcaaggcaagtggcaagctccatctatgacacatgtttatagaggagttcaaattttttattttttattttttatttatgttaggactgtaaacactatttatttgtatattagtatgatattgtctctttttgacttaaattgttatggatttatttttgagaaggtgtccaaaaacaaattcgcgagggcttaggcccaaagtggacaatatcataccaatgtacagatagatagtgtctaacagtcctaacaagtagtatcagagccagatctcaaaattagccatttgaataatcatcgaaataccaaacaatggaggtaaagcttgctagagccgttggaagttcggatctgattcgaagggagttcgaatctagctggtgaagggatttatctaggttactcaaagggatcttgagtgttggaatcaatgaatttgatttgcaattttctaagggagatggaaatatgctcttgagtggttgctcaagatttagatctgtaatcgtctaaggggagataatgtggtcattcgtagaaaaagattgttaggtgtacaaccaaagtcctacattaactagaaatgggaagaatcttgaatatataaggatggaactatctctattagaatgaaaccttttgggaagcccaaaaacaatccgtgagggcttaagcccaaagcgaataatatcataccaatgtgtcaaattattttagtgcccaaatttatttaatctataaatatgtgttttgtttgtgggtgtggtgtgtgtgagaaaaagagtaagttgtgaaaaaataagtgataagaagctctattaaaatttaggggtgaatatatgtaattttaaatttataagtgattatttgtttttggtgggtttaataattttaccaaaaagtagaatttttttactttgtttattaactatttcactagctaaagtttatcattttttccaacagtcttatgtgatatgtgatgctgtttctaaaatgcaatcaggtggttgtatgtagtgtgagcattgttacggttaggtgtggcaaaacgtattctcgtatcgtgttcgtgttatattttatgtgattcgcttttatatttcgtgtcaaacgtgtcgattcgtttttttgactcatgtctaattattttaaccccaacc

SEQ ID NO: 120460 - DNA, 1665 bp, Cannabis sativa
  modified_base (1129)..(1133): a, c, t, g, unknown or other
tgagggtgggcggttgggatgtgagatagagagagagagagagatgatgcaaagagagagaataggtgaattgtgagggggtatttttggggttttaaaaaaaaaaaacattgtttttttagggtttagatttttggtttaataataaatttttttaattttttaagtatataaaatcaaaattcccctcttttattacctaagatgaatgtacagaaaactaataaataataattaaaaaaaataagatattggcatgtttagtgtgttgtgataggaattgtaatggaatcaaactttgtttttaaaagtaatgcaatagaattacaatgtgatgatgatatatatgtaacgaagattataccataaatgactgaataaaataagaataacaccgactttagtattctttctttatataaatataaaaattaatggaataattttatcaatttattattgtggaatccaaacttttttaatagatctaatattaattcacttattaattctgggagtactaacaattggatccaaatctataataagttataaattaactgtatcacattaaattaatggtacataaaaaatcaataaataattagaagggtaaaacagtgttttgacgaactttaattatgaactaataattggagagcgtgctacttatattgattatatcaatagactataagtaagaattctgtaaatataattctatattatcaaagagtacaattttatatttatagtggagtaataatagaattaataaaatagattattttgttgatgagattgatggtaatcttgggtttattggagttttaaaatataggtccatgatccccaagttatatacaacactatacatggaaaaattttatttaatgaataaatgtcgagtaagaattaattttcatgggaagtaaactcttaagggcaaaataatgatttatgaaattattgttttgattaattatgataattatgaattgtaaaataaattagttaaatataatattattattaaataatattaaagagagaaatagaagagagaactatattattttagagaaaatgatatttattttaatccttgtgaaataagagattaatgagnnnnnatcaattattatttattggtagaataaataataaatcttatttgtggcaaaattgagaaatcaattttggaccgtaaaatatgacctattctacacgtgtagggtgacatataaagacccatggttaatttgatttaattattttattaagttaaaatatataatttaaattaaattaagttaattatcttttaattattaattaaatatattattgaataattatttaattaaaaagataattattaaaataaaagatctactgatattttaatattcagttatttgatatttatatttaaacttgaattttgaattcaaatcaaatgagatatttatcttttattttaaataaaagattaaagactttatttataacactatatgtagggatatatagtatcataaataacaacggtaaagaagagaaataaacaaagaaattaaagagaaaatatgattgatttttttcacttctctctctctctctctctctctctctcacgccgacacactctctctctctctctct

SEQ ID NO: 120461 - DNA, 1145 bp, Cannabis sativa
tatatatatataatattatataataaaatgcacatttatggatatataaatagaatggttaattggccagcgcactctaaaaacaaacttccaaaactataatattctctttaacaatgctgagcaacttatgcctcgaaattattcctccaaaacacccttctccgctccaatcacctgccgttcaccgggttcatctgtcaccgctcactaaggcaagaccacaacaaccaccacctccaccagcagccctttccatttccacgtccgtcaacgacaaccgcgtcactaccactagtaatatcccaataataacttcacaaaacgacgccgtcgaagactccactgctgcattttgggactatcagtttctatttgtttcacaacgatcggagacagctaaaccggtaacactccgagtcgtggacggcgctgttccgactgattttcccatcggtacgtattacttgacgggaccagggatattctcagacgatcatggctcgacggtgcaccctttggatgggcatggctacctcagggccttcgttttcgactcctctcaggaggtcaagttcatggctcggtacgtgaagactgaagcccaaacagaagagcatgactcggaaactgacacgtggcggttcgcttaccgggggccgttttctgtgttgaagggaggacagaagcttgggaacacgaaggtgatgaagaacgtagccaatacaagcgttttaatgtggggaggaaggctgctgtgtttgtgggaaggtggcgacccttatgagattgaatctcgaacgttgaataccatcggaaagcttgatttgatcaatggctgtgattcggtttcggatgctgtttataataataataataataataataaggtggatgacgacgatgatgatgcctggggtttggccgcgcgcctcttgaaaccaattctatacggtaacgattatttgtcttatatatttatatttgactttaaattaatatgcttttttttaaaaagaaattaatatgtatttattaaaaaataaaaaattaatatgaattttaagaacaaataaattttatttttgaaaaacataaattaattcatccaattatatatttagagttttcacattaaattatta

SEQ ID NO: 120462 - DNA, 1123 bp, Cannabis sativa
catttatgctatatataataaaaactaaaaagttaaaaaaaataataaaattcaaaatcgggtccaacctgcccaattaacagattagacgatttgaaattttttcgagttatttcagtttataatttttttcttattggtttggacggtttacgagttttcttttacaaccctaaaaaaagtgtgcctaatccattcctaactctccatattgattttttttaaaaaatatttggttcaaaaatttcataaggaaacaaaggaaggttcaatagaaaactctacaagagcctatttcgtcataaattgggaatgaataataggcaggtgggacatatagacactattgcaacacgtgttaaacaacctctatcatttatttgtgggtcccattctctacacgtggcaaaatatcctgaatccaccagtctcctcagatgatcaaacctcttacgttggtcgttagtagtagttaataccgaatctttctttgtccacactctctccatcgccacctcgcccattcccaatgccgccaccagtagctgcgcttctttaccaccccgtcggtccggtaccgaccagaaccggtccgacatctcatcaagaccggaatcatttccttatctctcttcgagaaactggcgctgttcatttccgggcccggtttcctttacggttcggcaaccttacagtctccgccgagaagaagcagtttcccgaattacggactcggaaatcaggtgaatctcttccaactattttgttttcaaatataattagtgttaacagtaatgaagatacataaattaaatcatttgatgttaaatttagggtttgtgaaagttgcagatagtgaaattttttcagtcgaaaaagatgatggtgaaaattcagaatcagaggtgggatggttaccttcttttcctcacgtgttggttgcttccatgtccaattttctctttggttatcacattgggtgagtgttgagctctatctcaatgtttatagtttaatactgtttgtactttattgttaaagggcgttttaaagctcaatgaactactgggaataaaaattttggatttatatgtgggtttttaattttattgctttttttttt

SEQ ID NO: 120463 - DNA, 1153 bp, Cannabis sativa
tgaacattggggtgcatgtaaaaggttactcagatacctagctggctcaataggacatggactggtttttaaatccacaaacagacttgacattcaaggatatacagatgctaattgggcagggtgtttcgatgacagaaaatcaacatccgaatattgcatattctttggaggaaatctaattagttggtgctctaaaaagcaaactattgttgctagatcaagcacagaatctgaatatagagcacttgcccttgccactgctgaaataatttggattcaatctcttcttactgagatttgcattcacactccatcaccacccattatttggtgtggtaatcttggagctgtatccttagcctccaatcctgtgttccatgctcggacaaaacacattgaggtggatcttcattttgttcgagatggagttattgccaagcagctttacatcagatatgttgaaacagaaaatcaaatagttgatctgttcaccaaaccactacctgcaatgccttttcaatttcttcacaacaagttaacatcgggtttacaccaatgtcacttgaggggggcaattggaattgaaaatggctagtcatttacttgtattttccttatctgttttatatccaatgtaacagtaatcaagttagttaataagtggttatttgtctgttgtaagtcggttagcctattcttgtattcaattctatataaatgtcaagcaatgccaactgttttctcagttgagcaatattttccactttctctctttctctctctctctctctctctttctttcatccattgttatcttgctccagctcaagtacggtaaaattcagtactcttacacgcaaattattattatccccaaataaataggattatttcacaaatacataaaaacaataaaaaaattataaaaatatggttgtacgaaattttaaatatttttacgatttttataattttatttatagaaaatacaattttttatgttgcacttattaatttgttgttgattttttgttatatgtatgttatttattttttttttttttgttattttcctatgagtttagatagttttcttaatgttttcgtgttgtttctataaaaaattgtgaaatataaaaaaaaaaaaaaa

SEQ ID NO: 120464 - DNA, 1273 bp, Cannabis sativa
tttttgtagtttaatgctaaatcgaacaacatctatcgaatagagaatactttagtgaagctctctagttggcgatggactaaaagtgttgcaaaatgtttattaaaagaaaaataaaaattctaaaagaatagaaaaccttaaaaaatagtttcaatattacttttatgaaaactgattttaaaacacacatagggtttctctctagggttgatagtctgccaccaattgagatttcttttctactctccggtcatggctcgttggcccgtctgtgggtttggcagtggcatgattggggggtgtttggcagtggcatgattgggggggtgtttgattgtgcatctgaaggagttctctgatggaggatcaacaccttttgatattgaattttagggttttcgtttggatgttgagattaggcttcacggtggagagctggggtgcttctcctcttggtgatagctagggttgatctgcgtgtggtggcgccccaatttcttatgtagtggtatttgatgatctcattaatcttttttggtattttaatttccttatttcatttttcaatggctgtttatttttattttcttatgctttttttaagctattgtcttatgcttttaataatggtagtttctcacgttctcattagatcaatgggtgttttagtttttatctcgaatgagatttctctgcacagtggtcagatctgggggatccctagattgttatgaacctatttttctatggatctaattgacaataggtttgtctttggcttggcttggtttgttttgttattcttctttattctagtttagtgtctctacccaatttttattagaaaatatttggttgcttgtcattgataggtgtgatctgccacatcttcattcgggataaaaatttagtgttcttcgcattctttcgatgtttcgtacactgacgatttatgggtcatttagttgaaaattaatgttgtcaaggtcttttcctgtttattgtaaacggtttggttagtctattattgttgaatctgctcgataaacaatatttacatgtaatatagtatatctgatttatctattaatagaaattttcatttaaccttcaaaagaacatataactttttttgtgaatattagtaatgatttatttttacacatgaacttattaatttcaagtacttggagaaacttaccaatgtgtacacttgtgtatatatgacatatttttattgactttaaagttttactgtcacgtgtacaca

SEQ ID NO: 120465 - DNA, 1166 bp, Cannabis sativa
gatgtgtttgaagactcgctaaatgaaggatgggggtcttttctgcgagtgagagtaaaaattgatatcaccaagccacttctacgtggaagaatgattaccctgcagcaagcaaaagatgatttttgggtggaattcagatatgagcgtctacctgaatattgtatggaatgtgggcgcatcggacatccttttgataaatgtatgatctatcttgagaaggtagacaatggtattgaaccagatcttgagtatcgcccaactatgaagggttcaccacttccaatttcaagttacgatcgttatcgaactgatttctcaaagggaaacgcttggccattacttacccgtttggcaaaaaattccttcatttcggcaattccaagtttaaagaatcaagcccctccttctccaaatcctatgtttattggagaatcttctcgcacagatgttacttctcctgctgctactaatgaaactccccaacataaagtgaattacaacattcttcaatctgatgttcctgttgtctcagatattcctaccactgcaatttcactaagtccacacccttcacggcttgcaacttcagtcatctcagccatttcaaatcatgcacaaactcaacatagcagtcccttaacaaacaatgcacgagtcaacactgcagtcaaattagactcatctgcttcttcaaagattaaagaatcggtagtggatttatctgggatatttactccattgactgtcatggatttggcacccaatgcttatgcaacttatcctccaacaagtcgcacctggcagccaccaaagccaactcaattaaatatccccttaccaactcaatcatacattgtttccaagccaactcctactgccagtgctacacctcagagtggaaaggagaacttgtcaccaaatcggcttcccaaaagaatttctgaaggacataatcttagacaaactcttaaaagatgcaggggtaatccagcacaattgttttctcctttgtcagcagaaaatgatccacacttggatgtttccattgatggaatggattcgactggtgtttatgacagcaatgcggagactgactttcagctccgcgatcagccatgaaaatcttaagttggaattctcgtggtttggggaacccgagtgct

SEQ ID NO: 120466 - DNA, 2909 bp, Cannabis sativa
ctatttcatacacacatttaattatgctctcataaaggtgaatgcataataatgtaacatttgaagacacaaattaagtttttgtttggcataaatacatacgaggacttctattttctattgtgttgtcttttgagttcaatcccacatgccatgaatggctccaagaacaatatgagaacactaacaactcacaaaacataagcgcacatacacacaagataaaacctttttgatgaaattatatctttattatattgagtatttacaatgatgaatcaactactttacagttaagaggttagagatatttataggctaaatgcctctactaacagaatacttacatactcgagttaagactcgagttaagacttgggacttaacagacttaactgttgaacctgttaacaactaactacctaactaattgactaaagacataaggacacatgtataaaatctagacatacagatttaacgattctccaccttattaactagtgttcctagggctctctttctggttagctcataaatctgctcaccaaacttaccccatagtataagtctggcctagtgcacaccatcaaatacatgatgcttccaactatgctagtgtagggtatgtttttcgtataactgaggtcttcatctgttgttgaagtttgacttttggtgagtttaaatgtctgtgtgagattggtttcacattgttgaaaccaaatctttagaatcttggagacgtatccactctgagccagtttaattcttctcagctttatgtctctaatgatttcaatccccaaaattttctttgctggtccaaggtctttcatttcaaatttttgttcaaaaccttctttacattgtttatctcttccatattcttagttgcaataagcatgacatctacatatagaagaagatacacaactgctttagagctatttacatagacacaattgtcataggcacttctcttaaagccaaattttagaacaaagtcatcaaatctcttgtaccattgccttggactttgcttgagtccataaagtgatctcttaagtgagcacacatggtcctcctttcccttgaactcaaagcatttaggttgtttcatatagatcggttcttcaagatctcaatgaagaaaagttatttttacatccaactgttctaactttaggtcttcagttgcaactatgatgagcagtagccttattgaggtatgtttcactacaggggagagaatttcattataatcaattccttccctttgtgtgaaatctcttgccaccaatatggccttgaatctaggcttttcaacacctagaattccttcctcatatttgtaaatccatttgcagcttataaaatcttgcttcaagtaggccttatcactagaatccaggtaccattcttctttagagacaccgcttcctgactcatagcattatcccattcattttgatcttctgataaaattgcttcttcataagactttggctcctcatagtgatcaataccaacaatgttcaaggcatagtgaaccacatctacaaaactaaatctgtatggtggtcttatggttcttttttctctatctcttgccaaaagatcatcctcagtctcattatcaccttcttgcactttctcaacttcattctcatcttccattccaacttttggttctacatcagtacctgcatttccattatcctctttgtccaaatccacctcaaactgaattttctccgttggtttcttaatggatgtgatgagcttttctcctcaagcattaagatccttatacaatgtcatctcatcaaaagtcacatctctactgaccacattcttctaatcttcaatgttccacacaacttgttaacctttcacccttttcagggtaccctagaaagatacatatttttgccctaggctcaagtttatattgccttatatgagcataggcaagacaaccaaaaaccctcaagtgatcatagctagctgagactcctgcccatacctccattggagttttaaagtcaatagcaaaggaagggcatttgttaatcaaataacaagctgtaacaacagcttcacccaaaattattttggtagtcttgagtagatgagcgtgcatcttaccctttctagaattgttttgttcattctctcagcaaggccatttccatgggggtttctaggaacatacttgtgcctatcaattccaagtttcttggaataatcactaaactggtctgcacaaaactccaaaccattgtccgttctcaacttctttatcttcctttcaatttgagtttcaagcatggtttttcgttccttaacttactgaaggcaccattaatcttgttctttaaaatatagtcccacacaagcctagaaaagtcatgatctatgaaggtgagaaaacacctggctccacctcttgaaagtgttctagatgatccccataaatctgcgtgtagatagtctaaaatagatttggatttgtgtttatctctaacctaagtttcaccttggttgctttgccaagaacacactactcacaaagtcttataggattgacatgaatctgtccaagaatacctttcttgcctagtatcttcaaaccaccataactgacatgacgaagccttctatttcatactaaggtctgatcctctccatcagttgcaagaacattagcttgacttttctttgtggtcccttgtaagacatagatatcattaacaatcttgccttgtatgataattaaagaacctttcatagccttcaaagtgccattttcaatgttgacattgaaatcttcttggtctaatatggagagagaaattaattttctcttaatatcttgtacatgcctgacctatttcaactcaaca

SEQ ID NO: 120467 - DNA, 755 bp, Cannabis sativa
tgtttttgttgtatttgtgaattaatttttttttaaagtaatgaccaatatcattgataaactaataatgtccaaataattactatacatcccaaagaaaaaaaaaatagaaagtcatcaagccaaacaagttgttcatccattcaaagagtatgcatagttaatccatgtccagtccacattggttgtccaatgtacatggactaggaacactcttgaaaatttggataagaaatttgttgcatcctttaacaatggtcttagatcactgaaaaaagaatgtcccctaacaaaaagagacacaactgctaaggagtctgattcaacatgtacaacagaatttgaagaaaatatcctatccaacgttgttaaaattgtcacacattttgcttaaattactgagaagcttttatcttccactcactcctaagttaacaaacgatgtttcttttacttttttcaaatatttcaaatgaaaataattagatgattcaaaactgcatgaaatacaaagaaagctaacaactaataaaaattattaaaagctagttctaatgagaatgaaagtaccataaaaaaaggacatatctgctaaaaatttcgttctttagcaaaataaccatatcatttaagtcaccaaaattctaagacttccattttaataactcgataaatagtcaaaaattaatacgaagtccaaatcacaatacatattgggataattgcataaagcattattttttgtaaaaatttta

SEQ ID NO: 120468 - DNA, 2409 bp, Cannabis sativa
ttaggttgttaatccaacatacttcttagtaaatctagatcctggtaaaataatttccaacaccaagtccgagtatcaggttccagtcccagtctgggttctagtccctgtccaagttcaagtctcagtcctagttcgggtgtgggtccaagtcctgatctcggtctaggtttgagtcccaaattccagttcgagttctggtacgagttcaggtgtgggtctggctctaggtctgggtgtgggtgtgggtccgggtttctgtccgtgtctgggtcctggtcttggtcttgttctacttctagctttgggtctgggttctggtatgggtctcgtgtcatgggtccttggtcccatgtcctagcacaagtctgggtttgggtttaggtcttggtttgggtatcgatcccgatcttggttcgggtccgtcttcagttctacgtctagattcggtttcgggtgaaggtccaattccttttctacggcctaattccgattcttattctgattttgggtttcgggtttgagtttgggtttgggtgctggtctaaaaaaggtttcgggttcgtgcctcggtacaattctaagatctagacacaaactatgggttgggtccaagcctcgggtcgtgggtcaagatccagatcccaatcttgggtcccggtccgtgtctgtgttcgggtctgggtctaggactgacaccgtggtcgggtcttgggtccttgtccctgtccttggtctcgattctggttctaattttgagttttggtccaaaatcttggcttgggtagtaggtctaggtttgagtctccaatcgcggcctaagtcctatttctgggtttgggttgaagtccatgttttggttcgggttcgtgtctcgagtcccgatccgagttttgattcaggtcctagtctcggtccgggtttgggtatgggttctagtcaaattcaagttctcggactcaaacccagactcagactcagaccaaaatttgggttacgggtaaaggtctgggtgtgggtctgggtccgagtccgggtctgggtttgagttcaggcatgagtcctagatccaaacactcacaacaggtcaagtctaagccccaggtccagatctggatcacggtcgcaggtcccagtctaattccacttcgggtcccaggtcttagctcaggtcctaggtcagggtcctggaccagtatcgggtcttgagtctcggtcccagttcttccgcccgtgtcccgggtctaggtcccccatcgatgtccgagtcctaggtctcggtctgagtccaagacccggtcggggttcaagtccttgtgtgagtctgggtttgggttccgatctcggtctgggtccagatctggggtcgagtttaggtccaggttcaggtttaagtcctgagtttcgatctgggtttgggttctgaggcccaggtccaagtcccagtcctaggtcccattctggatccatgttcgggtttagttcttagtcccaatttcgattttgtttctgtgtttgggttcgggttttgatctaggtcttagtcggggtttgagtcctagtctaggttggactttgggttcgggtctaggtctcgttccagctctgggtacacgaccgtgtttaggcccgagttttggtccgagtttaggtccagggctaggtctgagtctggtctaggtttgggtctgggtcttggttactgtcctagtctttttcaagggtcatgatctggccattcttgttcaggttctagttttcggtcctaggtctcgatcagggtttgagtttaggtcctggtccgggttcaggtcatggtctgagtctcagatctggatccctgtcatgtgtcatggttttgttctattttaggtcccaggttctaggtctgagttttggttcaggaccgagactgggttgcggttctagattatgaccttaattctgtgtcctgcgtctgtgttcggggctaggtttgggtcccgagtcaggctctaaattgggatctgggtccatgtcccgattcgggtctaggcttgggttagagtccaagtcctggtccggttaaagttccaggtctaactttaggttcggttacggttcgaggtccaagtctaagtcctggttccggtcccgttcctgtgtcctggtctacttcaagttttggttctaattcacagggtaggtacgggggttcgcgggtctaggtttgggtctaggactggattcggatccaagtctgggtttcggtctggggttgggtcccagatctagacactgactacaggttcagtacaagcccctggtccagatctggatctcgttctagggttatcatttggttccattttttgtgtagggtcacgagctgggtcctagtttcatgttcgggtctggggtcgggtcttg

SEQ ID NO: 120469 - DNA, 1665 bp, Cannabis sativa
  modified_base (59)..(89): a, c, t, g, unknown or other
cggtctcggcattcctgctgaaccgctcttccgatcttgattagcaacgagctgcacannnnnnnnnnnnnnnnnnnnnnnnnnnnnnnttagttagggtgttacaacttttgatgccaaagcatgtgatattaacattagtggaaaagattaaatgatgcaagtatattgaaaattgatttgtggatttatttgatttgagttaagcatatatggtggattccaattattatggttatttgtgaattacattgttaatttcccttattgaatattaagattaaattttgaaacggttagactgaaattcttgttaatgttgcaattgagattttatgagtaaatgaaaagcattgtaaatggtaatggtggcttagcttgtttgtttttgtgtagtttttgtcaatttgacttggtctttactcgagggagagtaaatgttaagttttgagaaatttgttaggtttgttttaggttgttttagagtctacttttaggtttattattaatgttgttacattttattgttcagattcacgcttattttttattttatgttattttaggtttgagttgaagagagcttcactttttggtgaaaatatggtgtttctcaaatttattggtgatgaaatgatcaaattttgcaaaaaaaatctcaaaattgaacttctttacttgatgcattttcggaggatgtaaagattcaaattttcatgattcagcctcaaaagtcgcaacctttcacccaaggtcgcggctatccaaaagatgcaaaagtagcttttgaaaagaagtcaagagctgtgagtctcgaagcaaggtcgttgcacttgagaaatttgaaaaaagcttgtctctgtaagaaaagtcaaaattcgcggctctctatcaaaagtcctggtgcttgactaattttggcaagtttcctatttcgacctaaaaacgattggagggtaggttttcatgatatatttgaagttggatacaaaatttggatagagaaggatggttgtaagcagaagacaccattggaggactctaattagtattctttctcatctatcttcagctttatatgttttgaattgaatctttattattagaatgaattttatgagttaatttacttttaagattgttatgtgaaccacttgaatttcttttatggattaatgtagctatttaattttattttcttctcttatttcaatttaacgcaatttgatttaattgtacaattattgattgatcacttataaattttatttatgaattcgaatcaaaattctgaaaagtcaatttaacatatgttttgattgtaatggattcaaattgatttaggataaaagtatctagattatttgtatgatttatgagtttctctgcttaatgttttttttgtgattaaactttgtcataggaatatagggagttttcacataaattggttttgtaagtcttaaccagattataaactatttgatttaatttgttgattgaatagaattagaaaatttaggtaattgcattaagaagtagatcataataattcatgtttttcttattattatttttctaaattttaattgaggaaattacactttatactcactttttgtttcatattttaatttttacctttattttactactctttaattt

SEQ ID NO: 120470 - DNA, 1122 bp, Cannabis sativa
  modified_base (1078)..(1083): a, c, t, g, unknown or other
gcgaaaagaaagaacaactatgtaagtaaaccttagctagtccgtaggtccgttaaggaagtggaacgaagccaaagctttctgtgacatagtttttgaatgtttcaatcttgtttctatgacatggttttgagtgtttttgtcttgtatttgtgacatagtgataggggtatcaatgatgacattgtcctcactaatgctttcagtattaaaataaataaaaataaagaaatatataccagtgatgacttatggcatcattaatgtttattttcagtgacgactttgaatgtcgtcattaatattaattgactttcattattagtggtgactctttactgatgaaatgtcgccattgatggtcatcactaacaaaaagaccctcttcagtgatgaaatttgtcttgatgcttattgttgacactaaaaagtggtcaacacgagcttgctagattggcgagataaaaaatgagtttattaaaaaaaaaattagagagacacacacaatttatagtagctcactccccatgtcgcagtggtaatggagctacgtctacttcgtatttttatttctcacgaggtggtaattacagaaaaaggctaagtgcttaagctctggtttctagagagagaaactgacccttgtgggtagtttttttgaatataaaaaatgagctagaggagctttccttctataggtgaaggaggtccttgaaaatagaaaaaaaaataattcaaaatatgaaaaaaaatctaaattggctaattttgaccgtaaatgataacctaaaggtcaaaattaaattttgaggttgataatcaattttttgagcccgggtcgcggtggcgggacccattctgggcaagtcaaaatttattttgtaactcccttagaggtgaaatttgaggtcgataatttcataattacgattgaagtttgagacataacttgataaagtattgaaatagctttaaaatacaagctgaatcgcgtcaatcatataaatattgagtgagttgaggtagttttactgaagggagttcatgttggagattattttaccaggattttagatcnnnnnncaagtatgttgattaactccctaaatatgaactttctaa

SEQ ID NO: 120471 - DNA, 5664 bp, Cannabis sativa
  modified_base (26)..(38): a, c, t, g, unknown or other
  modified_base (5198)..(5209): a, c, t, g, unknown or other
ttgtacagcttacccggtatttcccnnnnnnnnnnnnnggactactgactgtcacattatccctccaaataaaaaggtctccaatatcatttttgaaacgttatttctggaaagttgttcactcgtgaatgcccatctcggaaggagtcttatggaatgatagtcgagtccataagagagttctcggatgactacatgtccactccgggtccagtcttcaagaaagctagcctcactccgagatagagttcttgttggctagttgtccctcctagaatggtagttctggatagtcgactccaacagacttcatcctatccagaagcatcatcagtgagtgtccttggtccataagttcggaagctcgtatatgttcccaggggctctaatactttagctgacatggagacttcactcaaagaggagttggttaagttagttatttctagctaacttaacatctcctttcttgcagtcagtgattttagtatcttgatcctaagcctataaataccaccttgtcttgttatttcgatagatgagattcagaacttagtttagatgagttgagagtttgagagagaaaataatgagaggttgagagagaggtgctgagaaaagagagacattgggttttgggttttgaatggagaatcttctgtagatgaagaagattattaggtaagagtgtgagagttaaaacactttgagagagctcaacagagaatctgtctcgactgtaatgtacctgttgttgctcaatcaataaaagagatttggtggtgttctaaaattggagtagagccatagatcacatcaaactatcggacttgaaccagtatatatcttggcgttgatttcttattttttacatttattttgtctagttttatctactctgtttacctctattttatccgattattgtccttgatttgttaatcgactctttgttaattatttgattgtttaagttttattgatttaattctgcacagttagttgtaattttcccacaaatcagagcatggtaatcgatcaagaacgcgaaatcaagattctttttgctgcaattcttgaagaatttttttgaatgtcattaatggcgagattcaaactggagaagtttgatggaactagggactttgtgctatggagagaaagtctgaaaggaatcatagtgcaccagaaagtctccaaggtccttggagatgagaagttattggcagaaaagaaaccagaggaaaaaatagaaatggatgagatggcgtactacatgatcatcatgtatctatgaaacaatgttcgaagaaaactcattgcagagaagacaacgaaaagagtttggaataaattggaagaattatacttaaaacccaattgttagtaagattaatttgctaaagaggttatactattttggaatgatttcttccctttctttagatgagaatattgatagatttaatgagattattgtaggattgacaaatataaatcacaagattgatgaagaaagtcaggccatcattttgctgagatcgcttctaatcgcatatcaagaagtaaaggctactatcaagtatggcagagatgtgatttcattggaggatgtacttgcagcacttaagtcgaaagattttgaattacagttggagaaggaatccaagaaagaagaagtgtatttggtaagaggaagatcacccaagaaagtaagttcgaagaataaacaccatcactatcaatcaagattgaagttcagagagaaggaaacaaggaacaacaaggcttcaaaaaatctcacaatggagataggaaagacttctagcaccatcaccacgtgaaggattctgctacaattgtggaagatagtgacgactgctccacagatggttggagaaatgttctctatcttagagtcatctatgaacagggagtggattattgactccaaatgcacttatcacatgtgtccgagttgagagtcattttttgattatagatcagttaatggaggtagagttctaataagaaatgatcattcttgcagggtcattagagccgggaaggttgccatcaaaaagtatgatggtcgactcaaggtgctgatgaacgtaaggcacatctcggaccttatatgaaacctcatatccctgggtgcgcttaaagatgaaagatacagatacaagtccatacacagaagcttaaagatcaccaaagtttctttgttagtgatgaaaggtgaaaatattaatggtttatatgttctccaagaaaagctgtcccatctagagaagctagtatggtgaaagggctagaattggatatgaagttgtgtcatcaccaacttagacatatcagtgaataaggcctcaaagaactctacaaacaaggtataattgaaaaattaaacttcgtgccttaccattttgtgaagcttgtgttttagggaaataacataagatgaagtccactccggtaaggcacacaactaaaaagatactcgaatatgtgcatgttgatctttagggaccatacaaggtgcgtactcactccagtaagcaatattttcttttaatagttgatgatttatagtataggtgtgtttggacctatttactatcaacaaaaaatgagtgcctagaacagtttagaaattggaaaattcaggtggaaaaccaaacatcttaaaattaagaaccttaggactgataatgggttggagtttgttaactctgaatttgacaagatgtgtcaagaatttgggatcagtaggcatagaaccatagtgaagacctcagagcaaaatggtgttgctaaaaggatgaaccagaccttgtttaacaaagttacatgtttactgttcaattttgggttaaaaaaaccattttggggggaagctctagcaaccacaatatacctcatacatagaagcccatactgagtgatagacttaaaaacaccttatgaaatgtggtacaacagaacccccaacctaacacatttaagaacatttgggtgtacatcatatgtataccaatccattgataagctggaacctagatccgtgaagggaaatttcttaggttatgccttaggaacaaaggggtatagaatttacattttcaagaagggtaaaccaaaggttgtgattgctagaaatgttatttttaatgagttggaatatcctcacttgacctccaagaaaggtagtgtgtctctgtgtgacgccagaaaaataggaaacaaagacactacaagtatagaaatggagtacggaaccaagctcttggaataaggttcacaggctgaagatagtatggaaccggaagacaaagcacaaacgaaagttattgtggagccgaaagaataagataacgtagaccaaacaaaggtgtcagaagggttcagaaggtctggaaggttatcagttggctcgagatagaaaccaaagagagatcaatcctccagcaaggttcacgaaagcagacttaatagcatttgcactggtagtagaaggaagggactattagcttaaagcagtcagagtacatcaagaaaattatttagaagttcaacatggaagatgcaaagagtacatctgttcagttagggggtcaatttattttatcaaaggatcaattttcgaagagttcgaaggagaaggaagagatgaaagatgtaccttatgcagtggttctaggatgtttaatgtacgtgatggtgagcacgagaccagatatagctcacgctttaagcattataactaggtttatgtccaatctgggcatggtagattggaaagcccttaaatggttattgagatacttgaagggcacttgggattatggtctcacctatgagaaagcaaaatgagaattagaattgaaagggttcgtagacgtggactattctttgtttagagataccaaaaacttaaccacttcttatgttttcttgacaaaccagaactgtatatgttggaaggctcagtgacagtctgtggttgctctttccaccagagaagtagaatttatggcaactacaaaaggttttaaagaagtgtaatggcttcgcaaaatactttatgagttgaaacaaatcaaaggaggagtgactatgtattcggatagccagtcatccattcatctttgcaagaatctggtttatcatgaaaagaacaaacatataaatataagactctactagagaggagaaaaaaagaatgattggttgatttagaaaaggccaatactgaagataatcctgctaatgttgggactaatatcttgacaggaaataagctcaagcattgcttgaacttgaacaatctcaaaagttagtatacagagattcctggaacaccaattaatgatgtctgcattctttcttcatcatcatcacacttttaatttgaagtaactaggtaaaatttgtggtattgttcctccaaatggaaaagtctccaatatctcttctgaagcattatttctagaaaattgttcactcgcggatgcccgtcccgaaaagagtcttgcggaatgatagtcgagttcggaagggagttcccagatgactatcatgtccaatccgggtctagtctttaggaaagctagtctcactctgagatcgagttcttattggctattattccctcctagaatggtagttccggatagtcgactccagtaagctgcatcctatccagaaccattattagcgagtatccttggtccgtaagtctggaagcccgtatatgttcctaggggctctgatattttaactgacatggagacttcactcaaagaggagttggttaagttagttatttctaactaacttaacaatctcgtttcttgtagtcaccgactttaggatcttgatcctaagcctttaaataccaccttgtcttattattttaagagatgagattcataacgtagtttagatgaaattgagagtttgagagagaaaatattgagaggtagagagagaggtgctgagaaaagagagagattggatttgggttttgtatgaagaatcttctgtagatgaagaagattcttgattcttggataagagtgtgagcgttgaaacactttgagataattcaatagagaatctgtctcgactgtattgtagctgttcttgctcaataaataaaggagatttggtggtattccagaactggagtagannnnnnnnnnnnatcgatctatcagacttgaaccaatatatattttggtgtagatcatttcttattttttgtatttattgtttttggttttatctactctgtttgtctttattttaattcgattattgtccttattaattttttaattgtgccttcgctaattgtttgattattttagtttcattgatttgattctgcactgttagtcataattttctcacatcattaaaatatgatattctatttttattttgtcctaactagttcttttgtaaaggttatagatgacaattggaaacgaagcgattttttcatttattttttatttttagtagtatttttgttattttcgtcatcccaattgatgatccaattgactaagggccagtttggcacaactgtgctgtgggaaaaagcagttgtagctgtgctgtgagaaaaagcagctgcagcagaactgtagaaaa

SEQ ID NO: 120472 - DNA, 983 bp, Cannabis sativa
tctaatatactctcactctctactaaagtctagcatataatttacataacctaagaggtctaattgagacatcatccataaaagtgagaatatctaaaaaaaaatatgaaaaatggaggtaaaaattaaaacaagtaaagtaaagtgggtatacaatgtaatttcctccagtaattgtacatgggtcattgtgtctgaaatgtcgtgggctaaatgtgtaggtacctcaaggaatatttctaatttattgagggacaaattaaaaatacgtaatattaacctagctatgaggttaaatattagtagcggttcccaagaaataagagacaatctaatctcttcttccccatcaagtaagaaaattagaaaaccctaataagtcttacaaccttagaagatcatcactcaaaatcactacaaagatgatctctataaagtggattaaggtcatcactatttatgaattaagatacactttcgctattcatgttattcttgtttttgaatcatcaagaattttctttagatataaaaaactctttgtttatacacttgtattaacatgtgtgtttataggtatgaatattagtgttgaagaatactaacaagtggtactaaaaccatcttttattgattttttaagaatttaagatttatgttcaaaaaataaattaagaaatttaaaaattagggtgacgatgttttataattggcaactttagttctttcctctcttctccttgatgtattgataaaattaattgaccgctaacatataaatttatccatttgttatggccattaaggattgaatatatggtttggaatgagtacttatagtaatagtataaatatgtcctttgtcttctaatggcattatgatacataaatattttttcttttaaatagtattttggatattgtgttgtgttagctttataaaaattatagatttgacattttgttttgttaaataataaaat

SEQ ID NO: 120473 - DNA, 1632 bp, Cannabis sativa
actcatattaatagaaaacatgttgtctcacaaacctctcactacgacgatgtaccgaggttttatttttaagaaattttgcaacaacgattggtcgtgcaattgatggtactgaagttgatgatttagaaatttgctcattttatatttcctagataacaactttactacgtggtttgtgatctctcatataatcatgttttagaaagataacatttgtacatacaaatatctttcgatcctcatgactatagaagtatgcacctcgagtctcttctaaatatcccacaaatatacacactttcaaccttggcacaagttttcttgtcataggtctaagaacatgagcaggacaaccccaaatacagaaatatttcaaactaggtttttcccattccataattctattgaagtcttgcttattattcaattcaaggatactacatttagaatgtaagtagtcccttgaagtgcgtacctccaaaagttaagtggtagtgatgagtaactcaacatagatctgaccatgtccaacataattctgaccattttcttctctctaaaacaccattatgctgaggtgttccaggtgctgtaagttgggataggatgccatgctccacaaggaagtctttgaattcataatccaaatactctccaccttgattagatcaaagtatttttaaagatttatctaattattttcaagctagtgttttgaagtcactaaacgtactagaagtttcagacatcttgaccattaggtaagtatgaccatgtcgagaataattgtcaatgaaagtgacaaagtatttgaaacctccccgagcttgtatattaataggtccgcacacattagtgtgtactagctcgagctgttccttgcctctgttgcctttcgctataaaaggtcttttttcgatcttgcctttaggaaaagattcacaaactgggagagttctaatctctagttctctcaaaggtccatcctttgttaattgatttatcctatctaggccaatgtggtcgaaacgcagatgccatagatatgtattatcatctttaaaaactttttgcctcttattatgttgaggtgtagtaactctaaacaattcattatttaaattaatttcttacatggtctgaacacatgaagtttgttattctattttgcacaataaataggcgtaccatatatactttgaaataataaacccattactcattaaagcaatgtcgtaatgttgtttatgcaaaagagataaagaaataatatccatggtacaatcaggaataaaataaacattgttgaataaaaaactttattattaaagttcaatcgaactttgccaacacccttggtcgaacttgtgctctattacccacgcgcatgatcacctcttcattagccaactctcttaaagaatcaagtatctgcatagaaaagtaaatatggttagtggctccagaatcaacaatccatatagatttatcatcttctactaaattatcttcaagaactagtaaatgagatttttttctttttcagctccaagagataattgttacagtttccttctagtgtcacatcacgccacaatagaaacacttgcctttagccttcttgtcctt

SEQ ID NO: 120474 - DNA, 1149 bp, Cannabis sativa
ttttctgacccttcattccttcttcctccttctggctcggattgaaggccaaatcccttgcggcagaaatggctcgtaatacagcagacatttttgttcaactaaattaacgcacaagatttataaaactttggagatgaaaaaaaaacgatgattaatgaaatttcggtgaaattaattaggggtgactcgtgacctgagagagagagaaagagagaaattaaagatttgagagtactataattgtactagttgagaagaattatggttgaacttgaagtttttggaagataggagaagaggacgaagaaggtgtaatgaaggcagtagttgagacttgttacatatatatacacatataaaaggcgaagtgaaggacataggtgttgggataatttttaattacggtaacaactgcaaatgttttatttgatttgatttataggataatttataaagaaatattaaaggacactacttaagactccttcgatgtgtaatattggtataatttaatattaggtctctcttattttattttaataaatattataaaaaatcgttaacaaattataaaaacaacactttattttagtgctaaacattatgagtcccttttatgggtaacaaataagagagtttatttgatttaatttataaaatataagaattagttatatttcaattatttttttttaaaagctattttatttaattataaatattccaattaaagtgagatttaatatacaaatatttcaatctattttattctacatatctaggttcatgtatgatttagtttttattttattttcacgatgagcattcaagtttggtgatagtaaaattggtttctttcctactttgctaattggtccatttagttttagtttattacaaattacacccattacatattgtccggcctgtattagtgagaccttgttatatgagacattatgtagtaactagagttagattagtacaccatattatatggtattgtattgtattatattaaattgaatattatacaatattttttataaaaaaattatgtatagtgttaacttttatgagtacctaaatatataatattttttttttttgactaaagaagagatttcattaatcaaaactgaacca

SEQ ID NO: 120475 - DNA, 832 bp, Cannabis sativa
  modified_base (782)..(794): a, c, t, g, unknown or other
agtcatgagtcatgatgatcacaaaagaatgggaatgcatattggccttaaattaaaccaatggtgtactttacttttaaaaaccctttgctttcaaactaagttagtacttaacctaacatcatatcatcataacatgcataaatatctttaattaattattcatttaaaaagttaaatttgattgttcaaacttcaaaggggcattcctagactccatctccatgcattgtgcattcatatcttattatatgttaatataagagaatgttctcattctttattatcgaaagtgattaaacagaaattaggtaacttgtgtcattttataattataaaaaaatattattttaaaatttactattataaagagaatgttttcattttttactatctagaatgatcataaaaaaaattaataaatttatattattttagaatttaattaaaacaaaaataagtaaacttgtattattttagaatttactatcgagagtgactaaaaaacttaaaaacttgtataagtaccaagatatcaaaaaataagtttctctgatcataataataataaaaaaatcccgataaagaaattaaaactagtttgttcttccctctaaaaatgaaaagaataactaatttgttgttttgtagtgattaactttagggtttcattttttatttttacattccaagtttttttttatatatatatatatttttacagaaattcacataacttaaatcgcaacctaaatctatataaaatagggtaaataccattnnnnnnnnnnnnntttacaaaagttaccaattggaccttgtgttttgttaa

SEQ ID NO: 120476 - DNA, 2261 bp, Cannabis sativa
actaaattattttaggtaaaaaaactaatcttataaggtgaacaaaaaaaatatttctatgctaatttttaatctaaaacataattaaaataaaataaatacacaaatgtaaaactcaacatattacaacacataatttcatgagttataagaaatatttcttacaaatgtactacgaaacataaagtaacgtactcagtacgtgaaattttgtacacaagttttacttaacattatgcagaaacaataaacgtacacggtacgtgatataatgtactcaactaccatcgcacaaacatatagaagatatgaaggaataaaaagacgaaaataaccttactacaacaacatggacccactatctgcagtacgtttgtactattaactaccccaaacagtaacttcgttgtaccttttcgtaccttaactaccacaaacagtaaacacattgtaccttttttattttttaactaaaaaatcaaattgacaaccggtaaataaacctacaacaaccggttgtcaaataaattaaaaaattaaaatacattttaagataccttaagacccacctaccgtacaacggattgcaattcgtgtttttcaactctgggcacaaaattattggatcctaactatagtattattgaaaagataataagtaaaattcaagattattattattaataataataaagagtataatataaattattatttaataattataaagataattattattggattttttttcattttttttaattttaaaatagtttttttttttttacaaaaattcacaaagcagctgaagtaatctaaatcgcaatctaaattcacatagcctacatactaatcaccaaaacaatttaaaccgtaaaaataaaaaaaatattaaaaaatattatataaaatgatttccattattatttatatacagaatatttttaatatcacctcatttactttttatatttttggtgattaagcacaccgtatagtggccgtattttggtacatatgggaattgttgtacatctcatctcgaacgaggcgtaaagtttgattctgtcctctccacctttaactttttcttagttaactaataataataaagaagattttaataaatatttatacatccctaaactaaataaccataagtaacagaaaaaaatattttttgttatttaattggggcattgaggtttgtcttatctttctcctattattcatccaatattattctctctttgagctaggattttgtcttttagggctatatatagattttgtttgtttgttatagtttggtagaatatacatgaagagaatttatcatatcatatcatatcattccaatgtatatcctcaccaaaccaatagtctctcttaaaatcatgttttatatatgtaatgttactctagtggggaagagaaaaaaagaaaaaagaaaaaagatttaattttgggacaaaaattctcttcccactatgggtaccatctaccatgggacccctaatatatacatactattacatatatgatataacacatttccactcaaaaaacaaaaaaaaaaaaagtcatataatatatgtaggtaggtatatatagccaaagtgttgttttcaaaacataccttatttttttttctttgcttttctttttgagtggggatcatgtattgttggataaattcccatactatctatcgcatataaaagttacaaggaaaataaaacaaagatcttttacaagcctcaacagaccattataactcataaagttgtcggttctgtttttcataagcttagatctcttatctctttacaatataaagaagcaaacaaatatcttaagactctaacaaactttcagctttacaaggaaatatctacaacagttttataactgttttcagcttagaaacaaacacaacaacagccagcaacaacaatataaatagatgtacaacctgcccactttgacaagtgatattcggctcaacctagagaaaggcagcagcttgtttttcatgaagaaaaaccacctcagtaaagagagaaaaacagagagagagttagatagtttcttttgtaagaaaccagaaaaataaaggaagaaaagagagaaaagagcaagagattaccagctgactttgtagcttggaatctccaaaatccttgtaacccgaaaccgatttggatagtgaagaatcgagcaactttgagggtcgcttgacggagacgtacctgttg

SEQ ID NO: 120477 - DNA, 774 bp, Cannabis sativa
tgtactctatatatgtaatgtgtaatcttaccaattatagacattgtaaacaaaagggaaaccttccctcaagcacatagccctataaatgtgatctattctcactaagagggggtcgaaagaatgatctaagggagcatactcagatatgtcattgtaagagctcaaagagaaaaatcatagtactctttgttcttaagtcaacacaaatcaaggggagtaggctattaccgaactgctcggggccgaacttcttaaaaaactctgtgttcattatttatcttttcatactatacctaaattatatcacttatcgcttacaattaagacccattatcgttggcgaaaagcgaggtcaatattttggtgctttcattgagagcaaggatcaaaaactcgctctttacagcaaatttaatcataaatatgatggtggtacaaactcgcagaggcgtggtcgatgagatagatccaccgtagtggattccacactgcaaaatccaagaaatgcaaggttcccaccagtcacaaatcctgaacaaccaatcacgcaaccaccaaccgtgggtcatggtgtgacgtctcctttgaatggaatcgtacccggtgtgcaagagactggaaataccagttcagcagctaatctgggtattcccattactagagttctgccagcaacaaatgtccgaacaaccgttggagacgacaccgagatccagaacctccgtgatgctcttggactcatgcaacgccatactaatactctgcatcatg

SEQ ID NO: 120478 - DNA, 906 bp, Cannabis sativa
atattttagattatatcactcaatataattacaatatatatatataaagattacaaaaattagacaacaccacgcgaagcgcggcttagttccctagtttataaatagaataagggataattccagtcttcaaaaactcatgcagattcattttcaatttcaaaaattaacagtaataatccttaaggtcactatttccattaatctgttagtctgtagttaaatgatgtatttgttcatttaaaaaaatatcacgtgttgacaaattatttgtccaaatcataattttaatttaaaataatttttttttataaaaatgaataaattattttaaaaattaagttttatctttgttttttctttttctttttcttttttcctttttcattctcagcatcgaccatttctcttctcttttccctttgttttcttcattctacgcctgaacctttatagccaccatagccaaaagcttcgaccacccttcgatcgagctccacttctctcaaacctgttcgagttaaactaccccaagatcacaacgtcgttcccatgctttccttcacacaccgtccttctcgctgcacaaatttgaaacattttgagctaaatagatttttatagagaagtttaaaaatgccccattctcaaagcttcaccccattttattttctctctcttctcctacagtttccctacaacaagaacaaaaaatatcctcacccacaccatgctcagatttgcaattcggaccacgtcgatgtcattcgagagcctattgtagggaggtcaaagttggcattgcttctacgatcataagctctggaatgttctcatttgccacctattttgtatgctttttctttccctgcattccctccttttcccttttctttcttttttttt

SEQ ID NO: 120479 - DNA, 2066 bp, Cannabis sativa
  modified_base (2026)..(2041): a, c, t, g, unknown or other
agttcaatcaacaaacctcaactagaaatgttagaacaaaatcaaaagcaagaaaccaaaaatagaaacttaaaaatacacaaaagaaatgaacacacaaaattttagagaggttcatacttcctccaatgtggagagcctattcctctttcaattccttccaatgaattcttcttcactaatcaatggcaaaagtttgatacaatatgatatgagtaaccttcaaacttcaaaaccaatagagacccttaggaaatcatcttgattaagatcatcatcttccttttgatttctcttctccctttctcactagaatatcttagacacacactctctcttagttacaagtttacattaatattggttaacattttacactccttacaaacctatatatatatagagagcgagagagttagataaactaacttaactaatgaactaactgaaaaaactgtcttgagtattccttattccttattaaacttgtcaaataaaagtgtgtcatgtcatcaatccaatgggagttaagtgagggctgattccaatataaattgtgtgcaatttgtctttagaagccaaaaacaacttttaaaagcacaaccaatcaagaccataatattttttgtgaatttaaacttatttaaacattttagttttattttgtaagtgatcaaaatatgttttccacttaattttttagtgagtcatgaatctcttctgttgttttgtgtactccttcaattttctaatactaaaagagaaatgttaaatgatacttatggtacctactcctaacactcttgtaaggtgtaaaattactattggtaaaacttaatatcgaactccacttgttttattataataaatattataaaaaatcgctaactaattataaaacgatactttatcgtggtgctaagtactattagtgccttataacactgctcaaactaaaatagagatgtcacaattcaacataacatttaacaacaaaatcattgaaaacatatacaatgaatgtgcccaaaatggtcatttcacatattttaggttgttttgcctttatgatccttaaaagcaacctcatagtgagttgtaacaacactaactttctgttggaacaatctccatactttgcctgcatttgacggccaacttgcaattttgtaaattcacaaggtcaaatgagtaattttcctaaccaaagtgtacatttcaagaaaaaagaatataaaaaacgatatttctgatgaagggaggctttaaatgtaaataaaataaatttccgaggctatttttgtaatttcataccaagaattaattgctacccaatgtcctcctaatgagagggcctcatttctatctaacaagtgcaacttacgaaaccttacattttggtgtaattaaattacaaaattgtcctcaaaatcacttaaaattacaataataaccttcattgttgttgtcgttgtcatataatgtcacctctaaaatctcaccaattgtgaaataaattgaaataataaacaacaaaatacagcaacgacaccaaaaatgcagtctttgtgagtagtcagcatttaaatctgaaaataataaaatagtaaataagtaaaataagatatatgattagttgaattactaatcacataattgacttggaatttgacaaatattttaattaaaaaaaaataataagaatgctatgacctttccccataaataaaatgcttgtgaagtatggtagcatgccttaaataaataaataaaaaaaatggcatagcttacaaaatatattttttaagaaaatacaatctcaattataattcaaaatacaaatatatgaatatctaattgtttagatatggtcatattaaataagtatgttgtatgtaggaattaagaaaggttatctttaaaaaggaaaaaaaaaaaaaaaagaaagtctatctaattgcacttaaaaagttacttttcttttagcgacaaccttataatatattttttttagggtaaataccannnnnnnnnnnnnnnnttgcaaaagttacagattggaccct

SEQ ID NO: 120480 - DNA, 1439 bp, Cannabis sativa
attttctaattttaccccttcatgtacccagtgcacccatatatatataatagataaagatattgaaccgacaaatcaagaccaagatcatacaagaaaagaataaagtatccagacatctatcttcggtactattaatctagtacaattaaaaacgaagctacataacctttaaaatgctcttcaggggaaaatgtttctccattatgatcaaacactaacatacttcggtataaaacaaatgacaggaatgatgctattatgagatgtattaatatcaactcaagtctttcagaaacaaaaatctgggatttaatttctataatttggaacaactttgcatgcttcaaaaactgaaatgaatgaaatattctgggttttcaaataagaatcaaccattcacaataaaactacaaccatcaagtgcaacagagaaaacgaggctcatgattcaaattaactgggatatcaggtttagcaatagtgaagcttagatgtgcaaataaaacacaaattcataagaaacctaaatcaatgaatgttatacatcaaacttttccaaaataaaataagaaattagaaatcgacattaagaaaatctaacctttgcccacatagatagtgacctaaactcgttcaaaaatcatcgcaattgcttctgagtatcggctgaagaatgagtgtctgggagagtaagactgagacagagagagcgagagggaagaccaaatcagaccggagtgtggtgaagagattgggcaaagattcgggtcgtaggcactgcctgcgcgtgggtctctgggcacggactacgaaggttctcggtctcttgggtgccgtaggttgacggtcgaagatagggtagggactggcggtgggtttctggtgggggaggtgagatttcgtggttcggaattctgggttgttcgaagagagaaaatttgtgttagacagagatttaggaaaaattatgtgtgccgtatttttgttacaagtatataattataatgatttttagggctgatgatgtcggacgggttgagggtttttcaataggccaacctaatacaatcgaccctcagaattctaacccattcatataatattttgagaaatttgcaaaaatactagaatttaaattaatttttataaaaatactatcacacataaatttttccaaaaatattgtaattttataaaacactagcagaacacaaaacataacaattaaaaacaacattagaataactaaaaaaacaacagtaaaataacagtgaaaacttaacaaagtacacagttgtttaaccaaattttgacgataatgacgtgtcaagaatagcaccgcgtggcacaaaaataccggggctaaattaatgaagaaagtgtaaagtcatgactgttgagatgccccctcaatttgggtggttgttcttctcccc

SEQ ID NO: 120481 - DNA, 1303 bp, Cannabis sativa
ttgctgggcttggctcacgggtgctctactgtgcaggaaagggaaaggctttacctgatcagcgatgagttcaggagctgggcaaagaatgtacatgtccgagccacatcagaccaagcgggttaagggtctaccaacgatatattttgaaactctattttgccgcttaggccggctgaaagaaagagacttgtaataaagtttgtaaatattttttttttgggatcccaactgttgtagagtttaaattattacaagttttattttcattctgtttattacaaaagtttaaattctgcgcctttttgaatagtaatcccgtttaggggattagggttttctaagtaacttgggtagcgtgcctaattatctagggcgttacaaaaaatatgctagagagacagagaggagaggtacccgacgaccatggttggagagaataggagagtggagttgagctatcttgatcaaaccattgatttgattttcaacaaatttctttacgtgaagctaaaaatgatctaataggactgcttcttgaagaaaaagaagacgaaaaaacaaaaagtgtgattggtttattttacttctcgaattatgtaacagaaaaatttaaaaaaaaaattgttaaacttgcttttacttagccacaaaaatagttaaactaagaattaaaaatttttattttaataattcgttataaaaaaaaaaaaaaaagtcacctaataatttctcataaaccaagaattctgttatatagcaacattttatatagaataaatatatatttttgcatttttttttaatttaaaattttaaagagcaccggtgcctactttgtaaactttttatcatctctctcttctctcttttatgtgtcacataatataatgtggctcacacattttggtcaactatatggacaaatccattggagttggccttattatgtaatcctaataatacgtcgctccttcagtttcaagactctcaaacttccactacaaacccttcaataattaattacttcaaattgatattaaatatttaacacacgaaaataatattccatttctcaattttaaattagctagctagtttataatatatgtacccatcactacattaattatgactaacgcatataattaaattattcattttgataatttgtaatgttataatgatgaaaggttaatagttagcctaatcaatactactacaaaaattctctttagaggcagtttttaagccctttgagcgtcggttttcgcgaaattcgctaccgacgctgatcagggcg

SEQ ID NO: 120482 - DNA, 5067 bp, Cannabis sativa
taaggtttttcataccttttatgtgtttattttatattgttttagaagttcatgtttaggatgttaaaaacagacttgttagtaaatttaagtcctgataaaatatattccatcgacctctcctcctcaaaggtggggcctcggtgtattcttcgacaacatagtcttcaccggtctctaggacatcgcctgcctcgaaaattggctctcctttatcattgtagccaccaaacggcagcaaccgagccactccctcttcttctccttcagcattagaagggatagttggacggaccttgcccttgtcctccacttcttggacttcaacatcccccacaacatcctcctctttgttagtgggatgggccggttctgccctaggcaaggtggcgaggcgggcgatatgtgggtcattcagtgaggatttttgtaccgattgcttggtctgcaccatcattctatgcttggacaaaattttatcagacgtgtgcctagtaatagtcacagcaaaagtggcaataggcttacctgcagcagcatggtttgggtggccctcgagcagagtgtcgactatgtctagttggactaagtacgtccagttagttagaaggtagcatctccaccctttcttaagttcccaaatgaactgaccgtatccttcgccttggatctggttgggatagaagtgatgttacctcgggttctggggaaggcgtgtgttcactacttatttcccagtcttcaaagctagagtcagaaagattgtcactggacgtggatggactagcacggagatgaggatgatcctcgatataagttaaagaaaatcctggtcgatacggtggttgcctctccaaaactcaacaaggttaatctacaaaaggtaggagacaagaaaatgagaattggtcggagcaacgaaagaaaaataggttgaatgtaccaatcaggttcgattgaggaattaaaaatagaagtttcacttagaagtagaattttcattccagaaattcaaaactttgaattagaatctaattttcactacacacctaatggatgcgtgaaaatggatactataaggttaaaatcaaagcgtagttaaattcaggcgtcatggttaagcacaataaagatttctaaactttgaacctatggtttctatggttatcttagaacaattcaagaacaagaaagattcacagccaaaaacccagaatattaagcatgcaaatatataaaataaataaataaagaacttactcactggtttgaagcttcttgttctgcttagatgatgttgtcaaaagttttcctgggaatccttcgaagaatctaacagaaaaatatgcttgaaatttttttgctctagttttcaagaatgaaaatggataaaaggatcactaaaggatctcgatcctatttataagcagttcaaaaagggaagtaatcatttcaaaaatttaaacctctcgaattctcctccaaaatataggttatataccaattacaggtagagtaaccgtcagcacgcgcaaacattgagtcgtgattcgaggtcggactgccaattagcattaaatgagggcaattgaagagaccaaccctaaactgtagacccctagtcagggtcacgtcgttcgtcatacgatgcctaggacacaagtcacccatctggacaagactctaggctgagtgaagtccatgtgcggccaagaaggtcccatgtagaattgggtggaaaatattatccagttttttgcaccttgacgtggcaataggatcagatgacacgtgtcccatatttctgatacttgggcgacagaaaatatccctagcagcctgcacatgactagtcagcatctataatagtcgattatctaagcaagattgtggagaagatatccgaccaggtagaaaatgtttgtgctgagcaacttacaagagatagcaacttcagagaataatctcgctgtatccacacacgaagaaaatccccataatcgtgggattgagtcagagaaaaatggtaacctgttctagttttctatttctcatattgtaattatagaattattgtaatttccaattttgtgcaatgtaagcaaaagggaaactatccctcatgcattaagtccctataaatagtggcctagcctcactatgaaagggctcgaaagaattttctcaaagagatagatattctacagagagagaaaaaaatagtgagtgatctaagagagaaacacactcagagatcagttgtaagagctttcaagaggaagaacactctgttccttctcttaagtcaacacaatacaaggggagtaggctattaccacccttatagggctgaacctctttaaaatctggtgttcactttattttactgttttagatctcttctaattatattatttaatcgctttattatttgactcactgtcgttggctagaagcgaggtcaacatataccacaaataaattataataaaactaaaattagtattttaatactcaaaaagtatatataatgctaacaaaattatatataccactattaaaatatgtataccataccaaaaaatttatatatagtcattatatataataaaataaaaactaaataccatgttcaataaataatataatatatacaacaaaatatatataccatacaataaaatatatatacctacaataattaaaaattaataaaataatataacattatcaaaaaaaaaattagatataccatactaacaaattatgtacacccattaaatatttattccatacatactaaattttaggacactacatttatatataataaaataaagattaaatatgagctaaaataaaataatatactatacaataaaacttatatatcataaaaccaaaaacatacacctcaatagaaacatatataacaacaaataaagataaaatatgtatatagcatactaataaaattatatgtcatgtcagaaaaagtgcaataaaaaatataacttaaatataattgtaagaagatgttatactgtaccccataaaatacatttaccattcaccaaaaagtatatactaataataataataaaaaacaacatataactaacaaatatatatatcacgacaaccaaattaactacaattaaaatatatatatcataacaataaaattatacaccactattgtatataataaaatagaaactaattacatattattattaaaaagtaaataatatgtcatacaattaaaatatataaaactaataattaaatatatgtatcatgcccataaaattatatacttacattaaaatgtatgtattatgctaacaaaattatatgctactattatacatagcgatataaaaaataaaaatcatctaagaatattaaatatcatacaacgaaaaataaatatactacacaatcaaatatatataccaataatcgatataaaataataataaaaaaattaatataactttaaataaaaaaaattttaacaaaactaatataaatatactatgatatttaagtaatatacttctaattctaaaaatagaattgttataactgaaattcggctgacacttcagaagaggacacgtatcaacctgggagaatacaaatcaacaaatataaaagtaattatattaaagaatattaaaatggaataactcattaaatgcaaagttgatatagtatacttataactcgttgattgtaaagtcttgagcgagacacagatatacaaactattaattcacatattgatgagaaaccatttcgtatatgaagacacgatcataaggacggaatcagtaatgcaaagcgaggcatcaacctcgctacgcatgaagagacatagacaagacatgatgactgttaaaacacttagcgtataatatacattatacaaactaagtataatagttcgatgaatctgaacaaggaatagcgaggaatccatctcgctataggatgacatactcatggtaccttaactaatcagctttagacattttcaatgagatccactactccgttgagtcagctctctcaaatagaagctgacatttaaatgataatgactgctgaggttctccttgtcaccaagaactgggattgtcagatggagcattatgtcttcagtagcggaaacgacggtatttttattatcagcctcagaaagacatgggaaaagcttcatctcgttgtcagggttattgttgctatcccaatgaggtaactctacgagatacactttgtagcgtgtttgaatccaagtcaacattgacctggtaatagcagataaatcacagctgtgtgattttcaagtaataaacgcatttattttacgtgggacgtaattaaatcccacaatttcaagggattattgttgtgggatatcaatctgattataattaagtgccctcctatgtaactataaataggggcacgatacactgaaaaagggacagaaaatcatttggagaaagagccctagttttgtattagaaatctaataagatagactcgtagactatgcagaattttaactgcaaaaccacgttaaaaagctttgtgttatttcttttccttttactactattatttctgtgcaaatctatcacgaaatatgctttaaattagttaacaaaaatctgcattaacagtttggtgctttcattgagagccttcgtgaaaaaagctcagaaaacttcatggctaataacggagaaaatgttgatactcatcctgaagagaccacccatcgttgtgccaaaaaagaaccaatggcctctcgaaggcgtgccaactcgcgatctacgtggaccactcgttccagcaggacccaacctgaaggtagcccaagtacacggtccacacgttcaaggaggacccagcataaaaatgggcagaacccaagagtaggggatgaagaacccgatcttgcaggcgctcatgttggaattttatgccctaaataaaacccatttcaatctaatctgatttgttattaataaaagattagaagtcatttatgtt

SEQ ID NO: 120483 - DNA, 1344 bp, Cannabis sativa
  modified_base (1313)..(1318): a, c, t, g, unknown or other
attttttgttgcaatttaagttgtgtaaaaataaaaaagcccctaaaatatattataataaataaattttaaataatatagagaaaatataaagaatctatatacatataaaggaaaagtataagacggtaatgtggcaggttaaaattgcttaaaagtactttatctattttttttctttttttctaatacttttactaataaaacacttttgaatactttattctattttctccttgattctctctattttttaatttttttattactaaaaaatatatttatataccattttaaaaaacacacatataaatatctatttaaataaatcctacagttttctattttttccctttttctactaatattcaactattttcttataattccttctttgtatattttttttttttttatgattgaaagttattatggcctttgaatattttcaatgaagtcaaccacatttaatatatataagagtatgtatgtatattatatatgttttttttttcctttatattagtgtacttctaaatatccacgataactattataatttaataagcaggttttttattttatgaaatatagtgtaatgtcaaattattatattagttagtaaaatcaatatccttagatggaaaatataaagtgagattttttttttgcaatgatataaaaagagattcttaatttggtaagttggagaagaaaaaaaatattttattaaatttttttttttggaacgcaataatctttttatcactcctgattattgttgtcattctcagctgcaaaaaatgtacttattcatcaaactgtagtttgaatcaattccagtaatactaatatatcatctaatcatttagttacatatgtttaatatgattttggtattttgtgtacgtcttgaataagtagtttatatttagtggggagaacttataattattttttgggtaatatctacaattatttttaaagaatagtttataaataaatagatattgatatggttagtgatttacaataataattcatatttatacacattgtcttgatattaaatttagaatatatagctatcaccatttaaaaaaaatagccctcaactaaaaatatctatatactaataaaatttcccaaaaaaaaaaaaaatctacaacaaataataataaataattttatttttctccctttccttttctttttctttttccttgactaattttttaaaaatgaatttaaatttttttaaaaattttaattttttattatatataaaaactatatatctttatatattaaannnnnntatctaacggcatttcttggtttaac

SEQ ID NO: 120484 - DNA, 2250 bp, Cannabis sativa
ttgctgcttgtctgttggcgttatggatgctcataaaaatcaaaaaattgaaaacgactatcaaattgaccagactataactgaatttttggtttcacgtcatcaccgaatttgatgattaatttcggttacaatttgtttgacatggtgatcagtttcaatttttgacaaaaaaaaatattggttaaactgccaaaaattgaaaatccaaaaattcgctaaagcttatacagccacttttgagcggttataatttctcaacggttggttgaggttttcataaaataaaaatcgtcaccgatttatcggttataaaattggtaaaagcagaacataaccaattgaattttacctttagttggcattagatttagttgcgaaaaaagacttgtaatttgttatagtagaatgtggctcttgttattgtaatattaatcaaagattaaataatcatcaaaaaaacaccaatttatttaaggcatcaaacatagtgagtaaagcatattactttataataatggctattaatcttcatacatcatttatactcttttaactttgcaatatacactcaatgaaatgagaagaaagagatataagggtcacaactcttattcactctctaatatcttagctacacacattccaccccttagtcactaataagcacaacccttttatgaggaactatgagccaattgggtctagatgtctaatgtgagagaattaattattttagctctaagggttgaccaaagacattttagagtgtgtctatgagccccgagcatgttattatgttatgtccatcccctattcacattgaatcatcattttgcttcaattttttgcgttctattcgcctcttacttgtaatttaagataaatttatttttaactaaatgcgcaaaaaaaaattagttaatagaaatttaattttacaatttcaagttgtacttgctgttttgggtccttccagtaggcgatgacctctactcacaccttttgtgtcaccccctctagggtctcctattcgcctttgcctctcccaggttgacaatattcttcttccatgtcttttttcgagttcaatctttaattgtatattccctttgacatcgctaacaaactgtagttcacgaatttagaattgtcaagtgggagctcaaatttagtttgtaaaaaatataatcattaaaatcatatatatatatatatgtatttttacaatagttttttttttctgaagtattacaataacagttgaatgttgccgctggtctatcccagatagtttgaatttatactttgtaaacgctctctcaagtgaacttattcatgagaatggtgttgcgaataaagagtttgaccatgttgttaaatttgttcctatagtcgtccatgggggccccactctagatgttatcgaaatttaaacttctacctcgcgggctacttgactagttcatcttttacatttttttcccttatacgctcctttaactccatttttttttattgatgtccacacctgcactggacattctacgcgtacaagctatatttattaatgataaaataagtaattgcaatcataatcaatttattaactaaaggaacatgtatttaatagggctgaacatttagacccgcaaacccgaaaaacccggccacccgccctgactagctgcaaaaaaaatcgaaaaacattaaaacccgtgtttggttgggtcgggttcaacccgaaattatcccacacgggtttcgggttcgaatattaaaaagaggttttttttagtcgggttctaacccgtgacccgaaatacatcaaaaaaatatttttttattatattaaaaagttaataatattaatttttagtttatcacactttactttttactgttcattcaatacctaccaactcaatactcactatttgaacctgaccaaggtaaccaagcaaaacaagtggctacagtagatgaatcgtttttcaaaacaataaaaccatgtcttgaagagcatgactacaataacaatgataatgacagatcttaatagtggcattacgaagtagggaccacctacttttttcgggaacccaaaagtcaatgtgataaaaataaaaagccaatgtgataaatgaaacttagttgtctgagccttttctcgggaacccaaaagccaatgtgataaaaaattaaaaaaaaaatatggcatttttaaaaattaaaattcatttgagccca

SEQ ID NO: 120485 - DNA, 1680 bp, Cannabis sativa
gggtttcatgtttcataagtattttgggtagtagcgtgtctaattatttagggcgttaaaattattgcttacaaacatgagcgtgtgattgtggaatgtgactctttaaatgttgttaaatctcttaatgggaaacaaagttgatgggctataattaattatactcaaaattgtcgaatcattgctaatcagttgttggattgtaattttatttgaattcctcatagttgtaatgtttgtgcccataagattgctaagttgccgctagcttgtcattagtttggctcaattgaggttgtctcaataccaactgatattgtttataatgacctctagatctcctctttgttttaatccatagacatttttttacgaaaaaaaaaactcaaaaataaaactacacacaatggaaagataaaaatacattaagtaatagttaaaagcagatacttatctctttttcatgatcatgttctgcttagtaaaatttgaaaatctagcaccctgctcaagagtattattataattaatctcattttcaaatggattaatcccattcacgacaaatttattatcttaaaccatcctcatgaggtcctcttttggagattcaaacgaaccaaaatcaataacatatggcgacagaatattcgagcttggttttggttgcctccttcgcatctctgaaggcaaataattttcatcatacaacaccaaactcatgttatcactcttctcagaaaacaaagcatatatgtcttcaaagcactcttgatagcaccatcaaccagcccctttaaaatatcagaatcaacaaagatttgatcaaacagtaaacattctccatcttgctaaaaaaataagaaactagttagaacaaaacataataacaaaaaatgaaatactaatgttataagtctataccccaacttgagtagtatgaacagacaactgtaacccaccaacatcatcatataaatcctagaaatagacttgcacaaaacaatataaaaacaatttcaaaaaaaaagttaaaataatacaaaaacattaaaatagacaaaaaggaaattgattttaactaaactaaataaaataacacaacaaagctaaaaaaaatcatgagacatgaactagtttcgtcctacccacaaaatgtaataatagtacaaaataaccaaactaaatcagtaacactataatcaactacaaacatatattacaatacataaaaattagttacctctctatcatcgaatggaaaagactcgggatcttttgtactgtttgttagagtttatgctttaaaaaacttataaagacattatttaattatataaataatagttgaacaatttgatatatgtttgaatattaaattattaatattttatatttaataatttttatatatatcaaaaaaattattattcatttatgatgccatgacttaaattgtacaaagaattaatatcattggtcatgaataaaatagtcagtaacatattaaagttatagaatctttaaattaacgattgctagtacagtttgttgatgcctgttatttagtgcaagcaatctcaatttggattattgatgtagcatgacatctcgatgaaggtgttgtatataatagagattatatatgataatgatcgatatgtaattaagttgtcttta

SEQ ID NO: 120486 - DNA, 1365 bp, Cannabis sativa
ctatcatggctcttgcatactcccttctgaagttcttattgagaaatcatttacctaccttcaagaattctaccatcataataacaaagcaagtggtctctaaaaagatctactgccactacggttaaggcatggtagccacccctattgataagttaaaacttaatgtcgatgccacaattgaccatgagggggtgttaaagacaattggttgctcctactgtcattggccgttagtgttagttagtccatgttagttttagttagttggttcagttgagtttgttagagtttttgttttagctcaaacttcataaaaggtttgtactcattttgttaatcgatgcaatctttacacctttctcttatctttgtcttctctttcgttttactcttttcgtctctctgttttcattttcttgttctttaatggctagacacatcaacatggtatcagaacattttcctcctttagcttttaacatggcaactgtaggtaatggtgctacgatccctggtgcaaatccttcgaacactaccactgtcgatggagcttctatcataaatcgaccgaactaggaacctgtcatgttcaaccataacatctcgattagattgaatgatcacaattttttttttttttttgtggaagcaacaagttcttgctacaattagagacaattgtctactgaaatacatcaaagaaccccctcttgctgagttcttgagcaatgaagatcgacaagctaacaaagtgaattcgatctactttgaatgggaagttcaagaccagcttctggtgtcctagttactctcatccatgattgaaagtttgctgacaagaatagttaggtgtaactcatcacaccaaatttggaattctctggagaaacacttcactctttggtaatatcattcgagactctaataactttgtgattgctgctatctccaaactaatcaaagagaggtacaatgttaaaaaaattgaagttaatgccatttcagtttgcttacaataattaaaagagattgaatgtggtgtgcatatcattgaaattgatgctcttgtggtctcgcaaagtgttaatgcttatcataaacaatatagcggatttaatgattttatttttgatgtattttattggacattctttttttcaagtgtttctttgcaagagtgctaattctgattatgataagatttagagggttgtcattcgagatataatgttgtaagtgaatttattgattaatatataaggaaaattttaatttctatgcatgcattaggggataattttttccctaaattaatacttttttacattgaaaatatatgaccactttttcaaaaccccaaaa

SEQ ID NO: 120487 - DNA, 2052 bp, Cannabis sativa
  modified_base (2003)..(2009): a, c, t, g, unknown or other
gatgagagattcctagccacaaagttcagtaggtaatctcttattctttctctttatttctcttggtttttcttacaatatctcttactaactctctttatattctctcttgtttctgaggtgggttaccgaagaaaaacaaaggctgctgccttttatctctgctggccgaaatggtgtgttgttgtgtaaatgtgaaggttgtatatctatttataatgttgatgttgttgctggttgtgtttgtttctgatatgagaaaagactatattctgttgagatatttttccttgaatagctgagagtttgttagagtcttgagatatttatttgcttccttttattgtaagaaataaaagacctaaatctaggaaaacagaaccgacaactctatgagttataatggtctgttgaggctttataaaaaggtctaatttattttccttgtaactttatttatgggacaatagtatgagaatttatccaacaataacttaataagtaaaaaaagagcgtcaaagtcacttcttcaaaaagatgaactaaaatagccgtttgtaattcaataaactaaagcttatgaaccactatatttgctataattattgtggaaaataaatttagaacaatattttttttttcctttttctgaaagattgattgctacctgaaatagaaagattaaatatatggatggacagcttactttgcgcgtgtattaaaaaagacatttatataattatccataataaaattattatacatggttttgcacgcattaacaaaaaatgttgaaatagtcatacttgcaaaactcaaatttcccttctcccaatatattagaaaaaaaaaatgtcaagaaaaactgtaaacctgtatttgttataaatgttgttgtagaaattatgaagagctgtaaattaatagtagtacttgatctttcgtacagtacctatgtttatattaactctcatcttgttggagtagtaaatgaaaattgctaagtattactattcagcatgagtggtacttaatgagtgtcttcttaaaaactattttcttaagaagaattgctaaaaagtactattggtgcctagtactttccttagtgttatactgttattagttaaattaagtatcgggtctcatataatttaagaaaataatttttagagaatatcactaattaattgtaagataccacttattaaaggtattgggcatcactgatacctaatagaaatgctctttcttaagtaattatatagaatctgatacttaattacactgataaaagtatgacgcgccgagaaaaatattaagtactaatagtacttttttaatatttctcatgtaataactattagaaaatatattaagggtaaataagggtaaatacttaaatactattttaattttaaaccttgttttaaaccttgtgttttgtaaaaattattaattagaccatttgttttgttaaatgataaaacaaaccctctgttttattaaatggtacaaataggacattgagctcaatttttaacaattttattttttgatataatcaactttaagacaatttctaacacgaataaatacagaaaatgtaattagttttgtcataacatttttagatcggattatcataaaattttattttgacaaaaaatcagtttaattaaggtcctatttgtataattttagaaaatatatggtctattttgtcatttaacaaaacagatgatctaattgataacttttacaaaacacaaagtccgaaatagtatttacctaaacattaatcattaatatattttaatttaataattattataaaatataaataattaattatatggtagtctattttatagcaatggttaataattatttctccatgttgagaagagttgcattgcatgtgagtaataaatgtactatatatttatattggactacatatatattaatagggacacgattttgtcccgtgatgtactttnnnnnnntgtattccgtggtacattagatgggtctcggggtacattaaat

SEQ ID NO: 120488 - DNA, 1010 bp, Cannabis sativa
gatatttactaacaaatatctattttgaaacctattaaaaaattattttaagaaatattacctcaataattaaaaatttggggaaaaaataaaaaagaaacattttaacccataataacctttgagataaaatgcaattagttctttattataataaatacacatatttaatttttatatggaatatcaatagcctcataattactattaataatattaaatgcacacattaaatttatattgataacataatctcacatttttttttgtagagtgatacaaattcatacatttagaaacaaaggaattgcggcaaaattcttaatacttttattttacttgtactgaatctccaatactcaatttttgacggtaaaaccttcaatactcgtgttctgttagaaatttaatatttctatccatttcaagtgttaagtactatgtgtgattgtccacgtgtatatctacatggacacaatgtacacatgacacaatttaattagtccatgtaaaaaattattaaaaaaacttaaaacaaaattaatttgaaatttaaaaaattgtaaattataaaaaaaacaatttttttattctctattctctattctctataaaaaaaacaattataaaaaataaaataaaataaaaattaaaaattaatacaccaaattgaaaccctaattctctattctctattctctattctttttgtattaatttacagtgtagttatatagttggaggtaattaaaatgccttaattactataagaattatatataattacatgtgtaataattacaaaatccattacattttaaatattaattattaaagaatatgtacaatttttcgtaatctaattttttttgaaacattttttgtaatctattttaccaaatataaccatatcaattattaatatgtaattttctatttacatccaagtacaacttttttttttttgacaaagtgattagaattactcatgaatttacgacgcccacgtc

SEQ ID NO: 120489 - DNA, 540 bp, Cannabis sativa
tagaagctatcctataaatagaataagacgactcttattttctaacctatttcttgataacctatttggctctcttgcaagacaaaatagaaaagagaaaaagagtcaccatctattttgaaattctcttcttcccttcctcaaattttcatgtcctatagtgattgaggagttgcacacataattcaagttaatactcaacatagtgtagaagattgtgtagaattctatcagctgaagaagtattcaggttcagatcttgatcatactctgtgataaaaaggatcaaagattagagatctgaacggaaggagtcattaaattctgctgcaaccaatgtaagattttctataatctcttatgtgtttatttcattattttaggaaattcatatttaggatgttagattatatttttataataaaatatacatgttagtaaatctagatcttagtaaaacagcttccaacatagtcttttctgtgtgtcatggttttctgctgctttgtttcgttattggttcttctttgttcttcaatg

SEQ ID NO: 120490 - DNA, 1654 bp, Cannabis sativa
atttgtcatataagataattttaatctaatattttaaataaaaagacaaagttatgttgcctgaaactgtgaaacaaaacaaaaagccctaaatgtttgctttgtatcttgcctctctatctctctttatcacctgaaacaaacaaaaaaccctaaattagttctctctatctcgcctctctatctccctcctcttaattggagtcattgctcctctactccggcaaccagcaaacgtctttctctctctcctctccctcttctctctttcttctcaacgaccagcgacatgcctatctctctccctcctcagtccttgaagccccaagatctcttctctgtttggcgctgcccatgccgaatgctaactccggcaaacccacaatataccccatcatgtttctcggcgaagaacaccagagctaatgacaatggtggagactaagatcaatattggtggtgttgttggagaagaactggtatagatctctctctctctctctcataaatttgtatgttatgttcggctggtatggatctaggaattagtttttttatcaaatctatcaatgtgtattttttttattctttttgtcttcaatatctaaggattgagctgttggagcttgttctctgtttttttctagatttttattgaaatattattagtatttttaaatttggcttctaaatctcatgtactgttaaattcgaatatgagattaatttgaggttttatattgttgtttttttttttgagtattaatttggagttttatgttgttgttgaaaaaacttgtgactgatattggatattcatttctaaggaagaattgtagaggaccagctatggcacttaatattccacacatcagtcttattgaagttggcatgctttactatatcttattctagattttttctttcttatttttaggttttagttttaaaacctaaaaggttattatatatatagctctttagaccaacttttgttatgtctgaaggctttcttaggctcttcaaatgtgtatagataaagtccaaactcaagtcgaaccttttcatttggcatattaattctaataagctatttttttttcaataacccttctcataattttattggtttttcaatttttatcttaaagtaataacaaggaagaagggtgatcactcaggactgtttgtttgtttgtttgcgaatttgctttgttgtagccctccattcaacaggttctcagtcagaccttttgcctacctaatctgaagatgaaaatgcattgggcaagaccaaattgaagatggtgtcaattaaattttttatttcttgaggctattaatttttttcttaataaaatgtagaatatggtcagtttcttttacgaattaagactcattttttttgttgtactactgttgataattttatttcttttttgttgttgtattgttcataccaatttctaggtttgtggtcatattttttttttactgtttttgtattttatttaaattatacttgtatttttttgaatcacttattgtgtattactactattaattataatataattatttttgtgtatttttttagttattaatttagatgtatttatgtttatataatttataatttaaattgataattata

SEQ ID NO: 120491 - DNA, 958 bp, Cannabis sativa
attttattatatataatttaaatagtataataattttttgtagtggttgaattgttgtattagcaatatttaatgtcttgttctttaccattaattatatcatattggatttactattgagtatcattttatcaaacgtgttaagattatatgatccattaattcaatgtttatgcaaaagtactattatataaatctaatgattcaaattctgaaatgcttttacatcaaggaattattgcccaacaactttaggtgaaagggtaccacctttaattttatttctctttttgtaaattatattcattattaacttctaactttttaatttttggaccttgagttcaaggtaaaaaaattatgagaaaacaacaaaagaaaaagtaaaaaggaaaatatattttccacattataataaaagccttttttttaatatataatttttttcttttatcctttttcatattaacacttaataataaaattatcagaatatcgaaaacacgaaagaatgcatcgatacattgctattttagcaggtacttaccatagattttccatatatttttaataagtcacaacactatttgtacgtaactaaaatgaaatctatatattatgactaagaagatttgtctccaaaggattatttttggtaggagtagttttgtaaattattactttaatcgaacattatttagctatattttcactttagttttatataattcagttatattaatttaatttgttttcaatttgaacaagaaagagatcatgtaccaccagggctggcccaaccaatttgggagtgttgggcgaaaaattaaaattagactttttattattaaaaataaaatcattaattaatacttcataaagttaacttaaaaaaataagggattattttacaaaaacataaaaataacaaaaaaaatttacaaaaatacgatttcac

SEQ ID NO: 120492 - DNA, 724 bp, Cannabis sativa
atttttgtaactaatacttttagttacgaattttttagttacaacataagaatagtgatttgttattagtcacaactattttacttttagctacaagttttgttgtgtctaaaagtaaaaaatttcgtattgacttttctgatgacgatgataattctgatgacttttccgacaattttcgacgactttttcagcactggtgactcttctgatgacctttccaacaccaatgacttttctaacaccaatgtctgctcccgtaatttttccgacgataattattataaattttaccaactttatgtatgatattttattcattttctcatattttgattatttttttttattattcctatatttatttttttacattattcatttctaccatataaatataaactttattatttttttaatatttatgaaaaaccccttattttttatgtcataaaaaaaagttaactcgagctctagctctataaagaatgaccaagaccaatctaaatcgggctctagcaatacaaaaggccagcctatgaaaggcccaaactaaaaatgatataaggaatgggaaccaaatgggcaggctattatgacttttgtaatttcatttgcagggtataaactagcgataagttgaaaaatatcacttttattaatcaattaatcaaatttgtctctaattttatatttaattgaaatatacctctttttatatgta

SEQ ID NO: 120493 - DNA, 963 bp, Cannabis sativa
tttcaagcctcatcaaagtaggatcgactatttggctcaagagccaaaaatctatttgaattataaaaaatatatccttgattcgaattgttttgtgtttgaacacatgcaccgcgtgccatgatcacaaaacaataattcaaagaagatggagaagagaattaagtttactagtagtaaggctctgataccatgttatttttataatgaaaatgaagtataccagacccgaattagcatgaagaaagaataatttataaaataactcttattattgattgataagaaaaagagtacatatctttattatttgtactagagtttgtaattgaagatagtaactaattgtacctatatcaatataactcttgagtcaataaatattaattactaacaacttgactctaactctcataactacataatcaaattatcaacaactatatagcttaatacaaatagagaagatggaagactcagaacttgtacattgaaaaatatatatagtaactttgaaaaagcatatcgtgtatcttattataaaataacttattaaaggtaagatttttgcttaaattaaaaagtagatcatttaaaaagatatcatactcactaatgcaaatattattcaaattaagaaagagcattaaagaataaatcaaactaaattcactttaactaaaataaaactcgtgaaaaaattatactttaactataataactatacaaataatatgcataatattatgcaattaatactttcgaaaataaataaattaaaaattactatgtattgaataaatacatttaagaaaaaatataaatatcatttgaaaagtcaagaaaacttttttctttagggtatgtttggaagtaactgtgtaattactaagtacttaagtagggtaattactagggtagtaattacacagtttaataattacactgtattttaaaatgcaa

SEQ ID NO: 120494 - DNA, 817 bp, Cannabis sativa
aaaaaatagagaagttgatgtatgatataatgtaaaaggttgaagtaaaatagataaagtagaattttagtgatgcattttaaaaaataaaatagagaaattgttggaagtgctctatgacatttcttctctatttttttagcgtagctacaagcctacaagtttaaataaaatttaaaaatatttcaatatatttttattaatttttccttcaatctcttcacatagttgatattttattattttttaatattattttagttggtaaagttgtttaaaaatataattatgtttggggaattgtcatgtataccgtattttttatttttttttatatattttttatttttataaaagttattttcattttaaggttatgttgtttatatttcgagattatgctatttttattttataaaagttatttttcttttgatgttatgttgttttcattttaaggttatgttgtttagatttttataaataaataaaaagttaattataaaagtataaaaatatagagaaagaatgaagtattgtaaatattaaatatatatgatataaaattaaaaagtaaagttttagtaagttattttaaaaatagagtagattaattattgggagtgcttttgtaaataatgtattaaattatgcacaaaatattattctgcttaaaaaatttatacacaatatatttaataaggtgagttttatttttctcttttccaaaaaagaaataagaaaaaaaaaaaagagttttattgtagctttatttatttactttacatcttgtctttaatagattagtttaatttct

SEQ ID NO: 120495 - DNA, 724 bp, Cannabis sativa
aagccttcatgattaaaggtttcttatcaaagaattgatatccccctttaagaatcctatctcttttctcaatagattgaaacctgatcaagaagactccatgagcaagtaaactcactctatctatgttctgatgcttccaaattcttctaaaaaaaccctacatcacgtgaattggaggattagcttatagcacataacaagtgtagaattctagaaatgaatctcatcaattctatattcttctatgattttgacgcagaccccctacttctcccatgacctttttttcaaatcgcaaaacaagtaaattagaagaaggaacattaccttatatctaatttttgcagaattagacagagcacccattacttctgcaaacgtggctttaatctctgatctttgaattagttcacgcttagatgcttttggatatcgtacaatccccactctatcgtccccaataacagatttcgccacaattgcaagagcatcatggattagatatggttattattctgaatcagtacactgcatttcttcactagatccatcgagcttggacccttcttcttagtcgtcagttttgttgcatttttcttaggcctcagcctcactaccataacgaagccctagcagagctaagagaaatgttggctcctagtttattcttattgccgatgattacatttctctatccaaatatataatttttttttttttt

SEQ ID NO: 120496 - DNA, 1098 bp, Cannabis sativa
aatctttttaactccccatccgttagatcacctttgtgttttagccgagacaatcctgtcctttgattttgaatcatatggatcaacatctttcactataagtaggtgcgaagtggcaattatttttcttttcaacatctttgagcttttgaacaataacctcctatttttttaagaagaagaactgtaagaaaaaaattcctaaaaagccctagtctcactctttggtgaatgagcgaacactgcgacgttctcatccaccgtcactacaaattcgagtgagagagtttccagaaacactgcctctaaacccaattgtgaaccacttctagtcattagagaccgtcgacattcaagccggctatgaccaagtcctttactgggctctcgacttcaaggctaactactctcatcctccttcattcctatgtcgtatcacaagtaagttctccatattgacctaccttttctttttattatgcattgttataggaatttagacttgagcattaatttgataaattacttttttcttgtgccgatgctaggatgatagagtaggctttgtgggatagtctgatgattataagcctattgaactaccaatgcatgttatattttctagtatattaggtttgtaacttctatctatgtaaataagttttggaatcagattgtaccctaagtctcctcttggagccattagagcttcgaatagggttgtttcctaattttctcctttgtaattctctatggactcccgacctggtacttggaggtattgtttcatgagaactgtgcctctaggtaatgggtcttgaagggacctctctaagaaattttagggaggccttcctcaatacccttgccgtccttaatatccaaggtatttaattgcttgggttattttctttttttctagtggccaacctcaacgatgagttccaccttgaggctgtggacctcaaggaaaataaggttagggctctggcttaggagccccaaaaagatactgccccaaaatagaagtaggagaaggtaaaggcctcacccccagcccctgtagtatttatgtaacgtccccgcttcaagcctcca

SEQ ID NO: 120497 - DNA, 2417 bp, Cannabis sativa
  modified_base (2333)..(2334): a, c, t, g, unknown or other
atggatggaagggacaagcccattatgacactattggagacaatcagaggttggttaatgtctacttttactaagagaagggaagggatacaaaagtggaagcatggagtgcacaacaacatagtgaagcttgtatcaaaaaatgctgaaattgctaggaagtgctttgtcataagagaaaatgttgctttatttgaagttaaaatgtcagaagccagtgcctttatggttgatctggacaaacatgagtgcacatgccaaagtttccagctcacgggaattccttgtgctcatgcattggcatccatttggttttatggccataatgaatggggatacattcatagttactacaaaacaaaagcttatgcatcaacatatgcagacacattttccccaatgcctagcctgacaagtgaccaaacaaaggccttaatcctatattccctccttgtgagaataatcttcctagcaggccaaaaaagaaaaggagaaggggtgctgatgaaaaagatccacctgcagttgggagaaaagccagcagagtaggagcagtcatgcattgttctaaatgcagaaaaactggccacagagccctaagatgcaaggaacctataccagagaagccaaaggagaattgatataataattgatttgccaatttcattgacttttgcatttgtattttgttttgacattgtttatatgtctatgtagtctcatagtctcaaaagaatgaatgaggtaggccaccaattcaaaatccatatgtttcaacactaaagaggaggaagagaagggagaaacaacttgctaaagatgctaggcaaaggggggaaggttcaaggtcccagcctcggggttgattgtcatgaagaagtttgaaattatattttacattaacctattgtaatagaaactagttttagagaacttttggatatttgatgtatatgtgcctttcggtgatcttttgatcaatgcaccaagcacaaatagggccttaatttatatttggctcaatgtgaattgtataggtgcattttggtgatcttttgatcaatgcaccaaaatcacaaacagtgccttttgctaatgtataggtgccttttggtgatcttttgatcaatgcaccaaaatcacaaacaatgccttttgctaatgtataggtgccttttggtgatcttttgatcaatgcaccaacaacaatttgaatagaaattatattttccttgcttcagtgttcatatatcaatcatttcatttaaattattaatttttccattacattctcatactacatgagcaaccaaaaaaccagtacattttcatgaaataatattatccttaaagggtatccttaaattacatggaacaatatccttaaaaccagtacattttggggttaagtgttacacatttaataattaaggtggtttagccttcctaatatctccttacattacagggatccaaacaaccctcaggacattaaccaaaagagaacaatggcaaaaacaacacttatgactaagattccactagtacaaatattttcttttggatcttcaacactattgctgctactcccattgaaactctccatgcaatcaatttctcctatactattaagcaatgattgctcatcaacttgaacccctttgttcagggcctttagtatagaagattgctcatctatattttccacactgttccggtaattatgctcatcaatatttgatcttgaaatgtctgaaatttctccctcaagccttctaattttacgcaacagcccaagaaccacgtctgaagtcctttcacacattggtgggtcgatccactcctaaaaataacatccaccaaccagatgtgaaaaaaaaaaccattattgtagaatcagatgaggactcgagtagaccaatgacttaaaaagagaaaataaagaaaaaatttacaactcaccctataacgacgacgtatgacgaatcttcttcttgggtttgcatctgtccactaagttttgatcactacagggtgttgccaagagcacttgggatgtagatacctcttcatttttttgactgcaacaatcgctgaagggaagaacagggggaggtatgagtcgacaatggcaggatgaaggggatgagttgtaacaccctaactagcatatgcatgttagcgtgattttaaacatacggtccagctcgttgctactcaacgaggttattaaaaattgtgaataattaaaatttgcttatttaattaaaaacataaagtaatacatttataatattccgggaccccgttacaaaatgtatttataaaagttnnctagtttaatacaaaagttttgtcgcctagcgattgtcagcaaaagcctttacgtcccctaagatcgtacgctccaggcctaa

SEQ ID NO: 120498 - DNA, 768 bp, Cannabis sativa
ttttaaaatttttgattaaaaaaaacaaaaaaccatttttaaaatggttaccgaacggggccttaatatttcttttcttttagttttaacattgaattctttatataaatatttattacctatgtttattgacttaaaaaaaattcctattgaatattgttggccgagatttttgtcaacttcttaatcttgttttaggaaaattaatcgcaagtaaagaagagtagttttacgtgattcatgtgttaattaaccttagtttatgagccacttttattgataaatagtgttgttattactagagaacatattatgtttacagtatcagagttcatgtttgtctttcctttacctctaggctctaaatggccttgttcgtaggtgtaggaaatgatgcatttcatgtgtagaaagggtaagctccaaagtaggcgtttagtgagacaaggcctgtcttctatacggttgatgggacaccacaaggattaaccgtcaatcagcgtccataggtaagcacgatgtcaaaaaagtaaggacaaatctcaaagatatcctcgttttgggggtaggttcattttgtcgtctgtgctggagcagtcatctatagtgcttcgtcttgggagacgtgttagccaccttggtagctcccaaatgctatatgatctaggaggccctcatcctccaagaggaggagtttgcattcgattccaaccatccttttagaattgttgttcacctcggtagctcctgttgggaatattttaccag

SEQ ID NO: 120499 - DNA, 667 bp, Cannabis sativa
catatttatcataagaaattttaaaatataataagtgtaatttccctaaaaataacattacatataacaaatacaccaccacggctcaaattttttaaaattttccggaaaataaaggattgataacaacgtgggaggtggtctagcgctggctcaagctaccccgcgtgtggcatatgatacttattgggcctaaaggagcttagttggttgagaccctaccatgtctcaaacatgttacaccactggttggatggtaatccctccccacaaccacatccaaacccagcttctccttgttaattaatttggtgtaaaatgtcatattctaattgttttgtctattcatttacatttatgttttgtgggataaacatctcattggtctaaaaatataggaatatgtatgaaaatacatattaaacatctcattggtctaataaaaaaaatataggaatatatataaaatacatattaaatatgtcattggtctaaaaataatgttgatctgccacttttaacctttttcaatttcctgatacatatgagacttcttgttcatcgcgtttcttgctctatagagactcgtatggtagcaagaaggtagcataatatgtataggctatatagcaagtataaatattgtttaaatttagcatataactgt

SEQ ID NO: 120500 - DNA, 2402 bp, Cannabis sativa
ttgtgagtagatataagatcctggtaaaataatttccaacaagctcgtggctcattctcaagttactcttaccagcagcaccaggcttcgaaacgcctttcctcttcttcaccatgggaggaggagcggagtttaacacgccttaaacctgagagagttaaaaaaaataaatttttcttcgctttaaaattatatatgtagtttattttttggtaacctatttcttttatttttttgattaatttaaatttctcttcatatattaattagtttttattggtattcttttaacatttaatttttttttcaaattattgtaataatattttgtatattaccattctcaattaagattctttattaaggttttttagcattagattttaatgtccatattttattttcacttttaatgttttctatattttattgcttatttgccatttcattagtattattttattattatttattttttttacttttaaagtctaattaattatttattagtattaatatttattttttggtaagttacatattcttttgtttttatactatactttttaaaatatattatactgtctttgaacattttctatatatttatagtatttttacttttgtttttcttcgtaattataaataaggtcatataaatttttttaaagtgtattgatttttttttttatatactaaagtatattgattatatttattttgttaataatttttctttcaataatcttcataatgcttttatgatttttatgccttttacagtgccttttgtatattttatgatttttatacttattacaactttcgtggtattttttatagcttatcccaaattatttaaggtagtttaatggtacagttaatagaaaaagagaagtgatccattttgtactcatgatttttatataaatgactttaagttttaacatataagtattttaagtctttctatttatggattgttttatattataatatatattataatattgattattttgtcatctttctttcacattatctattttttcattaaattatgtagtaatatagttttatttattgttattttgtaagtcaattttgtggagtgcctacgattacaaagattttactgataagtttaattcaaggattgtctcttctgatacctgttgtttcttgatgttgtttgtttattcatgtaatattttagtattataagccgaaactttgactcttttgctatcaacaaaggaatgatattttttaatgagttatggatgttgtttgaggatgttataattttattgtctaaattttcgaggatagttttgtctcatgtggctcgcgatatgatttatcctagttcgaggaggtgctgattatggattgttgcatcgttgatcatgtgtgattttgatcactacattaaaaaaataatcaaaaaataaacaaaattatcaaaattaaattattttttgtccaattataaattttcgcaaaatataaaatctaaaataatacaatttttttttcttaaaattaaattattttttatgctatgctacttagatgttatggtattggtaatttagttttttttttttctaataattttttttttattttcaataacattgttatcacctttattgatatttgtgatattacaatggagcttcatccttttagagtgcccatctcaagaccaaatttgcttgaatttgaatagaatttgtagattattacttttattttaaataatggtgttattttatctttaatttattgaataaattgtaaacagcttaatatgtctttagatatttgaatttagaggagtgctaattataataatctcttagtcaattttcacacttgaaatcacatgttaaaatattttttcttatagcggtattcgttatgattacaatattatccctgttaatttttgaaaaattctaaatagtttatagtaccttttataatatttcaatttaccatgcatgttaaaaaacttcatacttatttttggtactgtaaattttgcccttgattttttccaaaatacgtggatctataagaaccaacacttacgaaaatcgactaagtcttaggtgaaaaaggagtatcttaggaaggtgtctcgcagaggagacataagaagtatgtttactctccgagaggccgaaggcatgctaagacagttctgggaggtacagagatctcttgaatagtcaccttgcatttaatgccgcagaagacgtattgaaatctccataaacgacatgacggatggcgtaaccccccatttttggctattgcactacaatcaataaggctagtgacgactactttatgaggaatcacatcaatcaagaggggataaaagattatat

SEQ ID NO: 120501 - DNA, 858 bp, Cannabis sativa
tagaatcaccctaaaatatatacataataagaatccatttattggttggagagtttgacaaaaagtaaactgtacgtaatgaaaactaatacatacaataattttttgacagttggacccctctctctctcagtctctaaattcttgtattcagttctctattcaacaaaattaaaaacacatgccttaaaacttacaaccggcaaaacctttttcaactttgtcagttgtctattgtcacacctcaaagcctcaatgacctcattatatgtatttattaaaatttacccaaaaaataataatttctcaaaaagaaaacatttcattctcatccatacaaaaaccaagagagtccacccacttgttcttctcattacccaaccctacataagtgtccttgtgcgcccacgtgatttttgtgttatactttcggaattattgatatttttttaaaaaaattattacattaaatttagaattattaaaagtaaggtcggctctaagtataagtgggttaagtttgtgtttagattcacacttttcgaaaacttaaaataaaaaataaaaaattcattagcaatcttttataaaattcattatattaaattatatgacattagatatatttaattgtactaataataatatgatacagtagagaatgttaagaatcactgatgcctttaagcatttctttattgctatatgagcacgcagaatattttctcaattttattttttgaaatataatttctcgtttttaacctcaattttggtgattgaataaatctaatggctaagctgtacaatcccacatcacttttttgatccgtaaggagaaatatcgggtaagttgtg

SEQ ID NO: 120502 - DNA, 2544 bp, Cannabis sativa
  modified_base (62)..(68): a, c, t, g, unknown or other
  modified_base (2478)..(2479): a, c, t, g, unknown or other
ttctagccaaaatgattgtgatagtgaaaatgatgatgataacttagatatgtcatatgatnnnnnnnctaattcatttaaggaattatttgataaatttggtaaattgcttgccaaaaactaaactcttaaaaagaagaccaatatgctactaaaagaaattgagattttaaaattaaatataaaaaaaaaacttttagctaattttcaatgtgcttcatgctcctcatataagaaagaaaatattgatttaaatgcacatgtgaaagcctaaaaaatgacatatatactttactagaggtaaaaaaggctatgatctcatgctaggaacttaattgtgtggttttgcaaaaagtgatagaattagttctattttaatttatgactggtttcagttattttgtattatttatttttattcattatgttatagaaccaattctattttaatttatatctgagacatctacttctggtgacttttctaataacttttcctgcaatgatgactttttcggtgactttttccggcaatgatagttttttcggtgacttttccaatgatttttccggtgacaataactttttcggtgacttttcaggcaccagtggctttttcggtaaaatctattattaaaagttttatcaaatttatttattatttttttgtttcccatattttaatctcatatctttttgtattatttatttatgtcatgtaaaaataaattccattaaattttctcatatttatgaacaaaccccaattttatttagtttgtccgagatacattacctatcttgatctttagtcatggttgttttatgagaaaattacattaaatattaaatatgagattttataaaaaagttatagaaataagacatctataaatttaccactcttctaaggtatttttttcatatttaagattttttatggtatttgatatgccacagttctgtaaacctaacatccaaaacctatattttatatttttgtttctagcccaattaattttatctgtttctttggtttattttgcatttacattttaaggtttctttgagacatttacaccaattactattttttttttttttgttgtgactaagttaaaaaaaaaataaagaaagaaagcaacattatagttctagttgtttgtgtaggatcatttatatatgtaccaattatattatatttaatatatttaaaaaaagacgataatggtctcaacttctataattgtaatttgtaaagctgttatttttagacttgtgcttcttcttccaattgagaccatgcaagagaatcaacaattgcaatgtgataatctcaaactcattttctcgtggtaaaacacacagacacaaacaaaatattaaccctaaactcaattgtgaaaataaaaactaatagtatcttatagtatgtatgtacttctaattgacattaaaattcaacatatatactgctggttagtaatctttaattttataggtttttgacatttaatttataaaaaaatagtgataagtgaaaatataagttttgtttcttcttccctaaaatgggcttatctataataaattgtagaaacaacagctgctacagctgtcttcttctcttctcttgttggcattgctgatgattttctcatctatcatccatgacttctttatctttctctctctctcaagtgttgcccttgatctcttcctcactctcttaaaaaaagtgaaaaaatagtgttgctagacgttaacaccaagttattttcatttgctcatagcttagtttcttaaatgttggttttctaaattacataagtaaatgcaaatgacatgattagtggaggtgctctgtgggaactagttcagatttcaagagactggtcccgggaggacatatgagctcttgctcgtcgaatattgcattcaagcaccaccttcaattctgaaatgtgtcgactacggatataatgttgattattatgtaatttaagatgaatagactccataaaaattcattagtgcattgtgtgctatgtttttttttgctatattgcattatgtgttgtgcattgtgcattgtgtgatgtttttttttcccgctaaattatattgtgttgttttttattatatttgtgattaatatttttatttttatttttattcgtgtgtgtgttttttcttcttcatttggttgactgatgaaactgatttcagttgacttcattatttatcatttatgttttgttatgatttttcataaagtcgaaactggtttcaccagattcaagagttcgaaactggttttatatgttttgagagttctgtaatggggttgctccattttatgatgttattgcataatttttattttaagttacttttttattattttgtttataggtttgaaacttgcatttataatttgttttcaaattattggtatgcattgtgtgttgttttgannatatttgtgattagtattttttttgtatgtttttttttttttttttcatttggttgtctgatgaa

SEQ ID NO: 120503 - DNA, 922 bp, Cannabis sativa
aagtcgtaaaaatatttaaaattctgtacaattgcatttttgtaattttttttgttattttatgtatttgtgaaataatcccatattaaatgtggttataaaataaaaattgtactaatacctaattctcataattggagagtaattgagagtcctaaacaacttttaattacatggttaatgtgtacttaacaaacatgctaaactttataagtactttgaattatactcaattataattatatagtagaaatctaaaaatgtcctaaaaactactcaaaatttaaattattataaggatagatagtatttttaaaaattattaaaaaaatatgtatgtacttttaaatagacttttttctatttaggcccttcggttgggtgggctctaaacacgagtttagtccgccttaacttaagatcgatccagcggacaatatcaaatttctttccactcagacgaatcaaaactccacttaaaaacattaaaattctctgtcacaaaagattttttgactgctaaatcttcctaattattatttcagttacacttaattctccaagtttaaattctagcggtataatcttctaaattactaaactgttaataaattttaggtgttatccggttaattgtcactgaagtgaattgaagcagcataaattaagaaaatttaagaaaggtgtttacttagcaaagtgcttttcgggttgttcaggcctgaccttgggtataggcgagctagacctgtgcctaagacccacctagcccaaaggcctaaaaaataaatttctcttttaaaattatacgttttttaactgatttagaaaatgacacattttttttaaaaaaaaaaagaggaaattacacttactatgggattttaaaagttcttatgataaatatgacacatttaagttt

SEQ ID NO: 120504 - DNA, 751 bp, Cannabis sativa
ggatagagtgaaaagggaaaccctctttggtttttatgattgagctaagaaaattgggcgcgatagagagaggaatttgaatattgagtaagggcaaagaatatcaagtgtagaatgaagggaaaacctctttggttttttatatagttgagctgggctaacaaaatagggcgccagatttgatttttgagtaacggctaggagatactctttatgattgtgctacccagttttattaacactctccatttattaacttttattttcattaaaaaaaaaagaataaataaataaataacttttattttatttataaaaaaatatatttaattatattagtctttatattttttatttaaatttatattcttaaaaattatacataacaaacaaaaataaattatatttaattatatgtaattataaaacttacaattatttttctggtttctcttgtcacgattgcttctgattagtggcggtttcttgaatacactcttgtgttcttcaatagcataaatgtgatcacaagagacagataattctatgtaattgacaaattacgggcctcccttccgctttaggaaactttcttcttggttggtgacttgacaagtttcaagcttcgacgccttataggactactcttattagttattgtgatagaagcatcattttgtgatagatattttgttttatatgagcatttagagtaattgtagagtatcatgtgactgtcttatatcttagt

SEQ ID NO: 120505 - DNA, 945 bp, Cannabis sativa
aataaacaaagtaaaggaaaaaaattaagtgaagattagattggttataatatgttttggctagttgtagtgtatatagttatttatatatataaagtttagaaatgtgtaaaaactcttctagttctaggtctttagtgaatgtcagaatgtgaattaatagaataaaacagtttcatgagttgactaaattgtttaagacttagtataagtaagatactctggttaacttagaaactgaccaaaagaaaagtcacttaagattaaagtaacaaaaggagaagtaagtagtaataaatgtaaatgtgaaagggaatggcttggctccatttttgtgttttggagctgataatctctactggggtgggaccaatcttgtcagaaatttgtttatggggttctctggatttttggttacttgctattttatttatttattttgttgtttttttagagcgggaggttgttttgtttttctcattgttattttcctaaaggaagtttcattaaatgacagaagatgcaaaagagaagaggagaccttttgtttctttcttttgggatagttttgagcccaaatgttattctcttttttctttttcttctctctctttatttatttttcttttgccactgccaatgtgttggcataaattataattgaaagtttgatttagaattattattgattggccttattatcctaatttgttggtctattgaaagagcctcaccttcctttttgtactctctttgtatttagtgtgtgtacattcctttaattgagcactcactagcttacattgattgattttatcatgtcattagactcattaccttctaaattctaatctcctttatgcaaacagtaggagtaggagtgcttcgctgttttatttatttattattattattttgttgtcacattaatattttcagccatta

SEQ ID NO: 120506 - DNA, 1111 bp, Cannabis sativa
atttatttaatctctttgttggtccttgtattgtattacaatagagttgtaatattttaattttcttccattgtaataaaatctctaacactacgtatcataactatactagtgtcggtagtatataataatataaccaacatgtaactatacacatacacacatgcatatacatattttatgctaatcttatctcatttttagattcaagcgtgccggtcgacttaaatagaaaatttacgagctgaacggaggtcctatatgtcacatttatataaatgagtaaataactcaaaattcaaacttaacatactataattctctataataaaaggttctatgttcaaccatgtgatttagataattctccgttatattttctatcgccaccgagttagaatcacaaaaataacatattttacatttaatataaatattcacatataattattattattaataataataataataataattataataattaatatttatagccccactaatccatatctagatcatacagtcattacaatagtagttggcaggacaaaagcaagattaatttaggtatgaaaagattgcttgaaattgtagaaactcaattgtgaaatttttgagaggtttttttttaaaaaaaaaataataataaaaagtaaaaaataataaaataattatgtattgtttcatatttataaaaaaaatgaagaaaataatcaatatcaattatttaatactgataggaacctatcatttaataaattattgtatgctttatgtttaattttttatcaaatattattatacacactacaacaattttgattattaggggcggacctattaccggcggggaaggtccgcccctaataatgaggttattaccgacagatgtgggagtccgccggtattaatccagtttttaaaaaaaataaataaaatactaattatcggtgggcatttagtaataccggcagacatcccgccgctaatattaggtgatatttaagtgcggggaaataaaactgatgtaattcaaaatttattagcggcggaccaataccggcggggtccgccgctattattattagcggcggaccaataccgg

SEQ ID NO: 120507 - DNA, 579 bp, Cannabis sativa
ttaaaattcacctaataataagactttgacatgaaaaattcttttctatattatgtagcataattgcctaagcaagttgtgaactgcccaaccaagtccatgagagcaacactcaagtctctatggtgtaattccatgaaaaacaaaactaaataaataaacttccatgttggccagcatattaggagaggtcaataatatatatcacattggagatagtatgttacgaagtttgaagcactcggatgaatatgtcaaagtcatgtgtaacttctcttccagaaaagaagagaaaatgctgataagaaacaacaattataatttcccaatcaacagtcatacaataacttatatacttaaatttcttgatatgctatcatacaaaggtaaagtcaagatatggtaacaagtacatatatggcatgcttgtgaagtctaaaatgttttccgatcagaaaggcatttaataaccttaagtaaaaatgaataatttcatctaaatgaccaacaataatatgaatgctaaagctagatgaaattattcatatatatatatatatgtatttatataaatatata

SEQ ID NO: 120508 - DNA, 567 bp, Cannabis sativa
attacctggttaactcataatataaatataaaccctaattattaattattaagcttattgggatattacaatataattccatataaatacacatttaactaattaggattcgctaatccacttcataatcttaggatattacaagacgaaaggtccatataagttaatctagatacctccatggggtagtccagaacaggcaaatgaagagacatttgaaagcattcagaaaccatcctacgtggcatcctccagacatagggtcccaccatgtcaaaggtttgtcccctacgtcagacccaaggagtgtgcgcaccttcaaaaggagcatacctttttgtccaacgccatattctctgacatttattgtacaagcttggctgcgcacgacacctgtcaccatcaaaagtgttcccactcgtacggacgatcgttatctcctaatcgacccaaagtcaacatatattgtattttacccagggccggccctgaaaatatatgggcccaagacggattaaattttggggcccttaaaaatatataaaaaaaaaaaataaaaagaaaaaa

SEQ ID NO: 120509 - DNA, 1960 bp, Cannabis sativa
aaataatacattttggtgttgcgaaattcactcgacaacagaaaatcctgggttaattaaggttcgagaggaagcattagcgggtaaagttaaggactttttgattttgagcaacggaatattgctatttaagatgcgggtatgtgttaagaataatgttgagcttagaaaaaagatattggatgaggcccatactacaccttattcattgcacccaagtaccaccaaaatgtatcaagatttgaagcctcattttgggtggtactggatgaagagggatgtagttgaatatgtaactaaatgtttaacctgccagcaaattaaagtagaaaaacaaagactgtcgggcttacttcaaccattgacactttgtgaatggaagtgggaagatattgtgatggacttcgtggttgggttgcctagaaccagaggaatgtatgactcagtatgggtcatagtacaccgtttcatgaagtcatcatagtttttgcctgtgaaaatgacctatgtcatggatcagtatggagagttatatgtgaaggaaatagttcgcctccatgaggttccaaaatccattatttcagacagggatccaaagttcacatatttaggagagtctgcagaaagccatgggtacaaacctaaagtattgtatagccttccatcctcaaacagacggacagtctgaacaaaacatccatagacttgaggatttattacgagcttatatcatggactttgagggttcatagagtgaatacttacctctaattgagttctcctacaacaatagttacaagagtactatagagatggctaccgatgagataatatatgggagaaaatatcattccccaattttattgggacaaaactggagaacgaaagtatctaggccttgaattagttcagaggacaaatgaggcaatagataagatcaatgtttgaatgcttgctttgcaaagtaggcagaaaagttatgcagatctgaagcacaaagacattgcatttcaggtaggaaggcatgttttcctgcgagtttcaccaatgaaaggtattagatgctttggaaaaaggggcaacctaagccctgggttcatagggtctttcaaaatacccgagaaggtcaggcaagtcacatagcggttagccttgccaccaacattatcagatgtgcataatgtatttcatatttcgatgtttaggaaatatgtatcagacccgactcatatcctaagttatgaagccttagaattacagtctagtctatcttatgaagaatagcccgtgaaaatcctagatagaaaggaaaaagttcttcgaaactaaaccatagtgttggtcaaagtgctctagaggaatagtaaggtggaagaagctacctgggagttggagttcgacatgaggactcaatatctaacattattcaggttaaattttgaggacaaaatccttttaacgggggataattgtattagctgtatgatttagatatggaatagtggggctacatatattatttacttaattattaataattatatgtgaatatttatgttaaatgcaatgtatgttatttttgtgattctagcttaatggcgataaaaaatgcaacggagggttatttaagtttcatgggtaaacatagaaccttttattatagagaattatagtatgttaagttcaaattttgagtttaggcgagttatgatattggaccattttgctcctaagccatatattgattatgcattaatccaagggtaattaggtcatttattccgaaggataggtgtcctctcttttagaagacagttggcgctctttggatgaaataataataattatagtttacaagttagaaaatggaatatcaaacctagagtttgttggaaatattttaccaggatctagatttactacaatgtatgtttcattaacatcgtaatatgaattctaa

SEQ ID NO: 120510 - DNA, 739 bp, Cannabis sativa
ttaagtggacatttactaacttagttcctaaatttaaggcaattttgcatctcccaccaacacacacaaagtaaattaaagaatgtaaaaaaatcgacaaaaataccattattaactgtgaggatttaatataattaaaaaattaaaaattcgagaactaatttattaaaataaataaaatttgaagactaacttaataaaatatagtttaagaactgggacacaaataaaactaaaactaacaattgattacttcataaataatcacttgtggctgttagtgagttgatttggagttatcctgtagtggatcaagagttctatcttcaggaatcatttattgatgatgaagatgataatggcataataatgttatcgagtggttgttggatcgaaaatatgtgaaatagaatagcttgaattataaagcattcaaatgacatatctcacaaataattcttaattacaacagtgttaggataatatatgtaaagtgcatactttgattctggcccttgtaattctccctttttttcgttgttcctaattaatcatgataaattatatatagcttgagattaggcgtcttcatcaaaccgttcaaaccgctcgcaccatactgcactgcaaaaaaatacagtttaaaattctttatggtgcggtgtggtttgcggttttgaattattaatatgcggttcaaatcgcactgcaccgtacattataaaaatacctgttttta

SEQ ID NO: 120511 - DNA, 1177 bp, Cannabis sativa
ggtaaaataatttccaacacgtctctcctcccccaaaaaactagctagaactctctcaacaaacatctcagttgtttctgcaggaatacgatctccaaggatagggatgtcccctatgaagcaaagcaacttagctacacaacaatccttgaaagtgtgcatactagtctccataccttcaccacacagctcacaatccttgtttgacaggaaaggcaatcggtacttcacagggatagcctcagacataaagcgccatagattaatcgccattcttgaatgaacattactccgccaaatccacttccacacttccttctgaggctcaagacggttcttttgatctaaacagtaggcactcttcaccgaatacttcccattagcattaactttccagactactcggtcttcatacggataaggaagtctcggaatgtccagaactttgttgcccagctcctctccaaaagtctgaagaacaatctcttcattccaactatggcctaaagacacatctgcaacagatgcaaccgtaaacctcttcttcctaagatcctccattaaaactctaaactcatgttcctccatccatggtatccaaggttgattccaaaaatcgatcgatctcccatcacccaccaaagacatagaacctttgagaatgacatctctgacttccagcaagctattccagaaataggacccattactcttcttcttaaaagcctaaaaggactcccaagcacaatatttactagtcaaacatctaacccaaggttttccttccagacttgccacacaccacgcaagtttcgagagtaaagctcgattcatgtcttcaaaccttctaattccaagcccaccggaagacttaggttgacagagtttgtcccatgctttgaacgccataaacctatctttagtaactcctcccatcaaccaatacttcctaaccaaagcatccaactctcgacaaacccccacaggtagcttatttgttgacatattgtacacaggaattgaagccaccaccgatttgattagagtgagtcttcctgcataggaaagtaacttcattcgccacccttccaaacaccgctccattgaggtcttaagtttgaggtaatcattttccttcctgcacatttgccttatttaaataattgtattaggttaa

SEQ ID NO: 120512 - DNA, 1149 bp, Cannabis sativa
  modified_base (1107)..(1109): a, c, t, g, unknown or other
ctctctctctctctctctatcttgtctgaagatagtcacgtgatatgatcacgagccaccacaagcacaaacgagtcttctctctctcgtccactctttctcgtaacttttttatttttttttttattttgggatttatgtattttttgagatttttgtatttcacagatcgtcagagatctcggggttgtggtttcagcagaagtgtggcccctgatctcaactcttcggggctcttaaggacaaatgaaacttccatcttgagtgcccacctagatgaaggatcatgtgatgaatgaaaggctagaaaatgatatagccaacttttaaaaaccgtggcttataacactataagcgacagtttaaaactgttgcctatagtgtccactataggtaatggttttacactgtcgactatgttgttctccaactatatttaactgtcgcctattctactcagtattcgcggcacttgtacatgcgacggttttatggacagtacgataagaattgcttacctgacagtgtaaaattgtcgggaatttaagattttttaaaagtgtttgttgttagttatgtaaaaaaaacgttatttttgtaataaatattttattgaatattaaaaataatctatctaaaacaatcaattcgatttacttttttgtaggttggattggattagatttgagctatggtataaatttgatctaaaatataaaatctatacttagtgcgaatcgaatgtactactagctagcaaaatagtacatattaaattggatgatcaacatgcatccaagtggatgtttcgttccagtttggtttagtacttctattctagttctcttttcaacagtctaattaagcatctcccaaaggatgaggaagtacgattaatgaagcttgctactcataactagtttgtggcgttgatcttcaaatgggtcttcatgaaacaactaagtactaagtactaagtactaagtagcaagagtgtagtcgttgtccacctaacctaacgcccacctacgacttgtccaggatcccaacacaaaaaccctcaaaatttacaaagggaaatttacatagtatactaacttttgtcannnttttacaaaaatactgccaggtggtattttttactttttt

SEQ ID NO: 120513 - DNA, 1100 bp, Cannabis sativa
  modified_base (59)..(62): a, c, t, g, unknown or other
aaaagatgacaactaatatacattgtcatatgttacatattattagtttattacacatnnnnaatctatatattatattattataaataatataacactgaaaactataaagattgctcattggaatttggaactgcgtaaatcaacatcaaaaaggatacttttccacttttatttttaccatctagggaaaactcttgtgtcagtgatatttacataagtgtgaaaatacaaatcaaaaacaaaaacaaaaaaaaaatagtacataattcctaaaattctttaactgaaaagaaataaaaggaagagaagaaaaatatataacacaatggaaatggaatcatttcatttgttctcaacatttgttttgggcttcttcactatcaacactggacatttcacattctgggcacaatggttgctcacactaccaagaaaagccctgaaaattaatcccccaaaaacattcaatccttttttaaaaaaattcaattattcaaaaataaaaaagaatcaacatccttaatattaatgaattgagttatatatttaacattcaattttttttttaaaaaaatgaacaaaatatttaagaagatgagatttataataatgaccttttaagaataccataaccatggcttcccatgaccaacacgtcagcaccaatcttctccaccacctcgcaaatcacatctctaggatcaccacactctattcttgactctaccttaacctataccacaatccaaactcaatacaaaatttaaaatgatataaagaattgttaataggtaacattagtactcctcttaatctgatattaatattaatattagtgtaattaagtagtaaattttatataattttaaaaaataaataaatattaaaaataatacgtgcgcccaataataatgatcatagagagttttgttaattttattaagaaaaattggacaattaatttaagttaattttattttaataataagattagaaggagttctatttgcaccccataaacttataaatacatttcattattaaaaaaaatataaacttaaataatttttaaaaagtattcttaatatttttttaaa

SEQ ID NO: 120514 - DNA, 2629 bp, Cannabis sativa
tacatgaccataagaaaaaatttgactaaaaaattatttcgggtactaaaacagacaagggtgcatcaatgtatctattttaagggggtgtattgtagaatttcccatatatttatattcaaattttttgaaaatcaaaaaatcacgtgttgcactttatttatttatttatttataaatttactctttttttttttaactgaaacatgtctttttcttctaaaaaaaatatattcatttgtttctcttaattttttttttctttacaaaaaaaaaaggtttccaatttttagctcaaaaagaataccattataacctactctttaagataatcattttaatatgtgggaaatatatatttttttgttattaaaaaaataaaaaataaaaaacatccttttaatttctaatttttatctagttagcgagttttttttttttttttttgacttaatatccaaagagtaactaaatgacttaaacaaagtttattatatcaaccaattcaaaaatgatttcatatacattttgttcactttttttgtttagttacttttaaaattatgtgatcatttttagattaaattatgttgttttattgattatgaaactttcacattacttcttttttagtaaaatttgtgttacatacaaacttatttaaaaaactaatgtgttacaataaactaaaataacttatacaatctattagcaggatttgtaaatatttatgttatcaattgttattttaaaaatatattatggtttcataatattatttatgatatatttttgataactttaagtttattataaaagctgatagttgacatataatataatattataattttattgtagaaactaactagttatttaattaactaaattttaaaaataattttgagttgttaacttaagtaaaaaagtatattaaaagatttattttaagataaaattatcttacatacattttggctactaatttcgagtggttacttttaaatttatgtgtttatttttatattatattattttgttgtttaaaatactttaatgttactttgaaatgagttacaataaaatataaataaaagaactcgcataattttttaataaaatttgtagacatttaaattacttattacttattttaaaattatattattatatgttaatattatttaagatatacataaatttaatattaaaactaattataaagttaagtcataatataatattgaaaaataaatttaagttgttaagtaaaaaaataattataaaacagtaattaatcattatattagtctgataagtaactcgataattttttttttatgttaaaaatataaaaataaagtaaatatatattttccatatcttaatatattattttaaaagattaattatgatgttttttgaggttcaatcaaataataatctacttgagaatgattcttaaagttagaaagaagaaagagaaaaataaaaatagagaataaaatagaaagagagacatttaaatagttagagagaacagatacaaacaaaataataaaaagaaatgaaataaagaaataataaagcaaatatatatttttttatttttattgtataaaatacatgtacatataattaaatgacccaaaagtaattatataaaataaaataaaatggtggccacgtcacgtatcaaacattcctatctaataaaaacgttaataatatttaaaatgaaagtatacattatttttgaaatttagatataaaattaggtgctacatgtaaaaaaatttatttttttttatctattaattaaaaatacctttatattatatttcattgaaatatattcacccttgtgaaaggattgtctaatatactctcactttctacttaagtctagcatatcatttacattaacctaagcgatataataagggcatcatctataaaattggatatatcttaaagaaaattaaatttaaggtaaaaataaaaatatataaaataaaatgggtacataatgtaatttctcattttttactcttgttggacccaatacattgtttctagaaagagttttaactattaattaaagatacattcatattatattttattaaaatatactcactgttgtgagtcatttgcttaatatactctcactcttcacttaagtctagcacataatttatattactctaaggagtacaatgaggacatcatctataaaaattgatatataaaataaaggtaaaaattaaaacaaataaagtgggttaacaatataatttcctctaattactcttgattgactttcttgtgttgaagctggtggatatacaatataatttcctctaattattcttgaccaaatcatttattggtttttattttaggaaattatattttataccaactttactgtatatatttttaatttttacatttattttcatattcttaaagggtctctttggtatgcaagattggactgaaaagaattggcctgacaagattggattatattgttagtaatcctatgtttgatttaagaatatactagactattttatttatttatttttttttagaaaaatttaaattaaaataaaaatatata

SEQ ID NO: 120515 - DNA, 2640 bp, Cannabis sativa
tggtggtgatggctctcatggatgacatgtgaggtatgtgttttattgtctttgatgctctaaataaatactagatcttggctttaatgattatgagtaatcgttattttaacatgattaactagtgaaactattatatgtatatatattagttagtgtataaaatttatacatgcaaaataaattacaatttttttaaaccatctatctattaataagaaatataaatatgtttattttaatgaaaaataaataaatgttttaactaatcatgtagatgaggtagtggttttacatctctcctaacaaagaggaggtcccaagttcgaatcttctctttaccccaataaaaaagaaaaattaatcatgtagatagaaaaatgtacaaacccaattgtaaaaaccatagtttttagtttggcaaactatgtgttagtgtcatctattccatctaagtttgtattttgtgggtttagtttccttactttgccaggtcagcgtgcattcaaagataaaatatctttgccatctatgatgaactggttttttgagtttcagggtcggttagtggagtactaatactatacattcttgatttcaacaaattctaactaactctcattttggtagaaactttgacattgattttgctcttctaaggcaaattattcttcttctctccttctctttgttgttacaagtttctccattaattgtgatcaagctttagggataaagtggtaatggaacctgtttaacctgaagggatttcagatgtgttgatgaaggaagttcaacagaaccgaatcaaggggatcttgacttcgaatctaagtggacatagattgtgatcttgattgatctatgaagatcctagggtaaacttgttgtaaaaatcaatgttgtattgctttacactctataattaatttacaaactggaaattgtaacgtaaccttaattctaattggatgttatttgccctcattctttaggggacccaagaacatagtaacctagaatttgtttctaggggtgaaccttgtcaatgagttgttcatcttgctttattttacgctattaagtataataatcttgcaaaataatatgtagatgacatgagaatataatttaataagatgtatatatattattatacgacgtgtgtacgtattacatacctgagtcaatgaccccaataatcatgttgctggtgacaggcttagccaaaccccattttgattgcattccctcttctaagaaatcccatgaacgtgttgtttgtggttccactatttcatcctcaataactgataccacatcactgtgacctgttctcccattttcaatttttaattttcatcattgttatcagaaaaacattcattatgatggagttgctattttgtatttccaaaagatgaatatatatatatataaataatattaatttattaataaaaactaaattcaaacgatctttgttaaaattaaaagagacaaatacctgataaaagagaagcttcattatcggtaagcatagcagagaatcctctaatcgcatggtggtaatggtggattagagatattctttccttctctttcctgccaaaaatttagtgtatatatattatacgtaatatttaaatttaagtttatatgtagtgtacaacatttaaatattgatgtaaatatataaaataattaaccttgggatgatggaggaaagtaactgcagatgagataattcatcagcaactttagtatcttcattagttacatttggtgatgctgttgatgctcccatatatatcacataatgctgtttattatgaagaatatattttttttggattaaatccccttacaagctcattgaacacgtagacatatatctagactcatctcaatatgagttagttacatctggattgtaactcaactgtcctaaccaacttaaccgacttattcaactaccaaggctactataaatagcagccctcttaactcagattaaatcatcgcagactgagaaggaattgagctccaagagagctagagagagaagttatctcaagagataaaaatagaagggagtttgaaggggagagggaaagtgaggaacaattttgtaaagatagattgaaagagaaagagtgagatcttgaaattaccagttagattgtgacttggaatttcctcaccatattgttttaatttgatattgattataatgcaagagcagacctgttcttatggtgagctcaacggggatgtaactctatgatttagggtgaacctttagaaaatcattgtgtttgttctctttaactttatgcattattgtttttgttctttactgtgatttttatctttgtttaatgtttgaatttctaattctaaccgatttataagaaaattgatcattcaaagttttttcatatcagtttgtgtttaaagatcgaaattcaagtgtgcgtgtgtgaaatctattatgtcatgattatgacttgtttgattgaatctaaaggtcaatgatgaccttgatgtgttgggttttgtgccctaaataaaactaatttcaatataattagatttactaattaataaagattagaaatcgttttatgttgcatggtt

SEQ ID NO: 120516 - DNA, 1270 bp, Cannabis sativa
  modified_base (26)..(33): a, c, t, g, unknown or other
ctctttctctcttcatcttcttcttnnnnnnnntcatctactttatattattttataacatttgtcatttattaaaatttttccaaaatagttttaatcattaattaaccagttgtaatacattaattaatttactataatataggtgtgaaaataatttaattaataccctattattataatgttttcgaaaataccatattttgaagaatattagttaactatctgactaactgttggagaaagtcacttggtgtggactaccaagttattaaactatttaattcaacttagtattttatgtaattgatttcactaaatacaatacacataaaatatatagattaatcctaaataatcatgtttctaatatgtatgattatcaaaaaataaactgtgtgagattttatgtatgacgattaaatatgtatgcactaactattagcaaacaaataatcaaacattaaataaaatgtaaaccgagtaaatattttgtatttataaaattataacatttgaaagaaagaaataaactacactatctctctgcttaagaactcttctttgttgttctttgttgcagctttagaaatttcacaccatcttcttttaccattttctaatattttttgaaattaagatttaaaaataataattttttttatcaattcctaaactatatatatatatcgtaaactatttatcttaacttcataatttaatttactacttatatttctctcttcttttctcttttcttgattgttcttttcttactaagttaaatatgatacaatcttttatttatgtgttatctgatctaatttatatttatatttttcatttactatctcattattattttcaggttttcgaaaaggttattcaaaagaattttttaattgcatgatactatctcacaatttaaattaattttgcttatacaacattcttatttatttatagtctccattatctctattcaagatcatatttttttttataaatttttaatgttatatttgtttttcaagtgaaatactgcaataataatgattttaaagttaatgagttttaaataaatagtgacgagtgagaaataataatagtatcatttttaaaattgatgggttttaaatagatttatcaattatcgattttaaagcccagaatatttagggtgtgtttggaagtaactatgtaattactaggtagggtaattactagggtagtaattacacagtttagtaattacattatattttaaaat

SEQ ID NO: 120517 - DNA, 9197 bp, Cannabis sativa
  modified_base (50)..(66): a, c, t, g, unknown or other
agccaagctcgaagaaaatcattgcttcacttctaaatacttatagaagnnnnnnnnnnnnnnnnnatgattagcgctcccactcaattacactatcatgtttccaagatgtaactgttcagctggccagactttaacgaacaactttaagaacataaataatacaattaaaatggaacctaaccatctcctgattaagatctatagacctaagattaactagtaatatggacttaaatatataaagtttatatccaaatactgagagtctataatgaacatgtgtaatagatttgagggttcctaaaatagcatctccctctgattaagtgttcatacaataacagttatcaaagtattgttgatgtggcaccgtataatatgctatatggaaggaaatatcgttcacccattcattaaaatgaagtcagtgaacggaggaaccttggacctgatgtggtctaaggaacaattgaggccatagaaaatattcgagttcatattttcactttataaagtggatggaagatctatgttcattcaaagtgtagaaatgttaaattccaagttgagaattttatctttcttcatgtgcttccaatgaagggaatttagaaatttaggaaagaaaggaaagttaagtcccaggagtatcagtccgtttgagtttctgggaaggggaggttaggtagcttatcagctagccatacgccctaccttacctagagttcatagcttgtcattcaatgttcagaagtatgaggcagatacgattcgtatactgagtaacgaaaatatggaactttgaataaacttgtcatatgaggaatagtcgattcaagtttatgagcaagcaaagagaaagtactgtgaaacaaagactatatcattagctaaagtggtgtagatgaacagtaagattaaagtcgactataggggtaacgtggatatcatttccaaaataaagtacttttggtttcggcggctgtggaaacttgattgagtggtcaaagatgtcacgacaatatgagatggattatttggaattggaattataccaaactagtttagaattttcaagatgtcggtttagtgggttagttagaaattactaaaataccgctaggccttactttataagtgcttatttggaagggcaatttagtcttttactaagttaaataatgacttttatgggtttatattatggctgagtattgtctaagataagttatatttgtttttaaaaaaatatatttcttttatgttaggaaattaataagattaaaccaaaattaagaagtttatcaagctctttctctctcacctcttttcggtcctagaaggaaaccatggaggacaagttgttcatctcatttcaattgagattcttactaggaattctactctagttgttgtctagattattgaggtaagttcttgatactcttccccttaaatttcttgagttttaggttatcttaggttaggttttactaggaatttcagggctgtggtgttaaattgatcttagattgtgtttataggattgaattggggaatccttgtgcataggttaagtaattgttgtggctgttagaattagagttggaattttggttgaagaacttaattttttgttctaacatggtgttttgcataatttgatgaaaaatggtgaattgatattttggatatgttattttggtgggactatactattctggagcttctgggttgctttggtgaatgtttggattgattttggaggagaagaactcaagatagcaaccctactcagttttcttcaaggccagttttagggctcgaggtgatttctgggtctagtgtagagtgtttagaagttgtaaaacctattttggagtgattagaagttaaggtttgtctggttatgggaattagggttattcttagaatttttaatttaaggtatttattggattttgttgtcgtgacataggagccaggatcgtcaagttttgtttctactcaagtcggcaagtacacctaatttcaagattaaggtaagaaaagttttatgcactgcaaagagataaaaaaaataagcgattataatcgctaatgcctcaattaacatcaaaattaatgatgtgtatttgttgtgactcgactctgatcgaggtgatgatgaggaacgattattatcgtttgtgcctctattttgatcgaggaaatgatgagaaacgattattatcgcttgtgactcgattatgattgagggaaagacacggtcattaccgttatgagtaattactcgttgaaaccactgataggtttcttacttatcgttcactttatcgggcaatgatagttacatacatagctcatggatagcaagtggtaagggtgctttatgaagcactacaattatgtgagtatagggatgtgttattaggatgctttatgaagcattgagaatatgtgattatgtattaaatgaatgtccatttagtgaaatgatgaagttgttgattgtgagttactatgattttcttataatgtttaatgaatgtgtttatatagacattggattatatattcatgctgaatatgtaatgaactatgagtatgtatactatgttgtggtgagaatatttgcatttttaatgcttacaatctagtaacttttattgctgagtcattgtgactcacgggtgcttcgtggtgcaggtaagaaggatagcagttgtgttcggacatgagtctgagttctccttgcgatgtacatatcagtcgtggtgtcttggcttccgagaagcaagatcaaccctttttttctatgtttgaaaatgtaacctgactcttgcaatagcagttttgtgactttttgtaaaagaattttataaataggggatccccgtattatggcagtattttgtatgaaagttttattttaaatttaattatgggttttcaattaaaccacacatttcttaaactaatagattagttagaaataagtttgtgaaagcacacatgtggcgtccctgtgggtgaggacgttagttacaacatggtatcagagcgactaaggtttaaagatcctgaagattggctctatatgtacattggctgcgaagactcgattgactcatggcttagtaagtgctaattgctagttgattaatagactaattgttgattgcttgaattgcctgcttatttgaaatgtgtaagctattagagaagcgtgataagtttgatataaaattgctaagtatgtttatgtatgtgtggtaatgcttattagcattatttctgattgggaagattttaaccatgaaaaagaatggtcgtgattgtactagaaggtgtacttaggttgatctagtaagaataattgtgagcttgctaggctcggagttgatagtgtgggtatgaatcttccactaccacaagactaggagcaaatacatgctatgaaataagagattacttgagtggcaaggtagtagaacttacatgattgatcctgggcagcgcggtgatggaaaatgacactaagctggaccgattggcagagttttattttgaagaagcggctgctaaggccgctaggaaggctaaatccaatcgaaggtggaaagagtatatcgctcaaaatgtggatataatggttaaacaactggaagttgtccagttttatgctcaggtggttgagctaacccttagtgctgaggctgcattgactagatcacaggagaaacagtatgaggaaagattcatgaaagcaaatgttcaatgttggctctggtaaggatgctaaccctaatgatctcaaggaaaaggactaaaaacctaccagttatgggtcctagtgagagagtttaaggtaattaaagtattcaacatgatgaatatttgtaaacccatccagaggattgagatgcaagagacgccaggaaagtgaatgctacacgagagcctgctttcagtatgggctagtagatcatttgagaagagactgtccacagttatagcaaccagaatagaaggatgattgaaagttagtgtaaatttaatgacgtgttatcatgtggttccggtaccttactgtttactgtaaaattggttattttctagtaggtggtttaaatcccttcccgagttatgggggaaaggggatggttagttgttttagttgagctaaatttagaggattttaaggtaatgttggggattggattgacttgtaaagtattatgcaaacatcgattgtgaaggtaaggtggtaactcttgaaccagaaggtgaggacccattcgtgttcttgggcaaggttcaagggacccaaaatccattaatcatggcgtttaaggaagaaggtttattatgggatggatgtatcaaccttttagctagtgtggtgaatattacaacgggaacatcagtgggatcaggacataatcttgtgtccaggggtttctagatgcctttccagaagagccacaagggttattaatgaagcaagaaattgattttgaattgaattgatattgggagtaaaacttgtatctaaaattctgaagattcagttgcaggggatgttgggcttgaaatttctaaattgagtagctcatcctggagtacaccagttttatttgtgaagaagaaagatgaaactttataagtgtgtattgaccattgggagttaaataagttcatggtgaagaataagtatcctttgttaaggatagaagttatgttgatcaattttagggaaggaccgtcttctctaagagtggtcttcgatctggtaattaccagttgaagacttgagagaagggtattcccaaagtagcttttcgtacctggtgactttgtgaatgtcttcattaatggtattctgctttcttccaactcaaagaaggcatttgagaggtatttttggatggtgttgtaatgtcttgggagcctcagcttcatgctaaatacaagaaatgcaaattttttttggccctaagtaagtttcttagagcgtgaggtggatatagatagtatcttgatagattcgacaatgatttaagcagtttagagttggcttcaacccaagtctgcaattgagttagagattttctggaattattaggatgctacagaatatttgttgagggatgtctacgcccttagtggaattaagtcgaaagaattgaaatagaggttgcctattgcaccagtgttaacattgccaatcagtgaggagaaatttctgatttgatatgacacttctaaacaaggattagattgtgttttgatacagtttaggagatttattgcatgcgcaccgagacccttgaaggagtatgagtagtggtatttcagtcatgatattgattcgacagcagttgttttgcactgaaatttgggcgccattacttgtatggtgaaaaatgcaaagtctatacggatcacaagagcctcaagtacttcttcatttggaaggatttaaacataaggcagtgacgatggttggaactggttaaagactataacagtggcattatctaccattctgggaagcaaattgttagtggatgctttaagtcgaagaggtctaggacaagttcgtaaaaagaaaatatttcaccaaagtttgctaaagatataaccaaagcagggattgagttcgtgattggagaacttgttaatatcacattgtagtttgatctattggaaagaattaaaaaatggcccaacagagtgactccgaactacaagagtagaaggaaagacttggaaccggatcggcaaaggactttttgattttgtcggaaggaattttatgatataaaaacagggtttgtgtccagtcagataaggatattgaatagaaggttctaaatgagtttcatattacaccatactttttacactcgagagcaactaagatatattacgatgtttaaaccctctgctaggtatgaagagtgacattgtgaagtatgtgtcaaatgcccgacttgtcaacaagccaggcagagcgttagaaatcagtaggaatattttcaacctttaaagatatttgttgagtgaaaatggaaagaagtaaccatagacttcttagttggattatcaagaacagaagggttctatgatcctatctaggtaattagggatatatatatatataaagttagtacaatttctttatcagtcagattgagatttaaagtttatacccaaatgctaagagtctgtaatgaacatgtgtaatagatttgagggttcctgaaatagcatctccctctgattgaattttcatacaataacagttatcagagtactgttgatgtggcactgtatatgatgctttatggaaggaaatgtcgttaacccattcattggaatgatgtcagtgaacggaggaaccttgacctgatgcggtctaaggaacaagtgaggccatagaaaagattcgagttcatattttcactttataaagtggatggaagagctatgttgattcaaagtgtagaaatgttaaatttcgagttggaaattttatctttcttcaagtgctttcaatgaagggaatttagaaatttaggaaagaaaggaaagttaagttccaggagtatcggtccgtttgagtttctaggaaggggaggttaagtagcttatgagctagccatactccctaccttacctagagttcatagcttgtaattcaatgttcagaagtatgaggcaaatgcgattcatataccgagtaacaaaaatatggaactttgaataaacttgtcatatgaggaatagtcgattcaggtgtatgtgcaagcaaagatgaagtactgggaaacaaagactatatcattagctaaagcgttgtagatgaacagtaagattaaagccgacttggaaattaaagtcacagttgtgggaacgatatctcgaattatttagataaatcttaaggatgaaatttctataaggagggaatagttgtaatatcctaaaaaattattatgacaattaattgtgtatattttattaaacatgtgattaagtgggtatttgagtatgattataatcctacttaagctaattacgagttaattagtgaaatgtgattaaaggaacaaataacgcgtaatttattaattatggagattttgttggactacgggggtaacgtggatatcatttccaaataaagtatttttgggttcggtggccgtggaaacttgacaaagtggtcaaagatgtcatggcaatatgagacggattatttggaattagaattataccagactagtttagaatttttaagttgtcggtttagtgggttagttagaatttaccagagtacccctaggccttattttataagtgtttatttggaagggcaatttagtcttttactaagttaaatattgacttttatggatttacattatggctgagtattatctaagataagttatatttgtttaaaaaaatatatttcttttatgttaggaaattaataagataaaaccaaaattaagaagtttatcaagctctttctctctcacctcttttcggccctagaaggaaaccatggaagacaagtttttcatctcaatttagttcagattttactggaattctactctatttgctgtccagattattgaggtaagttcttgatactcttctccttgaatttcatgagttttaggttagtttaggttaggttttactaggaatttcaggactgtggtgttaaattgaacttagattgtgtttataggatttaattagggaatccttgtgcataggttaagtgattgttgtggatgttagaattagagttggaattttggttgaagaactttattttttgttctaacatggtgttttgcataatttgatgaaaaatggtgaattgatgttttggatatgttattctggtgggattatactgttctggagcttctgtgttgctttggtgaatgtttggatcgattttggaggagaagaactcaagatagcaaccctaccagaatcggtcgatcggtgggttctggtgcaacagaaccgatcgactggttttcctgcaggggagaatttttagtttttttcaaggctggtttttgggctcggggtgatttccgagtctagtgtagattgtttagaagttgtaaaacctattttagagttattagaagttgagatttctccggttatgggaattagggttattcccaaaatttttgatttaaggtttttattggatcttgttgtcgtgacataggacccaggatcatcaagctttgtttccactccggtcggttcgtatacctaatttcaggattgaaataagaaaagttttatgcactgctaagtgattaaataagaaccgattataaacgctaatgcctcaattaagatcgaaattaatgatgtgtatttgttgtgactcgatcgtgatcgaggtgatgatgagggacgattattatcgtttttgcctcgattatgattgaggtaatgatgagaaatgattattatcgcttgtgactactactacaaaagtcagaattcgcgacggtcctaaaaatgtttttttggggggaccatcgctaaaaaaatgaattgtttaaaaccgtcgggaaaaattaatattcccgacggtttataacaataattacaggaataggcgacgattttaattagaattcgtaaaatttgctggcccttataggcgacgatttaaactgttgcctatagtataggtgacggttttcaacagtcaggtataatagcccaataaaaaatcgttacctacttctcgccacatttcccacgtgcccacctacttcttttctatttcctacatgcccacctatttcttctaacatatttattctttatttcccataccctaaaacgaaaatcttaactctccaaaaccccacacacgcatccgtaccctcgccctcctctctcgctgtcttcatccctctctcgatctccctttcttctcgtttctcttatccaacgatctccacccacccctcctcccgtcggtctccctctcctctttgtcgcatacattagaccaccaccacctcctgacggtgtccctctcatctccgtctcgtatgtcggaccaccaccacctctcgtctgtctccctctctctttctctctctgagctcggtataaatacattt

SEQ ID NO: 120518 - DNA, 1617 bp, Cannabis sativa
  modified_base (30)..(30): a, c, t, g, unknown or other
ttttttaaaaaaaatactgtgtaagttttntactgtgtactgtgttaagttttcaaagttattccacaattatcttttagttgttccactgttattttaattgttctgttttgttaatttacggttgtttcataaaaagacagtatttttgtaaaaaaattcgtgtgacagtgaaattgtaaatttttgcctaaaattcagtatttttgtaaaaactccttttgttattttgaaagttaattaattgtcatataatataatataattcaattaataaaattataaaatgaatgttaactaaaattttaaaaaatttataaaacagtaactaatcactatatcagtaactaaatagtttcttttctaaaaataacggaaaaaaaatatgtttctctcatcttgaaatacacattgaattgaagagtagatcacaattgtattttttttaggatcaaccgagtaatgacgtgaacaaaaagagaaaaaaagaagaaagagttaaagataaaaagagagagtgaaagtttgctaaatattaggcaaacataaaaaaagttaaaaaaaagaaggcaaatgcataattctaaattagatccaattaaaattgttagatgtcaaatgcccaaaatattaggacctcttacatttgacactttttaatttacatctaatttacaaaaataactttgtcatctaatttactttttctgttaacttttaataatatgttttcttttgtttcactttcaatcaataatgtttttttttttttttcaaacttctcttttttatatatctatatatattttctcttccctctttctctaatttctctctaatattaaaaataatatctggccacattgttatttggttgagcttaaaaaaaatctttatgatctattattcaatgtgaatatttcaagatgtggtttccctatttctagaaaaaatcatttgattagtcatatagtagtaattagttactgttttataattttttgatcttatttaacataataaaaacattacaaacttaaacatacatttaaaaattaatattaaacacatcaaacacattaaacacaaaagtaataacatagatttgaaccttcagagataaaatgagatacaacaattcaataatgcatgtggaagatcatttcctgatccgccgagatagtcataatacagactataaacttgtgagtcattttcagctctttcaccttgatcttgagatcgttgatcttcatcttcaatgccatgtcccgaatattaagatgctcgatattgttacccctcatattgtgttatctgatattgagatccctgatatggatatctctgatattgagatccttctcattgctctccaactttggatgtttgtgccctttctttataaattcgtcttttttcgctttgaatgtatgtacttatgaaactcgagttatcaggcttgcaaaaagtaacagctatattttgaatgctagcatacggcatgccgatagatgttgctataattttaaacactacgcaagtatacgcaatcaagtagtaaatctcacacaggtgaggtcgatcccacagggaattggattaagtaccactaaa

SEQ ID NO: 120519 - DNA, 825 bp, Cannabis sativa
taaaaatataaattttatattaaattaaaattattaaaatggggtgcttttaaaaatttttggggtgtaaataaaatttgccttttttgagtttgatgagtaatctttttataataccaaaattgtcctccattttaatcaataaattatttttatttattttccatattttgaaaaagaaaaagaaaacagaacacactaaaagaaaacgttttattacgtagaagaaaaatgaatcgaaacctgctcagaacttttttcatccctgttgtgcttagccttgtggttaaaaaactttttgccgggcgagagacaattcttaagttatatttcaacaaacccaaaatagttaagatactatattctattataaatgactcacttaaagatatttaattaactaatatttactagagaaaattacacaagattataacacttttaagtttgaccaatttatttgatattttttttaattttaggtatttttatagtatttgatatgtgatatatatattctttcaaaaaaaaaaaaaaaagatatgtgatatatatatatatatatttatataaattaggttttcaaatcccatatttaatatttttatttgtttatgcagttttattagtcactcatgctgaaaaaatcatcagagtttgctgtcggtgctggaaaaaacacaggagtagctgtcggtactgaaaaagttgtcggaattgccgttattaccggaaaatcaccagaaaaattaccaagaaactggtttcttgataaagaaacactagtttcttgatgaagaaacactagtttcttgatgaagaaac

SEQ ID NO: 120520 - DNA, 788 bp, Cannabis sativa
aagtaaacataagatagttttaccaccaaaaaataacataagggggttaagtgtctacaaatataaacataaaggggtttgaccgcaaatttctcaaaaataaaatatattttgggccttgacttgacttacgtgggcgatgtccgtacgatgatctatgagtaccactttggccctacaagttgctttgttgccactatattctctcctatatgactacgtggcaatattcaattggctagaaagagaattggctttgtagaaagaaaaattctttgatacgagaaatagtattgccattggccattagtgatgtctaatatttttttatatacttccatggttatttaaagatattctttgcaaattatttttttaaattatatgagactcaatacttaattacagtaatagtgatatgataccgagaagaatattaagcactaatgatattttttagcaattctcgtatgaaaaatgaggtcacaaattttattggtgctttctaatatcctcaccaccacattttaataaataaatatcgaaaatattaattaatttcataatattttaaggtactaaattagaaacatgtatacataaatttgatacatttatgtagtatttaaattcaaccaattattttaatttaaaatgagttccatctattaaagaaattgaaatttgattcacacttatatacactggcggacctaatgaaagaccaatgtgggcttaagtccatgctgaaaaaaaaatatttcttttacttcttaactatttttttt

SEQ ID NO: 120521 - DNA, 1863 bp, Cannabis sativa
agagtgatagttatagaagaaactagccaatatgtccactgctatgtgaagttggctagtcacacggaggctttttgtgtgacgtttatgtatgggatgaatggtttagaagagcggaagttgttatggaagggcctagctaatttgaggttcccggttaggacttggattctcttagttgactttaactccttagttaattttggggatagagttggaggtaaaccggtttcaatggttgagattgaggattttaatgattggttaagtttgggcatggtggactctctgaagaggcagggatctttcttcacttggtctaataatcaaggaagtaaggatagaatctattcgaggatagatcatgcttttaagaacaaggaatggttggatttgtttcctaattcttcagcttctttcagttgggaagaggtctcggatcactgcgttattgtcataacctcggctgttatggtggagataggggtgaagccgtttaggctctttaactaatggacagagcatagaaagtttaaaaatctggtcttggagagctgacaaaaatcagttttctcttctggtttactagggctctggtttaaattgtctcggctgaagcatgttttaaagacatttaatcattccaggttgggcaatgtggagttggaatttcagaaggcaaaagacaagtttctcgaagccagatttcaagctcaaagcaaccctggagttgaaattatggaggaaaaagatgttgctgatagttttcatcttcatgaaaaaaatgctgaaaagtttccttgtccaaaggagtaaggtaacctggctaaaccaaggagatggtaacactgcttatttttatgcttgtatcaagaaaagtagggaagagaatacgatagctagctttgttgatctccatggaaatattgttgataactatcctgatgtagtgaggcattatatagatcattttaaaagctacatgggcagctatagctcggttactagaaggcttgacactgattgttttgagaatggcaaccgattgacattaaaccagcagctcagattaattcaatctttttctaacaaggagatcaaggaagctttgttcagcatccctagttcaaagagtccaggccctgatggctacaactctgaattttttaaggctatatggacagatataggagctgaagtgtgctttgcgattaaagaattctttaatacaggtaagattccggttcaatttaatgaaacggttatctccctcattccaaaggtggaaaacccaatgagagccatagactataaacctatagcttgttgctctactttatacaaatgcgtcacaaagctcatgagtaaaagacttgcttaagttcttccttggctagttcaccaaaaccagggagcctttataaagaagagatctatagctcataatatcttgattttttaggatctgataaagaattatgggaggaagaatgtctctccgaggtgtgctatcaaaattgacctcagtaaagcctatgatactgtggattggggctttgttgaggatttactagttggcttaaactttccttccaagtttgttgattggattatgaagtgtctgaggggtacttcctatacgatcatgctgaatggaaggttccatggtaactttcaggggaaaaaagggcttcgacaaggggatccgatgtcacctttcttatttgttcttataatggaatacctctcgtgacggttgaagaaggaagcaactgagaagtctttcaaatttcatcctatgtgtaaaagccttaagttgattagcttatgctttgcagatgatcttattctgttcagcaaagg

SEQ ID NO: 120522 - DNA, 3560 bp, Cannabis sativa
ttcgatgtgaggctgaccaggcgtttcttcagttttcagctaattaatgctctgacttaattagttcctcgaaacccagtttttctcatcatgttttgacggatacacttgattaaatttgatttcccaatatttgctttttggagggaatcaaagtgtctaaaggaattttgaaattattacctttttcaccacatttcctataaataaggctaagtcttcctcttaactttacttttaccgatttctccgctaaagaaactcagagcaaaaaagatttttacttcaagtctgtcgtgagattcccaccaaaagcatccgagcagcttcttctgcactgaacttaggcgtcaaatagcgagtaagtttttttttgaatctctttctctttttactttgcatgtttaatttcagggtttcatacatgcgttctcaacttgttgtagaagatagatagaaaatctaggcttaaaactttgtgattttctctgtaatagtctgtacaatttcacagtttacggcatttgcatttaatcacacattgttcgtctttcaccttgctcatttgaagtttcgtgaaattttaaccctaaacccaaaaatttcaaacttctgggttttgacttgtttttgtacattttaatcactttaatctaatgagtactccaggttggcatatttgcctgtttattgttcgatatcccagccaaacattcatctcgtgtgttgtctttttagatgaaccctggtgagttttggggaagcgaacacctgattgaccggatcgactagggtacggccacttcatttgggaattgaagaaaggttggaggtgttatctcctgtccaactagacatatattgtctggccaggtgttgctgacactcttcctgttggccgtccaagttcggctaacttcgacatcccaattgatattcttgctgttacggttgcccgacagtctcaccagtgtccgtccagaaggaggatgatggcccgaacaaagcaaacaatgcggaaggtcaacgcatctaatcctcatgttacccaactcgccgcattaccaagtgtcgaacaagatctgcccgtcatggaggagggagatcacgagggggacattgaggtccaagaaattgaggagcaggacggcatgcgccctagcagcccttccaaagccaaggaggaagaattggctgaacttccaaacttttgagggtataatgaggccggggagccagtgtgtgtggaggatgaagtcttggttgaaggggaagactatgtcactgaggagctcactaatgcagttcctcacaggaggcaaggtgccttaggtgccagatgggtgagtcctccgtccaagattagcgagggacgcatgagggcctttgacaaggttggatatctgggcggacttgagtgttatgtcccttctccaaatcatcgagccacgaacccgcaaagagggatgtgtgcttggtcggttgcccatattaagcaaggggcaatgttgcccttgcactcgtacttcaagaaggtggcagattatttttgcctttgtctaacctagtttactcccaggggcattaactatttgtctgtcctatttatcgtttgcgccattcagaaatggggtgtgccgtctccgcatgaggtcagttggttctttgacctgaagtctggtcccaagcaaagcaggtcggggtacttctactgctcttagccagatttcaagtggttgacaagcactgtggacaagatcgttggcaagctcgggggttttgttgacgagtattatttcgtggaaggtatggacaccacttatactcggtttcaacagatcccaatatattatcgtccaccctttacactagctcttagggataaagatcagaggattgtccaactgccgaatgttgctcaaaatatcactctgttgacctcggaggccaactttgtggagtacgggctttatccagtagattttatacctcaacctgtgaaggggaggaagaaaaagtccactgcttgctgggctgagggagccgagcaagaagaggagctcattcaactgatgcctgagacttagttaaagggtgatgcaggagcaaagcagtatgctcaggaatattctgagcaagagaaggagcttattcaacttaagcatgaggctaagttgaagggaggagctggagccaaacaatatcctcaagaatattttgagcaggaggatgaggcccaggaatattcagagcaagagaggttgttcaaaaggaagaaaaccctcccgaccgggcaaaggcccatcgagcatacaatccagatcaaagagcttggtctacctgctcagccatccacccctgtagaaggaaaggggaaagtcatcctggaggagcaagaagattcgtcagatgacgatgccccatccgtgcttgttcgggcaaatgctcctgccagcgtgcagctcggatccactcttcgcctgtttaagcttatccaaattacctcctcgggaatctttggacttagtgacttttgaggcaggagggtccacgacagtttgttcttcaaggaggtcaatgaccacttcaactggtgccttctctctggacagggtctcaccgcctttggacttcttggccggaggggacaaggtcgagcttcccccactctcttcttaggcgcctcaatcattttctgagacatttctacacgaaatataaatagaatagtcagaaaaaagcataagaaatatgaaggcatgataatcaagaaagttaaatgcaagatggagtaggtctgaacaggctaaggcccctgccacacctctagtactgcactaggagaccaaaagagggagagatatgctcactcactatgtgagttagtcggtctctgacgtgaacgagcagctagcttgggcggacaatgacctatctctcgagttggttatgggaggagtcctgaaagagctttcgagggtaagtctttcttgacattttccttttgttcttctttaactacttttgattttaatgtctttttttctgcatagagtggtttgaagatggcctatgcatattcccgagctaagtcagttgctgctaagaaccttgccatttccaacacaatgcgaacagaagtggacttggccaagaaggacgccgaggaagcccgggttcatcttggggttgcgcagatagagctaggagaagtcaataagaagatccttgccgttgagaccaaagtggcagaactgaccaaggatctgcaggacatgccatccatcgaacaactcgaggctgatattgcttctttatctcgggaagtgaccagtctccgagacgaaagagaaggcctctggactcttcttcgtaggttggaggattaaaagaaagctaaggaggaggagcttggggccgaggttgagaaagggaagttagaggttgagaaactgatgtccaaagtggcgaggctcgggggaaaagtgaatgccctagagacagctggtctcgagatttttttatgacttttggaaggccaatcccaaggcaaactttga

SEQ ID NO: 120523 - DNA, 2216 bp, Cannabis sativa
  modified_base (352)..(354): a, c, t, g, unknown or other
  modified_base (920)..(927): a, c, t, g, unknown or other
taatactaaggatggaaaataaatttttatttagatctatccaggtttgtatataattttttaaatattaaatttaaatttatctaaattagtaattttaattaaattaatattaaaataaatagattaaaatacatatcaaatgaaaatacattcttttaaataatgagctttagtataaagatattcgatctccaatgttggtcttacatggttaatatttcaataggaccttgagacgttagacttcgttcctcatatggacggtcttacattgaaaatttaacaccgtaaagatctcgaaagataagtattttataagtttttttctgtattagactctcccctacgnnnactacttagagataaatttacaagtatgaaacaatagtagaaactcataaaataagaataaccttgactctcgcctaccagaacaacgttagattcttattttgattgaataaaaggatgctaaaatagtgtccattttaaatgagctgactactctattcaactaatgaaatccttgactctcgcctaccgggacactgtatcagctagttagaaactttagaaattatttagatgtgtttgtattatattttcacatgtctttattacgtactaaatgtatgataatttcttaattgtgtatgaatttatattcaaccttcattttgttttttgttattaattatcgtagttataaatttcgagtcttcattgttggtctaacttaatttgttattttaatgggacaaattccaaaagattgtcatccattagaaaacataataatgttagatctcaatagataaatatttgtaaatgtaaaatctagttgactcatccaaagatgacaacttagactagtgtttacaataagaaatattgaagaagtttataaaataagaatnnnnnnnnctctcgcctaccgggacatcgttagattcttattttactcgaaattatcatttatttttatctcttagcattttcattaagaaattactaagatagtatatcattggatagacggtttataaatcatatgcctatgatgccattcaattttctcctatgaaattgaaaggcgcaaatgactatattccaaatactctatcccaaaatgatacaaatcctggatatcaaaaaatctcctacttgtatatgcttactaaagacaacttacatttagagttagattagtagtggtggtccacgctagaataaaactcaagatacatttagtataaatttaagtctatgactttaaattttagattccaaatagaaattctaaattttttttctaagaatacattaaacactacactataacgttcacaagttgttaatatctattttctatcaatggatccgaactttatgttaatgtatgtgttaaccccaaaaatcgacagatttgattttcaagataagtcgacaattagtcccagcaatcaagagacatcaactgtaggagtcgttcgaagattgattgagtcaatgaatatggcctaaagattgttaatctcgaaaatccatgcttgcaagtctcagggtatatccgtccaactcaaaggtcaactctgtaacaactcatgagtagagttaattaactaactaagttacaattgtaagaggatttttgtagtgacatgttcagaattggatctttttgtacaaataagattcaaagatctctttctcatctttccaacgcatcctgaatcgtataattttgatatatatcgagagcgttatggccaaaatactaagactgttgaattgtgaaaacttggtatgcgagcccatagctattgtgcgagcccatggcctgttgtgggaccctaaggctattgtacgagcccatgggatgttgtacgagcccatggtccattgggtgagctaggggcatttgggtgagtcgtggaacccttatgtaaatggtagagcatccgttcaacccgcggtggagcacccgtgctatttgatgtttagtcccttagtgatccaatgacaagagtgcgggtgaaataaggagaggttatatatgttgggctttatgccctaaataaaaaacttttttaatgtaatgtctattagttaaatatcaataaagagacagaagtatttttatcacttatttaagttatcatttatatgtttatttgatttataaatttatctaaacccttatcacatttata

SEQ ID NO: 120524 - DNA, 1606 bp, Cannabis sativa
  modified_base (565)..(565): a, c, t, g, unknown or other
ctctctctctctctctcctaaaaccactcccaccataaccacatttctctcttcccaaaaaccacttctctctctacaataacttccactctcccataaccaccaccaccaccataatcgatggaggacgatcgagatctgtgtggataacgactgagatctcgattttgtggggtcaattcgccattgaagccgagaagaaaggcaaaggaacccaacctatattcgactttttccagttcagatctgaccggacttaagccagatctgaacgcatctcttaaattcgataacggcatgcaagaagaagaaaagatggtgagagaatctgagtaagatgaataagacgaagaagaagaaagagagagaaagagagaagttgatcggggatagcatgagttgtgtccggtggggttccatcggtggcgacgtctggttgcagagctcaccgtggcaaaaagagagggaggcagagagatgaaatcgtcttgggttttttaaccctatttattatatagatgtttgattattaaattttaaattatattttttatatatatttttntttttaatgaaatcaacttaaaatgctagctaaaatggattagatccattcaatctaatctaaaagacaatcagttaatgcatctaatagttgaaaccaatctaatttaatacatctactagatcagatcggattagaatgaatcaattagattggattggatcgaaagacaaaatccaatatcagtatctaataaataattaaaatagatcggttaggtctaaaattcattgaatgtgattcaataaacacccgtaaatacatatatgtggttaagaaaattattatttttatatgttttggaatctaataattaataaacataaaagaatatagaggcagcactaaacaaaaactataaaggtgcgcggtgtgcattttactttaactgggtcaactttaaagctataatatatcttaatttaaatgaaagcatgcacttaattactttaataatactcaaattaaacatctcatatatgtgcaccatcattgggttttgtaagaatcgtatatgtctttctttaattcccattaaattaaatttggtatggatattcgaacacgccattgcaacttataattaatttgtaaatatttgtccaagttgaaagtacattgctataaagtataaatagtgtctagcatcatcaaagataatactttgagattaaataataatatttcataaaaattaatatattaaattacataagattcgatatttaattgtactaataataatataatacaataaaaggtattacatttctaagttggaattttttttttaatacatagttaaaaaaccttaaaactccattgatcgtcccaaaatatatatgttatattttcaaattttgtatttcggcccaatacttattttgatcacacatttttaaaattttacttttattacaattatgatgctaggcatatttataaaagggattatttcacaaaaacataaaaataacaaaaaaattacaaaaatacagtttcgcggaattttaaatatttttacgatttttttattttatt

SEQ ID NO: 120525 - DNA, 643 bp, Cannabis sativa
ttttcattatttatttgctactaattaatgttttttatattaacatttttcaaaacattttatttatttaatgatttttatatatatactgtcgaatttctaagttgatgcattaaagtataatataataactagattaaatatagtgtttgtttattattaaatatagatgatcttatctctccattttggtagacaattattttttgttgtgagttgtgacccaacttaaattcttctctccaattttcctttctctatttcatcatatagttacttatttttattaactttgagaaattaatgaacctttttaagcatagtgtgtactaatatggtctcaactctcaactgtgtaaattttagaaaagtgctataattttcattaatttacagtggtttggtggttaggtacggactatggagttcttccacttcaagggttcgattcccacttgaatttagctgtgaggattatttatttattgtcatctgaaattcaggatgaaaatatttatctgagctattattaatttttttctaatgataaattaaatggtttggttaatatatatatatatatataaaattgatattgtaactgttttttttcaaaattaaactaaataaatatttctttttt

SEQ ID NO: 120526 - DNA, 1289 bp, Cannabis sativa
cttcggtgtacattcataacaatgtcttgtggggacctccattgaacaattcatgtgttggagatgagtctccaaattgtcttcaagatcatttaggtagtgttgaagatagtgaagattggattgacatgtcatggcttcacaagggaatttgggttggatttgtaattggatttgttggagtttgtggtaatttattactcaacacttcttggagactcaaccattttgattgcatggaaaatattggagattggatttatgtgactatttctgtcaacataaatttactgaagagaaggttcattaacaattagaaggtaatgaagtactatagcttttgatgtatatatacatatattagttgcacatgcatgtcttcatatttgttaattaattttgtttccttgttttgtttcttagaatattaatacaaatataattaaggtggagagttcgttgctttcaagcttgaagattttgcaattggaaacagtaataaaggagactccaaaatcatcatcatcttttatttatttgtgtttgtaatattacaaaaaagattctctgtttgataatttgcttgtgagtgaataattttgatttctaattgttgtacttttatcctctctactttatgaaattacatatacaataatttccaaaacttataaaatatatatgttttcaatatttagttgcattgattaatataatatgcttgacaaaattaattatctctttttactctaaaaaatgtattaaattatgtcatgcaatttcaaattgttctatcagtgttatctctttctgatcgtcttggcttctaaggtatgtactatttttcctctaatattaacttttgttgagtatttaattcatgcataacaaaaatgtaattctaattcagaacttttagctttcttcaaattttgttagattttgtaaactttgttatattaaattaatgcatttcttattttactaatttatttagtttacaagtaaatcttatataattaattaagcacaacaatattattactaataggtgtgaaacacaggaaattcttttcataagtatcacaagtgaaatatcaacttcgaagggggtgcgactagctaccttgcgaaagcctcgatataacaagcaacctcatctcgaaactaagccattgcacaagaaccttctcgagggacatcttgcatagtgtggtgtgctgcaccatggcacactcacaatggagccattttgtaacatgagcatgctttggtgcttgatcattagt

SEQ ID NO: 120527 - DNA, 1362 bp, Cannabis sativa
tattgttggaattgttgtagcttaatctaccgtacgacgcattatttttgtgattattgttatttgatttgatcatcattctcttcatcgttgtaatacgcagtgtggagaaaatattttctcgagaaaatgtggttatagtagtaactaataattttctgccgacacaaacaggaggagaggggttaactgattttttgggttgtatacaagagtgatgatttgtagtaaaattacggaccaatgggaagcttgacacgtgttggatgctgtgacgtagtgtggagtaacagctaagcgcaatgagagaaagagatagtttgccgacaatatgtgacaactgagtgtaagattttgtttgcttagggtgtaatgttgctgtgttagttaaaaaaaggaagaaattagggattaacaaacactttgtagtgtgatttaatcaaaagtgattaataagtaaagatgacattaattcaataaataaattgttataagactaattacaaaatggaagacaagcatgtatctcgagacaatagatctcctaatatatgttgcaactgcataaattatagggacgtcaaaaatatttatttaattggatcgggttggagctctgatctgacggatcacttctcatctgaaatattcggagacttattagatctcggatcagatttgctctggcccgtctaattattttctggatcaaatttgatccgatctggtttcaatatattaaaaaaacttaattcaagactcagactcggacccaacccacccggaacccaaacctgaacctaggacataggacttggacccggactcgaacccgaacccaaacccagacccgaacctggacacccagacccaaaccaggacctgaacccaggactcaaacctagacctgagtttcgggacccagacctggactcgagttctgggacccagacccgaactcgagactaaacctgggacctgggacctggaccgaaggctcacactcaggacctggactcggaacctagacccgggacccaggaccccgaaccccggactcgaacctgacccgtaattggtgttgaggtcgagtttattgataatatattataattttacataatctattaatacaagtcaatatcaaaacatattattgtattaaataatactaatacaaaattaaaatagatataaaataaaaaaatagttcagatcaaatccgatccgaataagccgggtcggatctaatccgatccgagtatataatctaacggagcgggacagaacgaatcattacatgatctgaatcaggtcggatcataggcagatcatatctgacccgatccatttacactctta

SEQ ID NO: 120528 - DNA, 888 bp, Cannabis sativa
ctttggttatcctttttttgcaccatgacgtggaaataagctggatgacacatgtcctgcattttcctatctgggcagaaagaagtactcctagtagcccttgaaggttgatataaatgtcagtcataacaggatgtctaagctgagtaatcaaaagacatcagaccaaagtacaatctcatgatcaacccatatgcattgagcaggatatatgatttggcgatttaagagataagtctcatcgcttccaagacacaaagataatccctatatttgtggaattaagtcaaagaataaaggaaatacgccttggtgtcccatcccttgcattgtattatagaattaatctagtttcctattttatttattatagaataagggaaaccattcttcatgtaataagctcctataaaatagtggcataatctcactattgaggggagacaaaatttagtttagaagaacactcaagagagagaattactcgtagatcaattgtaagagctttagagaggaagaacacgtcatcatttttctcaagtcaatacaacaaaaaagggagtaggctattaccatcctcatggggccgaacctctataaaacctggtgttctttttatcttaatatttttgctttctattaattaattactttatcttgactccctattgtttgttggctagaagtgaggtcaacattttggtgctctcattgagaggaagaacacaagcttttgtcttaaagtcttgacaggttcataggatggttgtacaaacgtgaaggggaggcctgactgatcaaggaaattcaatggtgatagatccaaacgtgcaaactcttagaagcacaagaggacgaccagggacaaaccccgaacaaattaataca

SEQ ID NO: 120529 - DNA, 1032 bp, Cannabis sativa
  modified_base (666)..(686): a, c, t, g, unknown or other
ttggtggtgtcattcaagaatgtacagctatgttggctaatttatgtaatgttttattttattttgttaagcggtcagctaataaagtcggttatgagtttgcaagagcgtctttattttaccgtgattgtactttcagtttggaaaatattcctaatgagttgttacctaccttggtgactgaatttaaagattaataaaatttgattttcctttaaaagaaataataattattataaaatattgttaatcatgccacacctaaaagtgttaggcaccataattggtacttaataatagtactcttatttatacacaaagaaatacaagaaaatagaacaatgaagaacaataaaagaagaagtaaattacagtcaaaaagaataaccaaccaacaattaagtcacaacttaaccctagtaaaaactaattaattagattctgagatgtattctctaattaactaaagtcgacatttccatcttttattttaacttcacttattttagtcagaggacataaaaagtaattaaactctaacaattaattggtagaataccaaatagcttaataaatgtggtatttatcttatttatgaggctgtccatcaaacccatttaatttcttctacctgatgccactccacataataataataataataannnnnnnnnnnnnnnnnnnnntaataataataataatactttataagttaataatataaatattacgtgttatgtgattttgtttaaaaaaaaatgtgtgtgtatttgttctatattattcttgtgtgagtaatttataatgtgtttgtctcatattgatcatgtgttagtaaattatgatgtttaaagaacttataaaccttaaacctatgataatattttggtaatattggacaaatgctatatttagtatgattttatgaaatatatatatatattttgttataaaataatataaagtagatgagaggaaagaagaagaagatgaagagagaaagagaaagtgaatgagaatttctgagttgtt

SEQ ID NO: 120530 - DNA, 1876 bp, Cannabis sativa
  modified_base (1840)..(1840): a, c, t, g, unknown or other
aattagaggcttcattaaaaactcttgcgaaaccctcaatgaagagtcccttatcgtccctgacaactactccgactcccgaccaagtctcttcctcgaacaacgttgcatctacattaatcttaacactattaaaaggtggacatattcaatgttcagctccatcacccgcacccgcttggaaactaggccatgatatctcaatttgagaattttgagagtttctccattggtgaagatggttttttactcaatgtttagtgttgtgctccaatgtaaaattgtgaaagttcctcatcaatttttttttttttttttgtaaaagttgatgcaaaaatcaattttttttttattaatgtttatttattaatttttctttatattagctcgtggaacttaatatgggacatagatattggtatatttatatataaaaaaaagtgtcaaattaaaataggggtgtaaatataaatggaaaattatatttggtatggctttttagaaaaattagtattttttatggtaaaaaatattaactacaaatatgctctacttttttttgttaaagctatctaccaatatgtaatggatttataaatttgtaaaagttctctacaaatttgtatttttgtaaataggtttatgtatttttcagaatttgtgcatttatgatataatacccctaaaaaaattaaatctaaaacttagcccaaaacatttctggtccagttttctcttggatctgttttgtgaataagaaatgggcttacattggaaatggctactataataacactaaaccttgtgataaaagcccaattaattaaaagtttattagtgtttgcaaatatactcataccccatggttgtaaatgtaattgttttggttgggaaactcagagatctatttataaataacattattatcttattgttcaaagatacaaaaagttcttaaccacctcctaactacaaaaatatggtgtcataacaattttataggttttgctacctttgcaaaatgccttaaaatatggtagttttagaaatagattagaaaatattgatattgtataatataaaattataacattatttgaacacagaaaattaattatactagaatattatgttttagaagattttataaatataattgatacaaaaatgttattgcactagttataaatacttgaaattgaaaatgaagactcaatataatttgtaaagaagatgaatagtgaaaactgaatctcttgtttattagttattacattgagcaatgaactcaatatgtacataatacaagagtgagacctttcactaatctataaccgaaagtagttaaagataataactgaaaacaaaaatccaaactaactttaaccgtaataactaactacacacgtaccggagtccgctcaaaattaccagagtttaagaattagattacaaagtttttctccaataaaactaaagactcacaacaacatcaaaattaaataatcttggatcattaatacaatcatttttatctcaaaaaatagatacacaaagaaaaaatttgagtctcaccaagtgagtattgtagaagagcatattagagatgacaatcgctaaattagaatatgttgattagtagagcactttacaataatttaccactcaaactttgagctaaaataaataaaaatcaaccactatcttcaatacaaagtaacaaaacccctttctcattgttttttgatacaaaagtgtaattacactagtaacacacacttaaaatgaaaaatgaagaacccattacacataaataaataatatatatatctttatatantaaaagtgtctatctaacggcatttcttggtttaac

SEQ ID NO: 120531 - DNA, 1137 bp, Cannabis sativa
tttgttatatgtatgtaattttttattattattttgatgttgtttgaatgttattttcttgttacttttacgtaatttttttgttgttttcgtgttgcttatataaaaaactgtaaatatgtaaaaaaaaaatcttaaaacgtgaaaatatatttttttacaaaaagttatgttttatgtaattatctattttaattatgttaatgatatatcattatttattaatattagtacaatattcacatgtttaactactaattagggcctcacatactaaggccccgtttggtattagttgatgaaaacccattctcattgaaattggtataaaccaaagtgaaagttacaaaatgtcatatatatatatgggcccaaactaaagagaccaaccacaaatacaagcgtgtaaagaaacagcagaagctaaacagaaaatgcagagcagttttagagtgcatggtggtatgagccaagctcaatgaaagcttaacccaaagcaattgagctgatcttctatttatagcagaaatgtttgacaagaaagtaaaaacaagaaaaatgttagagctcacttaggccaaattaactaacaaagctaattagtttgtcggtttatatttctctcaaacgaaaagaggttgtaaccattttgagtttggacttgaaataagagaacctatcagtggacagagacttaataaggacatctgccacttggtcaattgctgggacatatcttactgaaatttcttggtaaaatttgatctctgacaaagtgtagatcgatttcaatatacttcgaacgagtataaaatatgaagttagtatctaatattgcagcactttagttatctacccaaattaatggacaatgagacaatgtgacctttaattcagtgagtaaggagaccaactatttagtttagtagcagcatttgctaaggccttagactcacgttttgtgctgtattatacaacaacttgttgcttctttgcaaactatgatacaagatatttctccttgaaaaaaaaaaacgtaatcacttatagactttctatcatctactcagtgacggatccaaaatttttactttgaagaagtttatttattattaaaaaaatttcttttaatactca

SEQ ID NO: 120532 - DNA, 798 bp, Cannabis sativa
tcggcctggtcatgtctaggtctacgaaaaaaaattcaaaattttaggaaaatgtagtttatttaaataaaaacacaaaaagtcctcaaattattttgtacataattatcataaaaatatcaaaatttgtataaggttcctaattcttgaggaatgaggaccctcttgaatctcattaacaattgcatgcatgaagtttagaggaaaatagggttgagaaacattttgaagtttagtatcactatcattttgcttcttttctgaggtttgttttaccagttagttaaagtttttctaactgattgatctatatagtggacataaaaaaattcagtaattgtggtactaaatgacttttacataatataaatattatcattattaatcatcaaaatgaaagtggtcttgtatgggaagcaaaaatggcagtgattaaggctaaggcttttgaacgatatttggctgaaatgctagtttgagctatcttatggcccagacagacagacagccccacctgaaaatgaaattgttgcattctttaattgctatttttctttagcagtgcacttacacgcattcattactcattataagaaaaagagaacacattgtttgattggagtgtcctctaatcattatcttatcttatgtataatctatataataagcttatttataatgactcataaacaagtaaatgttatgtggtccaattacttgttttaccactcactaacttctaaaaaatctccctttcaaaaaaaaaaaaaaaaaaattaatcttatgctcttttcttt

SEQ ID NO: 120533 - DNA, 1220 bp, Cannabis sativa
ataaaccataaaattttgattaattagtaccatacctgctgcaatcggtggatgggctaattttgtaaggaatgctaacgccacacttgcccggaagtccagaggcaaggttaaagttgactcctttgatactgctagcagctgacttcaagcacttgcaggcagcctggcgatcggctggggttttagctgccccgctcaaggacttaataccattacaacacccagccgggacagctcccccaacttttaggtagcttaagcatggtgccaggctgctagtcacctggccacaggttatggtggcgtgcaccactggtgatgccaccaccatagccaataccaccaagcatagtactttcacaactgaagaacttgccattataaaaatgtgtggtatattttgagattattggaggattgaatagaaaaatcaaaaggtgtatgtttgggacttagtgaaattgagaagcaatgtgtaaattttgtgtaacgatttgagtgaaaattagctagcttgtgctcttaatttataggcaaaaacaaagtactgtgggtttaattattactttgggagagttagttggtggtagttgtgcttcaattacattaattaggataatgaaaattaatttaatatatatgttagttttgtaaagtaataatgtttttttttttttgccaattttatttgtaaaataattttttatttagcaaatggagtaattataatttaatagattatcaagggtatagtctataataaaagaaaaataaattttatcaaaccccatataaattaatactgatgagatagtgattagtgatgtgtttacaatgttatgttcatctttaagaagtaacatttaattgaaaaaaaattcgtaaaatttgtactaaatttaatttaaaaatcaatcaatattatatttaacttaaattttacaaattgtatgcattgagtagtaaaattaacagttttttaataaaaatatattaaaaaatgatcaaaaacattaatttatttattaaaagtatataaatacaaactctattaaacatataaatgaaatataaaaaaattattaattatataaatgagtggtaaaaacggtaaataaaaagtagtaatatttattgtggtactgaaaagtttgatctgtgctatatttagtattaaatttgatataatttttaacatgtgtcaaatttagatagca

SEQ ID NO: 120534 - DNA, 1820 bp, Cannabis sativa
gcagcaaactagagaagccttcagtacataaaataaaaaggtaaggcaataacggatcaccttgacgcaaacctcgttgagtagcaataggtcccaactcattccctccatgcaagatagtatacgagactgaacaaagacattgcataaccaagtttatccatcgcccatcaaagcccatcctgtccatcatagcatggagataaccccactcaagtttatcataggctttgctaatgttaagcttgagagccatataaccatcccccattttcgttttcttttcgaatgatgcataatctcataagcaatcataatattatctgaaattaaacgaccttataagaacacactttgagtgttggatatgatagttggcataacgttcttaagtctattagccaccaccttggacacaatcttatataacattgcataaagcaatgggtatcaaatcccccatatctataggatgcttcttcttagggattaaaaccaaaatagttttatttagatctgaaggaaataacccatggtgaaaaaactgccttaccatatggataatatcacctttaacaatcggccaactcttctaaaaaaatcctggggtcattccatcgagtcttggagatttgtccaaatgcatttgaaacaatgctttgcgaacttcctcctctaaaattggcagcagcagatcagcattttgttcaaaagaaacacggttttgcacactgctagtaacctctctccaatcggtttgagaaaaataaaaaaggtcattgaaataattaaccataagcaaatctaggccactattccaatccagccaaacaccagattgatccttaagctttgtaacaaaattatttcgtcttctattagtagttgaagcatgaaaaaacttgctattattgtccccttcttgcaaccataattgctttgatcttcgacgccaaaatacctcccgttgaatataagcttcggataagttcttcttcgcttgtttataatttgcaactgagacatcatctcgacccaacttccatctttgcacctcatctcgacactttttaattctatctttgaagttgctcgtgaactcctttccccacacacgtaactattgtccacaaaaactcactttattcgtaacctcatcattcccacaaagctcccaactgtccttaataagttgaaagcaaagaggctcccttaaccacgcattctcaaaccgataccgtttagaaaaatggtagccaacaataggaaccagctccataagaatcagggcatgatccgaagtagatatttcaagattgtgaagtttagcagatgagaacatattcaaccaagctggattagctaaccccctatccaatcggacttcaatccaatgaatgataccccttcctcgctcccaggtaaaaggatagccacataactccatatcttgaagaccactatctgccaaagcttgctgaaaaccttgaattaaaaattcatgatatctattacccccttttttatcatcatgtgagagaacattatttagatcacccatcacacaccatggcaaagtagagttagcagccagggtacgcaagagattccaagtagaagaacagaaacttttgttcggttcgccatacataccaaaaaccgctactcattcatcccttcaatagaaactcgcacatcaatataggcattcgaaaaaccaagcaaatacacctcttctttagctttccataacaaagtaatacctccacttctaccatccacatccacagccatcattccctcaaagcccaacataaccc

SEQ ID NO: 120535 - DNA, 1375 bp, Cannabis sativa
aaaaaaaaaaaaaaaaatccaccgtttagggaatccaattcaccggttgaggtggttctgggagctttggtttttggattttaattatatttaggatattaccacgctaattatcgatatagaaacttttagttttgaatttgagtctccgaacataagttagcgagtcacctaccagttttatgtgaatgtgacttagggcctcagatcgtcaagcaattttctactcatattaaccgacacacttaattatagaattgaggtaagattagtataatagatgcgtatatatagatgtttaacgtacatatttttatgattgtttattagataacatatcagtaaaagcggttttggtgtacataaaattacactagatatcgacggatatatattcagcaaatagtaaagtatgaatcgatgctaccacatcaatacgactagagtacagtataggctggtatttatgccctaaataaaatccatctttatataatcttattaactaatcaatgaatgatatagaagtcaattttatattacttggttcacatgattttttgtgattatagttttaatctataaattctattaaattttgaacttatggataatcataattattgtggtgtctacacaatgaaaaataatcatgatcctatgcttcaaacattaagtctcatgatttatcagtgcacatgatttacattgtcgtgataatcagtgatatagtttacttgtacttggataattggaattccttttccaaggtattagtaaagtagactaagatcaaatgtcaaagagaaatccccacatgtactttttttaatggaaactataagttaggtccgaatgttgtttttcgctttcataatgttttacattttaataattggacttaaagtccttagagtaggcttgggggtaggttttagttactttggaaagatgatgtagatgtatcacttttaaattttaatacaaatgtctttgattgttatattggctttgcaaatcacccatgatggcactttactgcattttatggagctccttcaacttaacagcgttctcaaataaggactctcttggatagacttaagaatgttgcacatttatctccatgactcgtaattggtaactttaatgagagtttatctaatgacaacaaattgggaggggctttatgcaatgaagcgcaaatggatcattttagacgaaccattgacaactgccatttaaatgaacaaccatttgaaggtgacccatacacatggataaaggaaaacattcggtggaaacaattaaagagagattggattggtgttttgtgaatgacttttggacctccatattgttggaaattatttta

SEQ ID NO: 120536 - DNA, 687 bp, Cannabis sativa
ttattcatatgcggtctttacacacaccaccgccaccattaatctccctctcccacaaaccctaaacctttgaacccacacccacaagaacccacctactcatgcccacgaacccagcaactcacacccacgaacccacaccggtgttcgctacccaccattctcgacttcctccaaccaccaccttcgcgacttcctcccaccaccactgtcgcaccaccgttcatctccaccaccatcgtacatactcccattcgtcttaagctggtatatatattatatttatttatgtatatgtttaggtaaaacatatataaaatgtgtttaattcaaagttgtgttattatataaatttaatgtgtaaaaatttgatatgttttaagaaatataattagtgtgtttaatttaaagttggttgttattgtaaaagacttaatgagtaaaaaatattttgaaaaaaaaattaaaagtgaagatttaagtttaggtaaaaaaagtttaattagcattgtgagggaaaaaaattaattataataatttaggtaaaaaaaaataaagtttagttaatattaatgtaataagtttaattttagggatattagtggctaaaccacctgaactttacagtttataacagttaaccacaaaaaccgaaattttggtggcataactacctaaaccctagtt

SEQ ID NO: 120537 - DNA, 1003 bp, Cannabis sativa
aattaagcataaaaattcaaatttatgatttcattattcgttattagatcaaagttcgatagtttgatatttttaaaattaatatttatatttaaatttgcttagtaatcattgatgggtaatactcattaagaagtgtttcttatatgtatatatgtggaatatttatcaatgaataatacctattcataggtactaataaaaaattataaattggcaatctaatgacttgctatagcaagttattaataatatatttttttataattatattatttttttttataaaattggaaacaataattccaaccaataatattaaagaattagaaattatttttagaaattaacatattttgttgaaattattactttatttttacattaataataaaaaatttattaaattgtcaagtcagtatcatcttttttaattataatgaaattaaagatttaataggtcttaaaaaatatgtaattaatttatatataattaaagagaaagattataaacttcaatttttatgcatattgacattttatattactctataaagtatagtagaattaattgaaaattgacatgaatagatcaccgtgcatgtaattttcatactgttgaccgagattttcggcaaccaatttaataatatatatgagaaagctgtatgcatttagtgttggggcattaatgagccttagtcaacgagtctttcttatttatgagagtatttattacagagaatgttcttgatagtttttccttttagttgctctctttaattcttatgaacccagaattctcgacccccatctcagtgcatttggggggtatttatagtgtttttctggggtgatccctagaactgaatcacttgtctttctgtgtagtttcagtaggggcacatattccgagcagatagaaaataggaaatacatgacctataccttaggtatcttaggggttaggtggatatagtcttttatcccttcttgattgatg

SEQ ID NO: 120538 - DNA, 1322 bp, Cannabis sativa
tcttctattttaaatctgcaaaaataaaagataacaagggttaaaatgctccaaacatgattaaaactcaataaaaatatactaaacttgatctaaaattaatactaaaaataacctaacagcagaatgctgtagccgaaagaaagcaccaacatcttttaaatgttgctcgtgccttactttttcaagctaacttacctattgaattttggactgattgtgtcatgacaccttataaaccaaactcctacaccaaatttaaacaaacatactccttatgaattgctatttgacaaagttcctaactatgagcatctaagaaattttggttgccttgtttttgcttcaaccctcactgcacacaggacaaagtttgattcaaaaactagaacatgtgtgttcatgggatatccacaaggggtaaaggggtacaagttatatgatataaataataaacaattttttatatcaagaaatgttatttttcatgagaatatatttccctttcataaactaaagaacaacaaaaactacattgatcctttctttaatattgtttttccttcaagagaaattactaacaccactattgaggattttcctataacagatgaggagaacaacggttccaacaacaataatctaaacgattttcctgctgaaaccgatactcccctgactgcaattcctgaagaaaataatgcagctacagaccctcctctgcagcaagaagaaaatcccacagttccaagacgctcaaacagaacaacaagacctccttcttatctccgtgactatgagtgtcactccgttattcaagacaaaacttccactccacattctctaaataaatatttatcttatgaacatttatcccctgcttataaaacctttattcttgccttgacagctcacttcgaaccaacaaattacattcaagcttcccaacaccgtgtatggaatcaagctatgcaacgagagctgttcgcccttctcaaaaataagacttggacatacgttcggcttccaaggaacaaaagggccataggatgtcgatgggtgtacaaaattaagtacaatagtgacagatccgtggaaagatgcaaggcaagactcgtggcacaaggatatacacagcaagaagggttggacttctttgatacattttctcctgtagcaaaaatggtgacctttaaactcttacttgctattgcaaccatcaagcagtggcacactctacaactcgatgtggacaacgcatttctaaatggagatctcaacgaagaggtttatatggagctttgttgggaattattttacca

SEQ ID NO: 120539 - DNA, 1136 bp, Cannabis sativa
caaacctaatcgttaaatttaacagaatatttttttatttttaagtatattctgttaaaccaagaaatgctgttagataggcacttttaatatataaagatatgatcgcttgattttatattaggaaagtatttttttcaatgtgatggggtgttatttgattacgttgtagttttattgtctaagttttcggaggtaattttgtcctatgtgtgactcgggataaaaattctacagcgcatggttttgacaaagtatgtccttcggttagacaataagctatcctggttcaagaaaataccatcacctattgtggattgctactttgttaatcatgtttaattttaattaccaaaaaaaaaccttgtatgttgatatacctacaattgcaactactagtcaccatatacattccgactaatcatcgatgactatatggtcatttgaaataagttcaaacagaagaaaataaatatgattatgggagatttatgatttagatagaggatgagatcatcaaactatgaggtagatgaatagtagatggccaagaaagaacatggcctgatttggaactgctagcacattattaggtcaaaagcaatggcccacaagaaaagatgatcaggccatttcaacaaaaatagtaaaaagaaatttaaaatgattataagtaagaaaaatatttaagcttttttataatataaaattaaaaatagcatgaagcgaatttcactaataatataactcatgaatattccatatatactattaaaaaaaattatatgaatatgtatatatgattatggctaaacttcacaactataatctcacttgtagtctatttcaaactaaaaatttagtggtaaaactatcaagttattaaatttaaggtattatctatttcttactacaataaataactatcttgattgtttatgtatacacttttgtacacataacttatttatattggaatacttaataggcttttttcataaatgtacaataaaaacaacataattacaaaaactgtgccagaaaaaattattttaaaaacttattacatgaaaccatacattttaatcattaaataaaaaaaatatatttattaaaacttgttaattccatttttg

SEQ ID NO: 120540 - DNA, 1720 bp, Cannabis sativa
  modified_base (1499)..(1500): a, c, t, g, unknown or other
agaagagtatttctgaacacaaaagatagcacaactggtgtgctcggacaaaactgtgaaggaccgtattaggtggtcgaagttctagaatcaggaccatacaaacttgagcggtatgacaaaaatatggaactcgttttggtgccaaggtattggaaaggggaacatttaagaaagtattataagtaaaaataccatgtcggatgacgactttaagtacaaaaagaaagaacatttacttttaagtaactggccttcttggcggaccgcgcccaaggattatgatggaaggattaagtactcacgtcagatgaccacctttgaaagtacaatttatttttataactgcaattattttatgtttaaatttagctaaagattggattagatcatataatagctttcatgaatgtaagttactactgtaacaattgcagctggtattggaagaaattggtaggattcaaggacaagttgaagctcaaaatgtggctagttttgtcatgtagaaatttagaattcaaaattgctaccagttactattcagcaaccaagggaagaaatcatggtgtaaatttttgtgggatagattgattattcgtaaacacaaatttatactatggttgttgctttaaggaagattaaacaccaaggaaagaattggcaatttgacaagaatatagacatgacatatctattgtgtgggaaagaaaaagaaacaatagagcatttatttttttcttgtgaatatagcaggaaatgcctaactgaactgaataggaacctgcaatggggaacaagagcaatcgaattgcagaaaatcctgcaatgcatcaacaaaatgaaggcctttttagcaactcggaaaagcatgatggtcagtctaatggcagggttggtataccacatatggggagcaaggaacgatgtgctctagaaccaaaagcaatgaaaaatctgagtcatggtgaacagagttcagtatgacagcaaaaggagactcacaggggtgctaccgagtaaaacaaaggaaacggataaacaatggttgttgaatttgtaagagatttcataaagctaaaatatagtgtataaaattcatatttatttgtatatgaaaagttgatgtaattgaatgtttgagcaatacaacttctgtattcataaaaaaaaagttactacggtaacaaaaatattccgaccaatgaatcaataaagatgtctatttaaattctcattgtatcgattctattagcacgtcataaatttaccattaaatgcgtacaaatgtctgctcaaatccaaagaaccgaacaaacaaaaatcatacttgtgaaatgcaagtgaccaagagtcatgttgacctcgcttttagccaacgacagtgagtcttaataataagcgataaaggatataattcatatatgatatgaaaagataaataaagaacacagggttttaaaagaggttcagccctgagcagttcggtaatagcctannccccttgatttgtattgacttaagaacaaagaatacagtgattcctcgctcaaagctcttaccatgaaatctctgagtatgctctcttagatctctctcaagtaattctttcacctcttttctagtaagaatgaatcactatttattgggttatatgcttgagggaaggtttcccttttacttacataatctataattggtaagaatacatattacatat

SEQ ID NO: 120541 - DNA, 922 bp, Cannabis sativa
aatgcaagagatcattctgtagcaaggagatcaaattagagaactaagagagtagaaagtttggccttctcctaatcctattcctttggcacccctggttgtgccgctggacatgggaaatcatttggagttgttgtatgagcagttcaaaaactagaattagctagtgtttaagggtggtaccgacccacctaacgtggagcaatggatgagcatgataacttctatctttgactttatacgagttaagggtaatgatcaggttgggtgtgctatattcatgttgcgagaggatgctcacatgtggtgggaaatcatgtcctaaggtcatgatctgactaacatgacatgggatatagtttggaccttattttataaaaagtactacaatgaatctatccttgctgctaaggcaaaagagttcatattgctaactcagggtagtataacagtgaccgagtacgccaccaaagttgaccggttggcaaagtttacgtttgacgaagtggccactgaggctgctagacatgttaagtttatctgggggttggaagaaaatatttcttgggatgtggctatagctgctaaacaaccacagtttgtttgagcttatgctcaagtggttgagttagcccttattgctgagggtgttgaagattagatacaaaagagaagtaatatgagaagagatttgtggaggccgtctctaaatgtcgataagggtaggggtgttgaccctaatgaatgcaagaaaagatccaatgacccaccagccacgggtcccaaaaagaaatttcaaggtaataagggattttgctaaggtggaaatgagaactagagaacctatcctgagtgtcgaaggtacaagagatgccatcaggatgaatgtcaagctcgagcctgcttctagtgtggggtagta

SEQ ID NO: 120542 - DNA, 2402 bp, Cannabis sativa
  modified_base (41)..(45): a, c, t, g, unknown or other
attgatgttgaataaaatagattacattgaaatagagtttnnnnnagggcataaaacctaacagttgtgtcagcatcatttgagatgtatgatgtccttgttgtgtctacaaatagtactacccttgtggtgtcgacgtcatcttgtggcatttgtgatatttgttttgttggcatcatttgtggcattcgagactgtgacaccaaagatgtttgaggcaattgcatcatcatattcatcattacttgtgaactgtttgggtgacaaaaaactacaagaatgactggtacatctaattgtatgactgttcagaggtaacaaagaaataggagggtattgtagcagttgctggaatgaactaggagtctgctgccgctgctgatgttgaaaacccattggctaaaaaagacggaccaggtccatctccaggcatatgagagcgagacggatgtggatgcgttggttaggttggagctgcatcatttatctcaacatccatttgtgcaggaccttcacgtgacaattgttgagtcaacatctatgtttgtctttgcatctgaattgctatttcccataagtcaagttaattagtagttacatgttgtgtgcgttgtcctgatgattttccttcaatttgtgacccactcctcactcatggccacgcctctctccaagagtctgtcgaagtatctcaagctcagaaacttgtgtatatttagaagcactagttcagtatgtcaccatctcttcctataataagaataagttagaaactaaacaaaattacaattatttgaatatatttaaaagtaattaatttataaagtcataccgacgtatttttggcagccttgttgacaaaagtgtttgtggctttctttgtatgacaaaccttccaagtcttaatgtaactcttttcttgctgataaatataagttgtaagaaaattgtaattaaagtaaacttcataaaatagaaattatatatattaaattacattttcatgaagagtctaagccagagttatccacccttgtgttgaagggtatttcatcttctaccgattgagagcgttttgcctaaaacgagtaataaatttagaagatgtgaacaattgacatattagtcgtcattattcttcattgagctcactgggagggttcttgattgtatttttaaagtcttctagtttttggtaatattctttgaaatgtgccagactaatgttctttctcattttgtatttatcggtcatctcaactatcaaaatagctattaattttagattgttgtctttatagtaataatactgcatatgacaaataaaatattataataacatggtaataatgatatttattaattaagatataaatttcaaaaaaagtatctaaagtttagttaagatgagttgttcttggcacatgtaatctaatctctctccttattaaacgagagaaaactttactctccaaccttactactttttttgagacattgttaattaccaatagtaatgggacaccagcgctcttctatcttccaactctaaacacttcattttcgggttagctggaaatgagaaataaaaaattgtgaattatttttctaacttcataaatcattgtcattgtgaaaaactagacaaaaacttgaaacggtataagattcagataagcagaacccagcacaccaggccttttgtcaacctgggcactgggtacttactcttgagctttcgagatttcatttttgatactttcaaggcttttaaactagaggatgaggtcgccaactacttttttgaccattccagattaaatggtcacatcatatttggcatttgagcaattgaaggcagcgtcccatgttaattgtcaacctgggtgttaggcccagtcctaggttgacctcagcgctggaccctgcttctagggacatgggattatggtcttctccccaattttgcttgaatcttcgttatttctaatgaaaaaaaaaatgtctagaacactttttgcaaacttgataaaaaatagcccaggttgagaatatgtcaacctgggcattgtgcccagccccaggtctcaacttgggcgctgggtcccccttttgtccttccaaaaattctatttggtcccttgaaatagttaaatctcaatattttcttaaaatagagaagatgctcaaaggagttcttgtaaaaaatctatttgaaatgacctaggttgacaaaatgtcaacctggacgcagggtcagccccaggtatcaacactactacaaaattggtttttctctacgttttcaaacagtcgtttaaagtattcccgtcaatttctataactgtcgcatatacgaccatcgtaaaacgggcaaaataggcgacggtttaaagtcgtcg

SEQ ID NO: 120543 - DNA, 1050 bp, Cannabis sativa
aaatgtaaaaaaaaaaaacattctttgaacgtaaaaatgtaaatattttacaaaaatttgtgcttatgtaattattccttttatttattctataaatactgtttacaaaattatcaaaatggttacaaactctaaaactatgcctatagaaaaataaaattcgtatttaatcatgcccctgcgtattttttttattatttttcccagattctatacttttagtatttttaaaaattacagcactataaatttgaaatttataaggggtttttacaatacaccacgtattgaaatttttaattttttcacttttttactatagggcagatttttttaaaaaaatattgtgtattttttatactgtgtattatgttaagttttgactgttgttccacggttgttttttttatttttccactgttgttttaattgttctgttttcttgttttacagttgttatataaaaaaacagcatttgtgtaaaaaaaaaattgtgtgatagtaaattataaatttttacctaaaatataatatttttgaaaaaactttaatttatgcgggctataaactctttgttggataatattgtagaaggcgcaaaaataaggagttagttgaaaaatacccctttttttatcagttaacaaaaaatagccttattttaaattcaattgaaatgtaccactttgataagtctattaccgattataccctcacataagggtacagttcaggaaggtggggaagattttttttcattacataagtatataatcgggatataataaataaaagagtgtataaattaaatatatagaaaagaaaggtaaaaataaaatgggttaacaaaaaaatagtatagggtgtaatttcaaaaaaaaaaaaaaacaaaagaaacagcccaagcccaaatggcccatacgtatattgaactcacaaccatttatataactgggctcatataatttgtggtatataaataaagggtaaatagttgcataagtacttaaaattttacgtttataagcggcataaacccaatgatttttt

SEQ ID NO: 120544 - DNA, 2574 bp, Cannabis sativa
  modified_base (34)..(40): a, c, t, g, unknown or other
  modified_base (221)..(221): a, c, t, g, unknown or other
  modified_base (2521)..(2531): a, c, t, g, unknown or other
ttattattgtattatatataaataatattttatnnnnnnnttaaataaaaataaaaaatcacccatgaatttctcataaaccaaaaatttcagttatatagccacactttatatatctaattttaaaaataatgttgccccatctaatttaataacgtttttccttcattctcttacagttttagtaactaacatgaccctcttctctctctctctctctntatatatatatatatattcttttctctcttcatctttctctctcttttctttaatttttaaaataatttctgttcacatcgttactcggttgatcctaaaaaaaaatatcattgtgaacatttcaagatgtgaaaatcatatgttttctcactatttctagaaaagaaactgtttaccgagattttcagaaaccgattataataagagttgaaagattaaataaaataaaataaaagtaaaaatggagatttttacgtggttcgggtattaatgaaccctagtccacgagtcaatcgtatttggctaagtcaccttgatgtattacaatggagttcttaaaagcccatgaaccctaactttttgctgtagtgtttacacaatgtatttctaaccctttgcatgaggtataatgtagtatttatatgctaggatttgagttcgggtatattcttgacccgttagggtttgcatataaatcgagccactaatggggtaaatacatataatacgttgatattgggcccatggatcgaggcccgacccgtggggtagaggtggtttgtacgcttgggtaccacgtgatatttgaaagatggcttgcatgctccgcttctgtgtacaatagtgttagaatcatggctgtcagataaaagggaagtttccttttggtgttgcgcacactcttaggatctgacgcataggacaatcccctaatttggtaggatttggtgttagagggctgccacatcatcatgtactaggttcccggggtgcctcttcgaatgcccttcggatgtatccaaaatgctcatctgaagggtatttgttgctctttcttgtaagggtaggatgccctttcgaatccggataaattcggtctcagaggtatataccctggggctcgaatgggtttgcacccatccttccgtacacactgagcttgtcttcttggtagggcttttgaccaggccttagatgattaatcttgaattgggaatgccacatgtccctctttcaaaaacacaaataacaaaaatcatttagttactaatatagtaattagttattgttttataatttttttaaattttaattaacattcattttataatttagttaattagattatattatattaaacgataactaattagctttcaaaataacaaaaaaggtatataaaatagggggaggtatcaatagttacatcaaatatataactatcatggttacatttatttttaattattagattattgttgaatggggttgtgattaatttaaaaataaaaataaataataaataacttgtaacttgatactttattttttttttatgaatcttaattaaaattaattatatttaaaattaaatgactaataattattaattaattttatgcaatttgttaataagtaaagatcttttagcaattattttttctaacttaaataattgaaataacaccaacaaaactccttataatttaaagttattacacagatcaccttaattaataaaaatagtatgaatgacctccaattaaaggtaattttacgctcaatcttattttttaacacttttaagtgccaaattcgtgtgtcagtctaagattggttcaagttatttagtttttttcttttaaaaaataaaaaattaagtaaaaaatgtaataacaactataaaattaatgattgttaattatttttgctcctcgttgaaatcatcttcatcaatctaaagattgtaaaaaaaattatcaaagtagattaccaactaattgaaattattaattatttttcacaaataagcataacaataggaaaatagcaaagaaattattaaaaactaaggagaaatctaactgtagctagttgaatagagaaataagtttgtgacatagatgtaggagattgtaacgaagtagaaaattcacataatgttaagttgggacaaactgaaactctaatttttttattttttttattttttttataaaggagaaaaatgagtcaagcagttattgcaaaataataagagagatttttaattatatacgtaaatctttaaataattatacaaataactttaacttaataattctaataaataccactgcttatgtcgaaatcaaatgtttggctattagacacgacatattaaaatatcttataatttaataataataataattataataataaatataaatttatcaattacaaataaattaaaataataaaaaaaaattaatattataattatataatcaaaactattaaaacatgaaaaattaannnnnnnnnnnaatttatttatagggtgtgatataaaaatttaagtatttataa

SEQ ID NO: 120545 - DNA, 1010 bp, Cannabis sativa
tctattcctaagccaaggggtgcaattgttctaaaaattgattacaattataggtaatttattattacttaattaataatatttcacttattgttatattcttaaccactttaggatattgtcaattttatttaaatttacattattttaaacataaaaactaatttgtttttatgaaattggtacttgataggggctgactttgttttaaataagtacatactttatgttattatatatgttaaattaaaatatgtgagactcgacgataatacttgtacatattctatttttatatgtgtagcactggagggatattatttagggtaaatcctgaacgcgttatcatagagcgaaaggaaacactggtagaagaggcagagaaggaagatgtgacgatggaagataaccgtctttttgttgcaaagacaatgaaagaagcgagatctatggctaacgataaacgacttgaggaggcacgagacaagattgttgatgcccaaaacatgttggaggacggcgttgcttttgttgatgagtcaagccctaattattcgatggttgagatgttgagattcgagttacaacaactattgaggttgatgaaatcagaagacatatacgaaaaacaagggcgtcctttcttactatcttccgagacatctcatgatcgccagcgttttgcttcaagaggaaacgttgataggatgcgtttatttgctacacctcgtatgaactcttaccttgagcaagccaaggctttcgatgaggatccaactaagccattgcccaatgcagatgatgatttgaaggaagaacttgaggctgatccacttggtcctattgttggagctcttagctactatattcaatcagccattcagtcacttcaagctattgacaacataatcaaaaatggtcgttaatttattattaagtaattaattattataatatcgtttaatttgcttttgcttaattcaagtttatgtgttaaataaacaatgtat

SEQ ID NO: 120546 - DNA, 5903 bp, Cannabis sativa
  modified_base (32)..(60): a, c, t, g, unknown or other
tttagaaagttcttatttaggatgttaataannnnnnnnnnnnnnnnnnnnnnnnnnnnngtaaaataatttccaacaagcgagacttacaacactagcgagttagaagacttctttgtaaataaccgagatcgacacaagacatacattgctgacccccgaaggaagaatggccccaacttgctactgggatcactataataaagtttcggtcgagacatttgaagattcaaccgttaaaaacgtgtttaatacacgacagttttgacctaggaaaagttgaaaaatcacagttatacaattttcaaatcataaaccgcatttacactacttgatatgtaataaaatcccacgattttagggattattgctgcaaaaatatttcgatcaactttataattgaatgtcctctatgtacttataaatagtgacaaagaagatcaaaaaagggtcgaaaaaactcatatgaaagagaccctgaaaaatactctgaaacctgaataagattgacttgtggattaagcagaattttatctgcaaaatcacgtaaaaatcttgtgttcatatttattacttttctatagcttttatttgttctttaagaaatcatctctgtgaggctcaaatttagttaacaaaaatgtacgttaacactaggcattgtggttatttcctggtcatgtggccatgataacaactctagggattcatcccgtatgacaatacagtcgtctctcgagcattttctttgtcacagaacattcgtagtgtttgctatcatgatctcaagaaaagtacctacgtgaagcacattattcagctcggaagtacatctgagtgttgagtagctcattgatcttcaccctccaaattagctcattaatctcaccctccaaatctcataatctttactttcacagtagaggttttggtatcttcccgtatgtcagattgtaggtccctttctctttgcagggttacagggtggtctaggttcattagagttgtaaagataatccgacagaggagatcgatttcatatattgttcaaatttctttcagtagaattacggttggtcctatcagctacatgtggtggacatctttgtttgcaatcttgagttttagtccatttggacgctcactcgtagctcatttcccttacaggtgattgctcttatcagcggaggacccataaattcacgttcctaagtttgagtcctttcaaacgctcgctcgtagttgacttccttatggggaatcccaatgcctgctacattcaaagcagtggcatggctaccaagtgtggtagtgtggctttgcttgttcatggatgattacttgcttgaacttatgaatttttttcgaaacaaagtttctagcaaagaattcaaactatagttggggaactcaaattgtgactttcaatgaaagcaccaaaatgtttactttgaaatgtggccaacaccatctcgctagattagcaagatgaatattcagtttaagtaaaaaaattagagacacacagacaatttatagtagttcacttcccatgtcgtgatggtaatggagctacctctactttgagtttttatttctcacgagatggtaattacaaaaaaagactaattgtttaagctctagtttctagagagagatgctctcaccttgttggtagatttcggaatatgaaaaatgaactaaggaagctctccttttataggtgaaggaggcccttaaaatagggaaaaatacaagtttgctattttggtgttaaaaatataacttcgccaatgagtatcatttccttgtgtagtagccactactacaaccctattgtgacagtacctataaaaattgatgggcactgccatttgcttatggcagtggtgcgataagggctttataaagccttgggtcacttttcttacttgtttttgatatatagatgttgaaaatgtaaattcgctaatgcaacccttttccttatgcaaggcccaaccactgccatttccttatgagatcgttccaaagatctatacccgtagggatcacttgtgacgatcggccatggtaggcaacaaggtttcccttgtttggattggtcggaagctcctcattcttagaatccctcgtttccggcattggttgtcgcttgaagtctttaggaataaatggaaatgtctttgtgcgtctaggtaagatgagtttggaaagatgaacttttgaactcagaagggacattctagtaggaaagatgatccattttgaaaatggatctcaccaaaaagtcagaggtttgtgaaaaattacaagcttgagccacccttttatacacaaagctcagtgacaagaaagctaaagattgggaaatctgatgattggaagatgggaagaatatgaaaagacaattcataatgatcctcgaaaccgtaaaaccgccagaatcaaagaatgcattttttctaagaaaggatttttgcgaaaatgccctctataattattaaaaagctctttttactaaaaaagaactttttaaggggcaattgttataccgaaaattcggcagccacctccacgttggacacgtgtcaggatgaagggaatgtgaattaatgcaattgctcttatggaataactcatttattacataagagtcatattatatttgtaacccgttgactgtaacgtcttaggcaaggaatcaatttacaaattggcacttggtatattagcaagaaaggatatgtcgctaaatacgaatagcgaggcaccgatgaaagtgacacatatcaactagaaaagttatttacttgcaatgaaaaaactaagcgtaaaagtcggattggctcaaagaatatgtaagcgagatgactatctcgctatgggaagacttcctatagcttcatccagctaacaggagcgaggcttacaactctagcgtatcagaagacttctttgtaaataaccgagatcaacacaagacatacattgccgaccctggaaggaagaatggccccaactcgctattgggatcactacaatcaaggttttatcgagacatttccagattcaacagttaaagacgtgtttaatacactatagttttgacacagtaaaagtgggaaaatcacagttatacgatttgcaaatcataaaccgcatttacactagtttatatttaatcaaatgccacgattttagggatgattgctgcaaaaatatttcgatcaactttgtaattgaatgtccactatgtaattataaatagtgacaaagaaaatcaaaaaagggacgaaaaaactaatatgaaagaagccctgaaaaatactctgaaatctgaataagattgacttgtggactatgcagaattttatttgcaaaatcaagtaaaaatcttgtgttcatattctttacttttctatagcttttatttgttctttaagaaatcatcactgtgaggctcaaatttagttaaaaaaaatctacgttaacactaggcattgtggttatttcctggtcatgttgccatgataccaactctagagatttatcccatatgacgatagagtcgtttctcgagcatttgctttgtcacagaatattcatagtgtttgctactaagatctcaagaaaagtactttcgtgaagcacattattcatctcggaagtacatctgagtgttgagtagctcatttatcttcacactccaaattagctcattaatcttcaccctccaaatctcataatcttcattttcacagtagagctttgtgtatcttcccctgtgtttgattgtaggtccctttttctttgcagcgttacgcggttgtttagattcattagacttgtaaagagaatccaacagaggagattaatttcctatattgttcaaatttctttgagtagaattacggttggtcctatgagctacatgtggtggacctctatgtttgcaatctcgagttttactccgtttggacgctcactcgtagctcatttcccttacaggtgattgcttataacagcgaaggacccataaaatccacgttcctgaacttgagtcctttcagacgcttgctcgtagttcacttccttatggcgaatcccaatgcctgctacattctgagcagtggcatggctaccaagtgtggtagtgtggctttgcgtgttcatggatgattactagcttgaacttatgaatttttttcgaaacaaagttcccagcaaagaattcaaactatatttagggaacccaaattatgaatttcaatgaaagcacaaaaatgtttactttgaaaagtggccaacactatctcgctagattagcaagatgaatattgagtttaagtaaaaaaagttagagagacatagactatttatagtagttcacttcccatgttagaatggtaatggagctacctctcctttgagtttttatttatcacgacatggtaattacaaaaaaaaactaattgtttaagctctagtttctagagagagaaactggagagagatgctctcaccttgggggtagatttctgaatataaaaaataaactaaggaagctctccttttataggtgaaggaggcccgtaaaatagggaaaaaatacaagttcgctattttggtgttaaaaatataacttcgccaatgaatatcatgtccttgtgtagtagccactactaccactctattgtggagttacctataaaaattgatgggcactgccatttccttacgttagtggtctgatatgggctttattaagccttgggtcacttttcttacttgtttttgatatacagatgttgaaaatgtaacttcgctaatgcaacccttttccttatgcaaggaccgaccactgccctttccttatgagatcgttcacaagatctatattctcagagatcacttgtgaggatcagccatggaaggctatggggtctccgtggtttggattggtcggaaactccttagtcttagaatccatcatttttggcttcggttgaggactgaagtctttaggaagaaatggaaatgggttggtgcgtctggctaagacgggtttggaaagatgaacttctgaactcagaagggacattctagcaggaaacagatgatccattctgaaaatggatctcaccaaaaagccagaggtttgtgaaaaatgacaagcttgagccacccttttatacacaacgttcagtgacaagaaaactaaagattgggaaatttgacggttagaagatggttagaatatgaagagacaattcataatgatcctcgaaactgcacaaccaccagaatcaaaggattcgtcttttctaagaaacgattttggtgaaaatgccctctataattattaaaaagctcttttactacaaaggtactttttaagggacaattgttatgcccaaaattcgactgccacctccatgttggacacgtgttaggatgaagggaatgcgaatcaatgaaattgctcttatggaataactcattaattacataagagccagagtatatttgtaacccggtgactgtaaggtcttaggcgaggaatcgatttacaaactggcacttggtatattagcaagaaaggatatgtcgctaaatgctaatagcgaggcaccgaagaaagtgacacatatcaactataaaagttctttgcttgcaatgaacaaactaagcataaaagtcggatctgctcaaagaataagtaagcgagatgacgatctcactacgggaagatttcctatagcttcatccagctaacagaagcgaggcttacaaccctagcccttgactccttctgttcttctctccatcgcagccgctttcgattatgaaatctggaaaatggatgtcaagacagtcttccttaatggaattcttgaaga

SEQ ID NO: 120547 - DNA, 612 bp, Cannabis sativa
aaatatgtaaaattgcaaaatagcctcaacagtccaatttataaaatactcttccgaactagcagatattagcagttcccacaaatttttattgaataatagaaaaaagatttttatatcaaaattccacattctataatcaatgcgcggtgatctagttcttgaatgtgacatgattgagttattgaccattgaatcagtgtcataacaattcctatttcattatgaggccaacttcaatgaccgttacttatatggttgacaaaatagtggttgatctaatcataatgtatgatgtggcatgagagagaagaaagagctaaagaaaagatttcaaaaattgcactaatgccctctttatttttaattaaaaaaataaaagaaaaattttaatggactaaaaaataaaaaatgtgttaagtgagatctattggacaactatttttattcatctattagagatgtcgtgaaactactctacccgttactttgtgtgtttaatttatgggaaatttacatgtggagtcgttttttacaattaattaacaataataacgtgattgatttatttataaatgttagtatttgtcttttaccgtatttattgaaatc

SEQ ID NO: 120548 - DNA, 568 bp, Cannabis sativa
gatcacaactatcaatatagcaaagaaaaaggtgcacgtttaacacagggaaaataggataaagataatgggggaactatttcatttttgatcagacaatgcttttattattatttttttaggtattaatttctcatttaaataataaaaattataggtgcacattttcaacttgttatgagttgtgacttgtttaccattttagttatgattgacaattcaacctagctagaagggcaaacttaattagatgtgtttataaatagttatggtccaaaatgcccccaattatttttggtgatattcttgtcttttaagcacataatcttgagtttgaagttggaaaaataattgcccccaaacaaaggtggtggtgatggtgggtcataataatatgcctcaaaaaattatagtttcttctaagttattctaatctaattctaaacccatctttatcttcttattaataataataataagccatctttatcttaataataataataataaagataaatagtagcataaatactcaaaatttaatgtttataagtggcataatctcaat

SEQ ID NO: 120549 - DNA, 807 bp, Cannabis sativa
atatgtactaaatcttgtctcctgaattttcatctatgttagattttttttactaaaattagataaaaatccttaaatctaacaatatcttaataattcaacgagaatttttaacggccaaaaaggttcgggaggcatgatttagtacatgtcaaagtttgagagaaaaaattactaattagcctttacattataacggacaaagagcaaagtttcctactaccaattttccattcttttattccaaaaaaataaataaataaagcaagtagtttttaaaaacacaaataaaaaaatcttaaaatttctgctatttataatttattttaattttaattaaatgaaatattattattaataatcttttatttaataatgataataataaatgatatgtataatcaaaaatttgaaaatattagattggatcttatttggttatgaaggttagactaaccctatatttatcaaaaatgaataaaaagctgtgttgttatttatcttaatagaaatagaagtaataattcatttgagttaatgtatgactcgaaacactcaaagcacaagagaaatatatgagggtgatgaaacaccttacaatctctccacactattctatttattttctcgttagtttttattgttttaattctaatttttaaaatatatatttattttttcagttttaatttatagtatttggtaatatgttgtaacgtccccgcttcaagcctctattgggtccttacacccacagaatgaatgactcttatacacgagtacgtcgctctggctgcttcatggact

SEQ ID NO: 120550 - DNA, 603 bp, Cannabis sativa
aggtgggagagaacatattcttgacgtggtttattgttgaacaatctgatcatatatatatgagaaaaaacatggtgcatataacatatgtgtctttataatctgcttattaattagtatatttttcttttttttttcttttaagaatcaaaaggtaacacttcttccggtccacttgagaaacaaataagcaaacgtaataaaatgtgtttgatgatcataatcaggacacatatgcaggttctcctgtgaagtgacaccattactacataaacatgtggcatattaatgtttgtcttgtcccaatctcagacaacgtacacccatcccatgctcttcttatcaatatatatataaattaatgagtggcattaggataagaatttttatttatcaatactattacaatgaataataataccatatatattatatctatttgttgtgagtatctctcatcaagtttcactttttccttttagtattagaatcatataaacatttttgtatatatcactagctaataattaaaccaagaattaaataaaaaataaaacataataaatgtatatatagctttaatggtggccgggtgcatgattt

SEQ ID NO: 120551 - DNA, 1128 bp, Cannabis sativa
agatccattagtcacatgaacatttgctcctgtatcaacaaaccaaagattatcctcaccaaagtcaggaataacggttgagttatatacctgatagtcatctgcagtgtccaattcagtaagataagcccgtggaatagcattgtttggctttggaggaacaaagttcttatcaaaacgatagtggcaaacagcagccgtgtgcccacttttgagacaaagttgacacatgagacgattttgaaagccaaaagagccacggggtggcagttttcctccagttcttgaaaaagactcagaggcatttcctcgagcagctggtgggatgtatcgaccggggttgtttctattgtttccaaaggccagattggcttgaagcttcatagagacatcggacatggtgctgtgatgttcaagtctactctcatgagacatgagaagagcttgaacctcatcaagagacaaagagtcacttcttgaagtgatgccagagacaaccgggtcaaattcagcacctaatccattcaagatctgaagaacaatgtcttgatcactaatgttagaaccagcaatgaccaaggaatcagcaagactttgtactttatccacatagtcagaaatcgagagattgcctttgtgaatatttgaaaactgacctttaagctgtaaaagtcgagcacgcgattgactagcaaagcgttgttccaacgcacgccaaaccgcgaaggaggtatgatgatttgcaaccgaggccaggacaccttcagtcatggacgatctgagccatgaaaggaggagttgatcacgtttcttccactgttgataaagagggtttgggttgccattgatcaagatttgagaaggaggagtgccattgaagagaatttcatctaaatcatgcccaataacagttggaacaacttgggatttccaagaaaggaaattcgcacgatcaagcttgatcgtgagggatgtcgacagggaactggaaaagggattccagacagaggagctagcaatggaggattgggccgtcatttctggaggaggatttgtaacagtagagggagtaggatcgggagatggaatcgaggacttcatggaagacttctgataccatgtagaagc

SEQ ID NO: 120552 - DNA, 947 bp, Cannabis sativa
aaactaagagaaagggaaactaagaaaaagggaatgttgattacattaatagtaataaataaaagatttggacatccacataattaatactatttataacaattgagaaataaatatggttttattgtatttaatttcgtgtgtatggttgcccattttctatttaggaaacttttgttaatagctgtatttttcttttaggaaacttctcttataagagaaaaaattctctatatagaaagtttacttaaatttggaaaaaatgacttttctttttctagttgttaattttgattttactatgcatataacaaatcaaataatctttttttggcaggtattgaaaaccaaattgtgatcttggtcctatttagaaatatttccatttaatcctgatctgctgcagcaaagtccaaacttatgctgcaaatcaaggattttattaggaaaatttaatttgtacaactgaaaaaatgtgtttgtgtttgtctctagagtttttatgctctataaataggacctagagagcagtcaaatatttttcacctcttctagtttaatttttcatatttttatgggagagagttttttttttcttttttgtaaaacctagagtattcagctaggttttaactttgtttattgttcttatactatattcttagaataggttgtagagcgtcattgaccaagggaagggtcttcaggagaagatcttcaggagaagacttgtcggagaagacttgtccaagtcttcttgtccaagtcttactaagtcttacttcgggaggaagtaagcactcacacatcaaaattcgaagggagttcgctgcttggtggtgttcagaaatcatattggcaaaatgaattacaaaagattacgacaaattattaaagagagtctaaatttgtttaagtcaattgcttttgtaatctttgatacttta

SEQ ID NO: 120553 - DNA, 884 bp, Cannabis sativa
cttcagagtatataggtattaattagtctgcaacaccaaataccaagaaagcccttcactgagcctagaacaaaacttaacagcccagaccaatctggcaaattgttagttggaactattagaattatgagaattacacaccacaagtccaccttaattcacataagcctaacttgaacacatcttggaggattgacattcttctagtcaatgccaatgttcataagtttcaaacaatgttgaaacttattgaaagtaagaatcttcgtacctgtaccagcaggattttcttcaattgacaccttgtgaagttcaatagtcccttattcaatctgatcccttatctgaaatagtctcacatctatgtgttttgatctttcatgatacacttcatttgtttctgtcatattgaactattttagtattatctccaagtagtaactttaagatatataccttaccttgtggcattttctatctctaaatacattcctaagacctttctagcagcccccatatccttcatctcaaattctcctttcaaaaccttcttgagcttgtcaaacttgctagaatctgttcccattattagcatatcatcgacataaatcagcaagtcgatgtagagctttcaatatcagcaacacataaataagtgtcaaacttaaacacttttgagtgtttctcattcctagatttatgtagagagtagaaaacactgttgtaatagcttttcattttgctttgtgttttctttcttggacaaatttatcttttacttctctgttaaccaatgtattctatacatatcggggtgataagacaatgacctctatctctttttttataaaaaaaaaaaaaaattctaggggactgttttactc

SEQ ID NO: 120554 - DNA, 628 bp, Cannabis sativa
agtgtaaaaatgcaaaataaaattgattctttataatattttcatgaaattaatgaaatatattattatgttgaaaatattttcttttggatttaattttgtttgtgtttgaaattaaagaataaaaataaaatagcatttgtgaaatggaaagaagagaaataaaaagtgatacaaatgaggcccaagacatgcaaaacatggcattcttgaagaccaaaaacaaagcccaagaagaagagcccatctggcccaagcaccactagtctcctctctctctctccgctgccacgtgtcaacgccaggaagcttctgcagccacgggccccacacgcaaagagctttgtcccccacttgtcttctttactttcctcatgcgcaagtgagtttcactctccactccccagccatgagtgtgtctcacacaccaactcaagagtgggagtttctctctccgcgtggaccacttgcaacaaaggaaatgagcttcttttattcaacaaaagacatgtgttgatgactcaccacaaataccaaatgagagcccaacacttgtcaagttgcagcccaaaccggccaatccaaacgtgacacgtggcactcaggttataattttttgtatttacat

SEQ ID NO: 120555 - DNA, 1199 bp, Cannabis sativa
tgtaaggctctttaagattccctcaaaatggcatctattttttctcattatcttagatagctcgatcacaagcggctttttttttattactatgcccggattgcaagtgactcttttgcctctacttattttctttctacatattagcaatgtgggactctctaatatctctctcaagatggtagcttctttttttctcattatcttggacagttcaattacaagcgactctttttttgactcactattctcgaattacaagtttaacttttgggtctactttttggatcgattttttggacttttagtggctctttttagctcactatacccgaatcacaagtgactcttttggctctactttttagatcatttttttagactttttgttgctctttttcgctcatttttcccgaatcacaagtgatatttttttgactttggcactacttttttgatttggtggctcactttttggctctacttttttctttatcgtgttttttagatcggataatcataagattaaaatgtcatatgattatctattgtgattgtctttgaaacatataatctttacttttgtagagatataatttatgtgagtaatcattaataaatgagataaatttttttgtaatatacgagtctatatttacaagtgttaattgacttgtatgatttctactatgacaacattttaatgtgcactatttaagtttgttggtatactttttcttatataaattcacacaagctttaaataaagttagtaaaatcacttgtaatgagtatcccactatttactaacatttattcaatttatggatatatatttcataatattgccagattgaacatatgtatctttatgagtgacatcattttttataatttaatgtagtaactaaagacctttaaatatgtgtctaaatcatgtttccaaagaaacttggatcataaaggtctttgataattttaaaacaaagtcactacaatattacttgttccttaaatttctaaatgtgaaaattcatcttgtctatggatcagatttgctcacaataactaactttcttagagcatctccaatggtggtgtaagtaagtggtgaaaagctaaaatatagctcatttaacaaaaagtgtgctccaataatgtgcaaaaaagtgatgtaaatttggcacaacatttgttat

SEQ ID NO: 120556 - DNA, 681 bp, Cannabis sativa
  modified_base (655)..(656): a, c, t, g, unknown or other
atattgtcagtacaagacaaatctctttaaaaaataatgtataacatggttagttatatgaatatattcaattggttgatatttaagttggtttatacatgtttaatagttgtttttccatatattgctattaatgtacaataaattgttgatcaatggaaaaaaatagacaaaaaatttcttaaagatgctaattatatttgtcattctaataattgcaacttagttgcatttcagttgaataatgcttgtactagaacaataatattattattataaatacatggtttagaattgacaatacataacttgaacatggaaaattcgatagtagtaattttttttttgttgtatttcatacagagaattattaattttttctaatttttatattaattagttctcaatatatatataactattgcattacagttttttttcacaagttaattttttaaaaaaaagactaataattaaactaataattaaaagtgatagataaaagacttatttcagttcctcatattttgcaatggatattgatagataaaagtgatctacatataatcaacaaataattaaactaataatcttttactttagtttgcagtttttttttatatatattaggtaaatatatatatatctttatatnntaaaagtgtctatctaacggcattt

SEQ ID NO: 120557 - DNA, 1389 bp, Cannabis sativa
  modified_base (1333)..(1333): a, c, t, g, unknown or other
aagtagcatttgtagaaacaaatactttcttctctttgaccatttttaaaattttagccacttgttagtaattagcaactaacttaattggttttacaattagttatagtataattgttactcggtttcccaatttcttggagctcttttactggtttatataaggagcattagttatcaattcttagtatgagctagagagataaattgtgaaaaaaagattgagagatgagggatacacaaggattgtgtgtgtttgatcacaacacctctatgtacagtgatgaactcatcatttttattatgtgagacttaattgttattaaacaaatttttaggtctactttaattaattttttatttttgcggaattttttttctttcaattttttgtgctataattatcaaatgaaaaaagaaaaatatttaatttttttaatgcattttttttactggggctatagcccccacactattgtgagtgtgttccctatgtgagtgaattttaagggcaaaacaccatttttattattgatctgatctttgaacatcaagcaatatttttttgaataaagattggtgacaatgtgtttcctcctgggaattagatctaagcgaaaagttatttgaaatggaatttcgttaaattaattgtctgttgttatcgatgctacatctttttgtcacatcatatttttgtatttaattatttttataattttacttaattattatttttgtattattttgctttattattgaaactaattcgttcttaaaacatgttaattcacaacaattataaaataatccatccttaaaactttttgaaatagccaaacaaacatacaaatctcactttgcgttctattctaactttcttttttttttcttgaaacatgagcaagacatctgaaaaaattaatgacataagttagacatgagatgagagtattccataattttaaaataataaatattttattattataataattaaaataaatataaaagtccttttaaaaaataaaatagaaaaagaaggtcaatgtgttaaatggtacgagggaggggaagaactttccaggaaattgggttggtttatatgatttgtctttcaccgcaccacatcaaaagtagataatttattacaagtattattttgtttttttaaaaaaaagaaagtaattaattggacaacattgacagctttgcattcacttattttgttctccttttattttcaaggaacgttgattttcttgggtttctaacatttaattatagtgtctaagcatgctcaatatatttttatagggaaatttgattttcnatacttacatatacttaatattttatttctaaactaatacatatcatcattgaaaa

SEQ ID NO: 120558 - DNA, 2564 bp, Cannabis sativa
  modified_base (2508)..(2517): a, c, t, g, unknown or other
gggcacaaaacccaacagtctcatcttttcataagttattttaaacagaatattcgagaaagctccattgtctatcattgtctgtgccaccgtcttgtttgaaatttgtacttctacgaccaaggggtcattgtgtgggaagatgacggggctggcatctgcatcaataaatgttattgttggctcccccacacgtggtattttaggtttcctttcttccacggcaaagattgcttcattttgttcatactgcaaggctcaagcatacttttccgtagctttgcccgagtctccagcaagatgtggacccccaataataacctgaaaaatgcatgtccactggtggaggcattaattggttttgattattgtatgcttgagcggccctttgatctagatcagccttgccattttttgtaggtgcgagttattctttctaaataaaaactcaatttcccgctacaaattattacattcgtttgtgttgtggtcgtagtccgcatgaaagtggcaaaacttgattgtatctctctttcttacatcctttttcatgagagattgttccttgtacgacaccatagactgagttgttgcataaattttctctatgtcgtctgttacgactgagagagtagtaaatttagaggcattttctccggggtgctactcagcattgcaagtgaattttcctttctttccattgccctatcttttgccgttgctagagctcttcccatttgaatttggactgctaggatattgtggaatttggacagacatccctatcgtcgtggcgcgttattgatttttcttttgctcgacagtatccctgcgccgtatagcttcttcaaacttaataaatcattctattcaatctagaaattcagccattgatcccacagttagccttttaatatccttccataactcttcgagaggctcaatgccacccagtattgcagctagtcttccttcttcagtcagccccttaacctttgtagcttcagtcatgaaccgctaatataagctttgaggggttcttttggcattttctttacttctaccaggtcttccaagtgtgagggaagctgacgagaggaagaaaattgtgcatggaactatgatgagaaggcattccatgagttaaatcttcgtggaggaaattagaaatatcattgctgggcggcctctactagtgtggcatgaacgattatgcaccgtacatcaccccttaccccttacagatctatcttcatctcaaaatattttagtcgagataaaggatcttcttttcctgtatacattttccaagtttgcattttgaaatttaggggtagttcaagaactttaattttaggcaagaaaggtgatccaattgcccagtcgagttcgagattagtgagttttgggctggtaaggccttgtaccatatctttaggttgatctatttttacttgcacgagtggatgaacttgttcagcttactgaccggcctgtgtcacattgggatctctttgaattagatcttgggtacggatacatggttggacagttggtggaacattttgtctgcctaggccccttctgcgatttaggtcagttctgaggttatgtgaggtacccaacctatcaaacactgccaggtggcctcggttgtggacttatttggccgataggttggcttgagacttcagtaatggtgaacttgttgggatgtgttattcctcttaaaggatggtctggcaagatttggtcatctaccctttggcccacagtttcgaaatgtggccttggattggatggctcgccattgtgactttgtgcagtatgcccaactgcatacccttctgatccgttcaagggaatactagctgcagtagctggttgttgattggtgacttggtaggcccttcttatcagtacggtggcatgtctagtacaatcattaatggctgcctgctgtgccctcataatttccatctctcggtccctccattctatgaatcgacgtctttgttcatagaattcaaggtttatggctgctcaaaggtcctcccgatcatgatgcagagtattattatggccttgcatgtgtccaagagcttctcgcagattttagagttcaatatcgtctcctgctggcctttgagaattggtagtggacaggacctcagtgatgtgagtggtttgatcggttgcagaactggtatttccagtctcttgtatgtttggtgtgattccaacgaaaagggaagtcactccatggcctacagtaggagtttgtgtattaacctgcttggggtttttccctggtggtcttctcgtatttccatgagtttgcacgttgggatatatcaccattgggtcgacctgatcggcaaggtctcccctacgagtttgtacaaccatcctgtttacctgataaaacttaagacaaaagcttgtattttttctctcaatgaaagcaccaaaatattgtcactgcttcttgttggaaatattttaccnnnnnnnnnntttactaccaagtatgtttcattagcatcctaatatgaattctaaaa

SEQ ID NO: 120559 - DNA, 782 bp, Cannabis sativa
aaaagtgggtatatattttaaaaaatattaaaaaatataaaaaaatataaaaaataaaaaataaagataaaaattaaaacaagtaaaataaagtgagtatacaatgtacttacaaagcccaaaagattaaacataagtaaacatgcatggatctcacaaagaaatgacctaacaacaacaaaaacaagtagattacaaaaaaggtctaaagccaatatcacaaaggacaagggagataaacacccatcattacaatgacaaagaaaacaacgcccgacctgccaggaacaaccacaacaatccatacaaaatgactagacaaatcacaccatcaaacaaaaaccacacggtaaaagagacaaaacaatgcgagggtgcatcgcccttgagggagtgctcaagattggaaatgctagtatggaactctaaggcgcaccaaagtcaaagatcgacgatgatagaaatcccaaaatacaaagtcacaacccttcaccacacacctaagaccacccaataccaacaaccaccacaacactgtcgacaacaactattgattaaactgctaacaaaaataaaaagaagaacgatagtaccgaataaaaattctgggttgagtcgcggactaagttgctctctttaagatgttcgcaacactgcctaggaatgtgcaagcagtcagaattcgttggttgtccccaggataaaacagcccagtctatctaggggtttcataaaatacccaatccaatttaatacgtacaatccaatctaatccaatccgc

SEQ ID NO: 120560 - DNA, 1724 bp, Cannabis sativa
atctaaagtatgattgatcgtagcccatggacatttaacaagttcttgctgatttttaaaagactaaagaggggggaagatcctagaatgatagtgttgaatgaagtcgatatgtgggtacagttacatgatcttcaatcagggttcaacacggcaacgatagtaaaagacattgccaattatattggtaagtatgtagaatcggatgaaaagaacttcttggggttatggagagattatttacttgtttgtgttaccatcaatgttacaaggccacttaagagacgcatgaagctgcggaacacagaaggcatcgaattttaggtgaacttcaagtatgatgttcctacaatttgtttcatatgtgggataatggggcactctaatagattttgccctcgacgatttgatgtccttgatggtaagataattaaaccatatggggaatggatgagggtcaagccaatttgtaagaatcatacaattagagcaaagtggctgaagcaattcatggtagctatggaagatgatcctgttgatgatgctaacacggctgtcggattcgaacaccgttcactggcaaggaaagaattggttccaggtggaggaataaagatccctatgattgtggaggaaaacatgggtcaacgagctggatagttagaaagatcaatgattgataggaatattcctataaatgtggacagtgatacgttgactgatacgaatcatgaaattaataatactccaaaggaagatgattgtttgttggtggctgacttaaagagaggaagaatggagttaggcttgacatatgggccgaatgaagtaggtgatgatgtggctatgaaccgagttggggctggttcaaaaaacacgtgcttggtgggtattggtatccaggcctaccgtccattatgaaaatcttatcatggaattgccatgggctgttcaattcctaaaggatcttgtgatccaaaagcaacccagtttaattttcctttgtgaaactctcagtaaccgaactcagctggagagggtgcgggtttccttgggtttcgaaggaatgatggtggtggatgtgcaaggtagaagtggagttattgctttgctttggaaggttgaagaagaggtttcagttttaggcttctcaattaattacattgatgtaaaagtttcgattaaaggtatggtggattggagatttacggggctgtatggggaaccgaatagaggacttcgaataacaacttggaacctgttgcactctttggctgctaattcaagcttaccttggtgcgtaatgggggacatgaataatgtgtgtgctcatgaagataaaaggggagggaatcgataccctgaattcttaataaatggttttcaacaagctttgaatgacagtggattacaagccatggagctttgttgttatccatttacttgggagatgggtaggggtacttcgaattggattgaagtttccttggtcagaggtttagcgaaccttgctttgttccaaatgtttagttatgctaaactttacaaccttgagatatcgacttccgatcattcacccattttacttgagcttttcactacagatgttcagaaaagagtcacttgtttttgctttgaaaatgcatggctatgcgaaccactttgttaccaactgataggctatgataaacttcgtaggttaaccaaagatggtccattaaaaa

SEQ ID NO: 120561 - DNA, 1281 bp, Cannabis sativa
attataaaatgcccatatcaacaagatgcatattaaacaatatgacatttaatcttctagttagatgatctgctaaaatcgacttggtcttacaatattcgatcacaatgtctcccttcttgaccaagtctctaacagtgagatactttatttttatatgtttggaagcactagtaatcttattattttttgaaaagaatacaatagtattattatcacaatagattagcatacgagaggaaatagaactaattagtcgtatctctaaaattaaattctttaaccacaaagcttgcaaagataccccataacatgtgacaaactcaacatacatagtagattatgtgattaaagtctatttaacactttttcaagaaatagttgcaccaacaaaagtgaaaatataaccagaagttgactttaaatcatctacacaactaccaaaatctgaatatgaataaccaacaattcaaagattgttgacatgcttatacacaagcataaacctattcattctttgcaaatatcccatgactttcttggctgcaacccaatgatcatgtccaggatttgataaatatctcctaagaacattgactacaaaagtaatgttaggtctagtgcaaaccagagcatacataaaaatccttactatatttgcacatggggtgttcttcattgcatctctttctaagtcatttttaggacaatgtttcttagtaaatttatcctctttcagaacaggaacaacgccaaccttacataaattcatgttgaaccttttgcgcacacaattaatgtaagcttcttgagataagccaataacttttcgattcttgtcacaataaatatgaatccccgaaacaaaagatgcatgtccaagatcctttatatcaaagttggtagatagaaatttgtttggtctcatttagtaatgacaaatctctgataacaagtaaaatgtcatctacataaagaacaagaaaaatacgacgaccccactgatcttcatataaatacactggtcaaacttgttcttgacgaaaccaaatgatgtcataacctaatcaaacttcaagtaccactggagagatatctatttgacaccataaatggatcgtttcaatttttaaaccaaattgtcatttttattttcctcgaagctttcaggttgagacatataaacttgctcacacaattctccaatcagaaaaaatagttttaacatccatttgatgcatctctaaatcaaaatgtgttggaattatcttaccaggatct

SEQ ID NO: 120562 - DNA, 1131 bp, Cannabis sativa
  modified_base (1091)..(1094): a, c, t, g, unknown or other
tctctaacttattaattcctcctagcgccactataaattcagaattgtactcttaattatataaaaaactatatatgtaccaagatgtttaccaagttttttagaaatcgaataattatagagcttaagaaagtaatgaaggtgtggatgataaaataatagacaggagatttttacgtggttcaggcattaattatccttagtccacgagtctattttattaggctctttggccgatgaatgttgatacaaatacaaaagggatggactttactccgatccactatgttcctcttgaagaagatgaagcttagtaggaatattctggagttaataatagagttataataatgtgtttacaaagaattcgccttcgatcttaagatggggagtcaaaaggattaaaggtgaagaagtcgaagcttggatcagatcccccaccttgtgtgtctctaggggtatatataggtcgattccttcacaaggattgtcgttgatggatcttcatgaggatgaacccccaccattggattggtaggtggcatattttccatgtgatctttaccgatatcagattgtactggttgtactgacggtgctttggacgcgtgtcactctagagccttcctcatttgaattacccctgctcttagttgttagatcgttttgcatggtatacagggacatgcacgctttaggtgtcatgagagacaacctctaacatcgtacataggaaaggagcgagtggtgggcccttagcctggcacatgtagaccgaacccatgcgcgtcaaaggagtaccccgaattaatacttttttatggaaggtccatgatctttgtaggagccaaaggtctcgcctttcagaggagagggttgttgattcgcggacacctcccttatggtctccatttgcaaggacttcacccacagaggtctgtgaagactggtccacagggttggagccctaaccctctgggatcatggagcgaggcacttgggcagcttgatgacttcttttctctccttaattattccccgcaggctaagcgagtgaaaaagcagataatatttgttggaaattattttannnngatcttagatctactcacatgtatgttgattaacacc

SEQ ID NO: 120563 - DNA, 769 bp, Cannabis sativa
ttagatcatcccttccttccccaggcggtgtgggattgtatagcttacccggtaattccccttacggatcacgggactactgacgttcacacctatattgacctctcacaacaatccaattaacagaattaagaaaattacacaaaattaaaacatgccattgatgacccaagtttgagttttcaaactcaaacttgctcatccaccacaaaaaacctcaaatacagctgcaagaacctatttccaacttaaattaaacataaaaaccaaactacacatcactcaaaccttaacagcccctaaatcatcaatttgcatattcaacccaaaaaaaaaaacaaagctttaacagtacaagattaacagttctagggcttacctacaccaataactccttgaatctaagctgaatatccagaaaataaaagatgaacttgctggtgcttcttagcttggtggtggtcaagcaaagagggagaaagagaaatggaaattctcttgattttcttagtttttctttgttttttccataaatgaataaatgttaatgagtttatcttttgatgaattaatattagctaggtgttaactccctaggctgccacctattcccccacttgctaaattactaaagtgcccatggtgcttaaacttaagcaattttaagtctaggggtaatatagtcaagaaccacaatcccgctcaaacttagtatttaaactatctccaatattgttccactaagaaaaaggttctagacttatccatg

SEQ ID NO: 120564 - DNA, 638 bp, Cannabis sativa
tttagatctgtgatttatatatttcttaagtgttttataaactctaacaacttgtgcactttcaattaataagcttttatggaaagtttggaaaattatgttaaaggcatttgtgtctttttttgctctagcttatctgattagaatttatagttgggaacttcaaagtttttattaatttactatcctatcttctagcttgcaagttgcaaatatgtatatattgttattattttatgttgagccaaattttgtaataaaataacaatatgatttggtatatagttttctgaaatacattataatagaatagatagaagagaatggtgggtcaatggtcaaggttttgtctaactcatatattttctgggaagttcaccagtaacgcgttccaagtatttattataagattgaatattgaccatttaggcattcactacttggcttaggtgagggtaggtaagatatatatatataaataaagaatataagaatattggtaaataccctaccactacaaaaaaaattgctaccttttgtactaactttttagtcacaatataattttttgtgactaaatatgatttttagtcacaacaaaatattacttgtgactaaaacatagtctttagatacaa

SEQ ID NO: 120565 - DNA, 529 bp, Cannabis sativa
gttggcgatttgggagattttgaaaggacatgttgtagtgtcatcaatggaggttgcttccggccacatctagaacaaacctatatctaacatcgtttctttccatcctctcgaaagccttgttcacataatctgtcttcaccacctcaatcattgtcttcaaacctttctctgcccaaaactctaatagctcctcagtctcttctatgcttccgatgaagcttcctccaatagttttcttcccttcattttatatagacaagaagattaaacttttaaccgattttcaatgctagaattgttgtcaaagatgtgtgaaagcaagatagatagacatacctagaatcaagtcactggctataaactgaagtggctgaggagatgccccaactatcactagccttccttcaacctttaacaacgaaaggtaggcttttatgttgtgatgtgccggaacagtgtctagaatgtagtctagcctaccggctgctgcctccatctctgctgagtcggagctaaccaggtaaga

SEQ ID NO: 120566 - DNA, 646 bp, Cannabis sativa
atttttaacatgatctaaatgtgtaagtgtttgcattgactctcaaatttttgtatgtttttcaaaaatagaatatgatccgccaagggcatgttttgggcaaaattaatggaacaagggacgtctctcgttcgattgttctcctattgcagtgattgcttttaggtttgttcaaaaattatttctaaaatacactttgaataatttaatgtaaattatgtaattaagaatttgaagttgtaatggtgtctttatattattactctacgcattgttcttactatatttgaataatgtgggatttatataaattttcatataaacgatttattaagtgaagaccacaccaaacaaaacaattgtcattagataatattatgaaattaggatcaacataattgtttgatgtgatctttagtggttactctatcatttttttcattcttttagtgtcgtttgtctctgttttttacaagcaaataattacggctgattcttaagtatctaataaataagtaaaatgttagaaatagaatgatgttatagatgctacattgataaattaacagtgacagtctttaaataatgattggaattagaactaaattacatgatcacttattatctggtttatatatatatatat

SEQ ID NO: 120567 - DNA, 741 bp, Cannabis sativa
tacaagatccaaaaatatgtgtcagacgtgtattcattatacatccctacaatatttaatttcttcttacaacatctactcattatacacccatacaatacttaatttcacccacaccacaccatacctccttctttacacacactaatgtaaccttttataattaattaataatttcttatattatttattaaatcaaaatatgtgaaacttaacgttaaaattatctaaaataatttattacttcttgttatgtttgatatctgtatgtaccttttatcatttctcttatgctcttttaacacactttcttttcaaattaagtgttgtgaggttaattagagctttgaggttagtagtgaaattactaaagtaaaaagaaaatggtacatgaaggttgtagatcatatatgtacttaactcatatatatttgtgtataataagttggtatataactttttgtcttcttccaaaattaatttaggaacaaatacaagtttatatgtaatgtcatgcatacaaccaaatgccaacaaaaagatatcaatataaattgtatataattaatgcacacatatatacagatactcacaaaataattactactataaggacagttgtttttattaaccaaatgtaatttttagttaccaaaaaaaaagcaatttttaattaccaaaaaaaaaaagcagtgattattatgttggtctaacttttgtagtgatgcacataggatggga

SEQ ID NO: 120568 - DNA, 1943 bp, Cannabis sativa
  modified_base (40)..(48): a, c, t, g, unknown or other
aaccactttagaaacccaaacagtaaatttgaaaaaaaannnnnnnnnaaatagtatatggggtaattccctaaaaaaaaatattggcatcctataaatgtcacaaaaacggatcgtcaaatatcaccattttcaagggaaggtctctcaatcctctcctaccaacaataagactagagtcatctcgtccctcctccctatcttctgtcccttgtacctaagatttatactcaatcagcttattcagcattaatttatactcagctcttacagaagcagcatcacacggctgcagttctacattttctatagaaagctaatcaaatttacacctattttaaaaattctataaaacatgtatccttgaaaacctaagtcaccaaaacaaatatatttttttaactctcaataaagaaagtaacactggaacctgcttagtacttgaactcataactaaagttccagtataaccttaaaagcattaagaagtaatgaaatatgtagatacatcacacagctactagtgatatggaaaccaatagtgtgaacactagcaaaagatagttatcactacgttatttcaataactcattcttctttcctggagcttaatcatcaaaaatgtttcaaaagggatcagggtacccatatccacccgccaaactacaaaataattactatagctctgcagatgaacgtagaacttccatcgttctaccatgataattcaatcatgacatttgaaaggaaaagctaatgattaaaatattaaagtatacataccgtttatacagtaacaagcaaactagttaaatttacaccataatcctgcaaattttaaaaccttaaaacattttctcccatcaaccacagcaactttatcccttcttaacttacattagtaaaattgaacatctttgagaatggaatctaaatgttagatctgaacaagttacaacttgtgtcactaatcgttttgtgctaaaatttacaataaaaaaaatatcttttcccccgaaaatccctaacattctaccatgtcctggataagattgcaaattactccttgatctttttaattgacaatgataccaaccccagtctattaaattaaaataatgatgtttcaaagcttggctgttattgcatcaacaggcacactaggatgacttcttagcagctgccaaccattgaatgagattttatgattattcatgccaaacaaaccaaaattcgatatcctcttattcccaaaatcatgaattaaaaaagcactcaatcatatttctatctatcaataaattattgaatcaagaggcctacaatgaaaacatagtcatcaaccactaatggcgaaacagccacttcacagaataatctcaattcatcataacaataaaaataaattcaattgagaaattaagaggaacatattgataaaagactaaaaaaaatcaccttcaaatttcgagtgtgagctcatccttttcaccgtagaggtagtgaagaatgtaaggggtaactcggatgacggcgacccatgatccgaacatgaggacgtgcgtcttaagttgcttcagagccacagccttatcaggctttctcataaacattccaggaaacatcgttgctttgctctctttttctctcaacggaatcggcaaattgaagctttggggcgagtttctcaacggagtcagtgaaacgaaacaatgggtttagggcttttagtagggtttcgctggccaggcgcgtgttatttatttatttattttttttttttttttgagtaacctaagtttaactacaattgtaaataaatacctagatttaattttttgcggtaataatactaagttatatttgtgtaactctgtaggtaagttaaaatattatttcattatccacttgttatttttttattggtatattttaattaattt

SEQ ID NO: 120569 - DNA, 1223 bp, Cannabis sativa
  modified_base (248)..(249): a, c, t, g, unknown or other
gtaaaattcatgcaaacattaataacttcaaatttcttatattgataactaatgagattgtaaagggttttatttagggtacaaaacccaacagtttaggctataggtccaaatactttgcgcttagcaagtgaattcaattgtaattgaattgctgctttccattttggccaatcttttctattttgacattctttggcagtcttttcattagcaagtgagcatttgttaggattttatgccctaannaaaatccatttcaatataattagatttgctaatcaataaaagattggaaattattttatgttgcatggtttacatgatttatttcataattatatgtttaatgtataaattctattaaatcatgaacatatagttattcacaattacagtgatgtcatcacagtagaaagtaattgtgataatatgttttaaagtctttagtccattgatttatcagtgcactaaatttacactgacgtgataatcagcgataaagtttacttacacttgtataagtggtatgtcattttcagggcattagttaagtatactagtattgaatgttagagtataaattagactggactgatattgagagtagaatagatatcataaacttatcgttatatatttctatgttaatatcaattagttgatcttagatcaatagatcttaatattgagatggttagcttctagcctaactatattatttgtgttctttgacttgttcattaaagttgacaaaatggatcttcccaatacttatatcttaggaacatggtagtacaattgagtgagagcgctaatcatagatatggaatctatagaagatcttatttcatggcttaatagacataaatagaaaagatcttatttcaataattatattagtttactgaaatattatttttaagaaactaagtgttttaaggataaaatacattgaagggtagaatgataaatttatccctactttatgtagatcatctatagaaggtctttgattatttggattaaaacaaaggataattcatagcgtatctatatttggaacacatagagcgttttatgtaattaggagtgcaatttcaaatttatagtggagtgagttaataagataagaaatttacttggtaaattttagatctacttattgggagtttggttacataggcccatggtcccaaattgtctgagataatattgtcttg

SEQ ID NO: 120570 - DNA, 1716 bp, Cannabis sativa
taaaaaaagaggtaaaaatgatatgttttaaaaaagagaataaaaatgaaagaggacaatataaaaaaagtatagagtctaatttcctctattttttcctctattcctctattatattctagtctatggtgaaacccattgcaaaccaatgggtaattttatcatgtaaagtggtagtttagtttgtaacactttgcttcaagtctttattgggctttcaccatatacttatgatttttatacactgatacgtctttatcatgatttttattttagatcaaacacgcttaactatgaagttctactgtgatgagctaccaaaaactaagatacacatgttggtataagtagtaccaatcaatctatttaagtcatctttaaatatttattctcatatttacacaacctaaaaatcattatcttttttaaataatgtagaattatacagtttacctaatatttctcccaacaaatcacaaaactacttggtgttaaatgttgtggtagttataaatacaattttataacaactaataagaaaaatataaataaaagtgaaacaattataattaaataataagaataatgaaacaacaatcaagattggcagcttgtcgtttccaaaaaggtgtggcaagttttattgtcgttgactactttgtttccaaacttcgatgtcgtttttgtttttagtcatcaattccaattatagtgtttattttcatataagctatcttgtcgtattttaaatttttggccaaaacattggaatgtcgtttttaaggttacaataaaatttttattcaattcaaaaagaccattgatggtccacagctgagtttatttgacaattaaataaatacgtataaaattaatacccataattacttaataaaaaacgtatcaaattaaataattaacaagtacataataatacattaaaactagtactttcgaaataaatagcaaaatccaaataccttatataataggaaaatatatttataattaattaagtttgttggtgtgaataaaaatgggcatttcccttagaagtgaagcttaggaaaaaaacaaagactttacacacttaaaaggttcatttatttggtgtattttagtaccaacccattatatatatacaatataaaaatgccacatgaatatattaaagatttccccatgaaaaataatatatattaatatattaacacaattcaaatcatatatagatataatgtcaatttcattaggtcattcattgtttggacttataggcaaaaaataacctatttcatatttcaacttgcaaatagactatagttttaaaaaatcaatatacaaaattattttcttatttagctagttgaaaatagggaaaaataattagttaagattggtctaatagaaatgatttggagctacacactaaaaagatgtaattattcccaagttataataaactattaactagttttaatcataattttataaaatgataaatattattttggatcttgtattttacaaaaattatttattagatcatttattttgtaaaacaaacaaattggacttagtatttttcgatatagtatcaatgtaacgtccccgctgttagagattttataacaatggaagaaaatcaagatttattacaactctattgtaaaataatacaaggactaaaataagagattgattaaatatatgcta

SEQ ID NO: 120571 - DNA, 1273 bp, Cannabis sativa
acttttattgtggtgaaaatttctggtttatacaaacatatacaaactagtataagggtccttgaaaagttacataactttcattggtgatcgcattgtgtaccttctatatcatttcaaagcttcactcttgtctgttctttatcctatttgtggtggtgggatgttttgtagtttgttctaagattcaactagttggttacctaacattttgctggttgtgtcattactgaccaatatatgtttctggttctgctacaatagtaatgaaaagtgaatgtaaaattagttggagcattgtatcctatacaccatgttaaaatatcatttgatttcttcttttatagacccatgacatgagaatgagattagaaggtggcattagtgttcttgcatttcattcttcttctgttgatgtcttactttttctctgtagcagaaagtgattctataatggagattgtgggggagaacacatttgcagatcaaaaggctcatcacagatgtagacgaaagaaacatgattgtagaatggttgattcagtgaggtaatgaaagaattttgttgagaagtatatgaactttcttacagattattttggttcttatttttgtcacaagatatcctcttttaaaagttagtatttcagtacttttttcctgcactttgagaagaagcgtggaagaattccactgctatttcagtaatttggtttggacgtgttatcatagaatgtcattagattacaagatcttgttcgagtgaagtaattgcattgagcaaaaagttggggccaggaggctcaaatgctttggaatgttatttcatgtatataattaggtggtgtttggttagaggtaatgaaatggaaaggaaacaattttcattacatttatttgtttggttgcattttatagtattggaatattattctaatagaatgcctttcactgttttggtgggatgactattccgaagtggaagaaaagactattccaatatagcatgaaaaaaaaattgatggttttttattaatttttttaatgtatttttaattttattctattcttatttctattcacatttctattcctattcttacatttttatttcttccaactaaacgctacttaatttattgtaatttattgatgaattcagatgaggtgaagctggtttttaggggtgttcacaaagtatctgatccaatccaatccgcacgatccaattcaatccgcaaaatgcggatatccgcacttatgcggattggat

SEQ ID NO: 120572 - DNA, 2463 bp, Cannabis sativa
gagttatggtgtgtacatgaatgagttaaatctcttttactcccatttacactgagtccatgccataacatccatgggagtttatgaattagaattttaaatgatatcctaaatacttaataagaggtctaaggtgctcatattaggagacctagttttctataaaaaaaaaatactttgttagaaaaccttaaggcttgatagttctcaaatctacttcttagaaagcttccttagtgcttagagatatgcaaaaataaacttttggataaaggtatttataccttgttcaagtctacagaacttcattcagtaaaacagtcatagctcactcaatataatctaattgatgtgattcaatttgcgtttcaaagctgattcaatgatatatcaagtcatgtctcacacttaaataaaaattctaaaattatcggcaccaaaatttactcccaagggagatacgaaaataagctccgggttacccgcagcgggtcccgccgggctccaaaaaatagctatcaccactaagagctaattttcaccgttatttcatcatctatggtaaaaaacgtctaagttatttttttctcctatttttgtgggcctccttcacttataaaaggagagctccctaagctcattttttagtttagaaaactacccacaaggttagagcttctccctctaatttctatctctagaaattggagcttttaacacttagtcttagattgtaataccatctcgtgaaaaaataaaaactcgaagtagacgtgcttcagtactgtcgcgatacagggagtgaactactataaattggttgtgtctctcttataattacttaacaactattttattctcgccaatctagcgagcgaatgtggcttagaagtctagtctaaaattttgagtcaacacacgtcaacttcagaaacacactttttgtacagacaatccagaagagaatactcgcattctggatgggcgttcaagactgaaaacaagctatctggaagtacatccccagactgatgacaagttatccagaagactttccttacggaagacaggatatttcgaagaataatccaaactggccacaactttacgaacaaatctttctgatggacaccaagcatcccataacttctttttggagtaataactagcttcccggatgacaaaacttgtaactaactaacaactctctaccttggcttcaagttgaagttacttgaaaaattgttgctctaaatactgttgttccctagctcttttcgggctcagttgactccaatcagcttcaggctatgctcgaacttattacttggtactaccttggtaatcatatctgaaggattatcttcagtcgttactttagaatcttcacagctatttctccacaacttctcttataaaatgaagccttatatctatgtacttagtacgttcatagtgcacacaatttagggttaattgaattgcactttgattattacgatgcacaatgataaccttctggttgagttttaactcttccataaacctagttaaccaaaatgcctccttgataacttttgttgttgacagtagatactcgttccaaacatgttaaacacatagccaattaatgaatttcatgtatcaatacaccctgcataatcagagtccacataaccattgataacgtccaagtcttcactctgtttattcatgcaaaataccaattattttattaacattaaaagaaaccaattatttcattaaaagagatagaaaaaaaaaataattttatcaaaaacataataaaaaaacacaatgctaaaaaatctaaaaataatattaactttaaaaaccaatttcataacattaaaagaaaataattatctcattaaaagaagtagaaaaaccaagtttcatcaacaacataataaaaaaacacaatacaaaatattataatctaaaaacaatttacgataccaactttaaaaactaatttcatcaacattaaaagaaattaattatatttcattaagaaaagagaaagaaaaaagtttcattcaacaacaaaatgaaaaaaaaaaatacaatataaaaaattataatctaaaaataataccaactttaaaaactagttttgaacatataaattttataacaatatggggtaaagataacaaagagaattagaaagtaaaacaaatttcgtctacaacataataaaaaaatataatgcaaaaaaaaatctaaaattgatactaactacaaaaaccaatttctaacatataaatttatatgaatatacttaatacttcaatttctaatttcatactctgttttgtcatttaatcttttgtttgcttgctcaaaaataaaagttgatttaaacattcaatataggataaatatctccaagagaatcacaaactaaaataaattttgatgtatgtatatatatatata

SEQ ID NO: 120573 - DNA, 756 bp, Cannabis sativa
ctacccactataaggagattacattgagggaaaaaccccatagcctaagaaaaagacttcacccaagacgtctaatagtaggggacacctcgcatgtgactcccccaaagagcaaggcccgatgcaaaccacagacaagacccaagttcctctcaataaccctcgagagaggatgagtgaaagaatgaaggagttggagacagaagcataagacctacgccagaagatggccatagccacgcgaagagacttgaatgataatgaggagtttgatgaagaatcccctctctcgagggaggttcaaatggagccattgccactgaacttcaaggagccacatatgacaccatatgatggtaccactgacccaaagtaccctcttggcgcatttaatgagctaataaaaatgaagaaggtgtcatgtaaggaaaggtgtcaatattttgtgatcacattgaaaggagccgtgtataaatagttcaaacaattagatctagtggacgatcatgtcttggaaataactttcaaacgaattcctccagcaacatcagaccgcatgtgataatagtatgcctgtcacaagtatcaccaatgtgaagcaaggaagagaagaaagtttgcgaagctacatccagcgcttcagcaccgaggttaccaaagtaaggaaaatttccaaggatgagctcaaatttttcatagccgcaggggtacaccctgggggcaggttgtggagaaatatgttgaaaagagagttgg

SEQ ID NO: 120574 - DNA, 3694 bp, Cannabis sativa
ctctctctctctctctctcaatcgaagtagagcttcttctctggcgaccagcagcaccatctctccccctccttagtcctcaaagccccaatctctcttctcaggtcgacttcttactgcccaggacgaaggcccgatttctcatcttctcagcgccgcaccacacttctcttccccctctttatttttccgtcccgtggagcttctactcaggccagatggctctgctttggtgatcggccacccaaatccaccaaagatttggaatccctgccctcaaaagtcccaggtaccctctatgtgtgtgtttttttctttttgaaaaaatcctctatgtgtgttgttttgtctcactttctcagatttattaataatataaattggaataaaattaattataatataatataatacatatatatatatgtagagttgggcttgtgtgtgttcgcagatgtagtgagcatttcgagtagagctcgccagccaccgcagttagggatttttttttgtctcactatttctttctctctacggaggtgaactgaggcaatttaggatttgttgccaaggatagtggattaggtttgtggccgcgacagttagcatttgttgccacattgtgtatatagatctggatttttttgcatttgtattaatatatattcatattgttcttgatattgtacatatatgatttttttttttgcattataataattttgtatttttttttttgaattttaaggtgcaaataataaatttttgtgtagattttcattttgtttccattttaattttgagcaccaaacaaatacattatttgataaattaaaaaaataatgatttattctgcccaaattaacaaattgaatttttaaaaaaaatgataaaatgataattatttatatataaaaaaattaattaaaacaattagatattattttttttataaaaatatttaatgtggtggcactttttgtgagtcactatatctccaaaattattaataaaaaataaaaaaaaagaaaagaaaaagaaagatataatgacactttatttgtgttactgataccttttcagtctgacaaaatttgactttatacgcctatagtgacgcgcaaaatgttaatgtaaaagggttcagtgacacgtgtgaagtgtcactaaaaactgtctttccagtcaccctcattagtgatgcgcgttgaagtgtcacaatacagttttagagttactcaatgtgagtcactaaaacccatttttctagtagtgagagatgaatcaggccttcctggccaagtggagatggaacttgttaaatgaaaatcgatctctttgttgtaagatcttgaaagccaagtatctcagaggaaagaagctgcttaattgcaaatacaaagattcagattcctggttttaaaaaaatgtgataaaagcgaatgagatcttaagagaaggagcttgtaaagtggtgtctgatggtacgagtacaagaatttgggatgatccgtgggtggctcatggcaaatccttttaccctggttctaacgggcgacctcctgagggtttacacttggtgtctaaccttttatcagtcaatgggaaatgggatttacagaagttgaagtgtatttttgacaacgataccatctctgctattttgaaaggaggtaacccatctagccaaggaaaggagaaatggacatggaccaaagatcataatgggaggttctcgtgcaaatcggcctaccttattcaagcttttaaaagagcccctcattgcgaggtgtcccctcctctttggaacaagctctggaattgtagaatcatggagaggcataaggtgctttggtggagtatcttttctaatgcattgcctctgagggccattctcgataagagattctgtgtggatgatgttagctgcccaatttgtgggatggaggaggaatcaactgaacatttgtttcttaagtgcaacttggctttccacctttggctcccttctctatggggtatttttctggtgtcactctggtatccgtgtttgggattgggtcaagttcatctggggcttaaaaattaagggcatcaatgcggatgaagtctttttatatgctttggttgtggtggatactatttggcgcatcaggaatgaaaaggtgcacaataattatcattataatgtgaactaatgtattgtgttattcgctattcttatgccgatttacaaggtgctctccttcctgctgtttcctcaatctagagagaggtttggtggcctcctccttgggattggctaaaacttaattgtgatgttagagtgggattggaaagctcttgcattgcggtggtggctaaaaactattttggtgaggtggtttaggctaatccgacaaggttggatttctctgatggttgttgtggcgaggtagctgcgtgttgtttagctgttaaaatggcaaagctcaaggagcacaagttcatcatcatagagagtgactcaagagtggagatctatgctcttaatcaagtgtcctcggtttgggaaattgaatctattcttctttttgttggaaactctctagatgttttgatggctacatttttacatgtacacccagatcttgtaactttgccgcccacaatgtggccaagtggacctttacccaatctcttctattctgcaagatttattttgtaatgacagtgaggtctaatattatttatcaatgaacgcttattttttaaaaaaaatacagctgcaaacatgcaaaccttccccatttatcaacctaaaacctaaaattctcagtctctccctctcgttctgctctgtttgacttcgtcgatgaacgacaactcaggcagtgtgtcagagcaggaggaaacagggggctaagctctctctcattcttttgcctaaaccctaaacaacctaaatctccctctcatttatcgaaccctaaacctaaaatcgatctcagtctctccctctcgttctgctctgttcaacttcgccgaaggagagtggtcgcagcagtaggaaataaatgtccaagctctctcacattatttttcccaaagccacccagggactgaaaccctctatctctctctagctgatgctcactcttcagtcgagctataatcaccaagatttttgaactaccacaattctcaatctcaatgggcaaaggtttgattttcttcttctcaatttttttactcttattttttttttcactctttaccctaattattatgttgattcttcacttcttggagcatgtaagttatttctacaattctagaaactaaaattctaaattttgtttctgctctattatttttcttcactcttttccccaagattatatgaaattcttatttttcttacgtttattttagtgtgagattgactaatatatttttgtttgtttactaaacatttgaaaaaccgagtttttgcaaatgccaataataaatacgaaaatataaaattgtatacgtctaaagaagcagaaagtaattctgttactgcagaaactagttttgcagcgacaagaacagacagactataaaaataattgcagaaaattaaatcacttgacacaagatatttgtacgtggtatcagtgttctttcgaacactcctagtcaacgaggccacgcctagagaatgaaatca

SEQ ID NO: 120575 - DNA, 3633 bp, Cannabis sativa
tttttttttttttgaatttttataaaaatctacatagcaacaaacggagcaacccaaatcacaactaaaatttacataacagccaacatagaaactaccagatcaaccactagagcaatatttaaaatgtaaatttgaaaaaaaaaattaaaaaatggtatatgaaataattttcctataatatatatatacaaaaattgtaaaaaattgaggtgttcttgcgaagaggaaaaaaggggtatcgaagcctagttcgaagggcaaccctgtgctgcgagagaatcctgaactcccgtcaatccaggaagatgatgatgcggctacaccagaggtgttcttggatccctgtgaagctcttgaaccagaatggaaggaggtggcatcgatccctgcgaaacagaccccatctgcgatgagttgggcggacgaggctgaagctcatgatttccaggagtcgactaagatttcttggagcaaattcaaagtgaatcaggtgagaaccccctcttctaaacttaatttcactgaacctctgaaaataggtgatcgggtggtagctaaacttgatttagaggaagttgaagttgaagcttccttttggagatcttcaattgtctgtattgtcttgggggccaaccctccattcaaggtgttttgaaggtttcattaaaagaatttgggggaatttgggagttgaaagaatagtgagaatgcactctggttttacattggttagtttcaaagatgaagttacaagagatataatactagaaacgggggtcattcaattcgataagaagccggtggtgttaagaccttggaccgaggatatggatactactcagatgattaggtctgtcccggtttggatttgattgaatggattgggtttacagtattggtggaagaagaatctaagtgctcttgttagcactattgggaaacctattatggctgacaaagtcacattggaaaggtcgatgattaagtttgctagagtattggtggatgctgaaattaaggatgatcctctgagaaccatagcttttgttaatgagaaaggttagctagtggaacaatcaattgagtatgaatggttgccaaccaaatgtgcagcctgtggtatgttgggccatattgtgtcgaattgcaacaaggataaactagttagttggaagaaaaaacagcagggggacaaagagaggaatggaaacatagaggacatggctgctaaggagctgtcattgggtgataaaattggcagtacttcagctgatatggcaggtaatttctcgactgttagttcgagttgtaaagagaaccaggttattcaaagcaccaaggagtcccaggccatacagagttcgaaggagggcaatgatagttggattactcctaagaggaagggctccaaaatggttgacaaagatcagagagaggcaaagactagtaatggctttgaggctttgaaggaagcagatggggtcttcatttctaatcctgttaatggatagctgtaatataattgggtggaatgtgagagttctgaataaagtcgagaagcagcgagagttatttgagtgatgcaagttaaataaagttgattttggggctccctttgaaaccaaaattcatcatgatagagtagaaagtttagtcaataataacctggattggaattttcattctagtcaggagatttcttttagaatcttgttattttggaaggacaagagggtgaaagtggatattttacttgaggataagcagctagcccattgcgaaatcaaaatggttggttttcaagaggagtttttcctcacaacggtttatggaaaaaattagatgagtgagaggaaggacctctgggaaaaattggagagtattggtcacttgaatgaaccgtagataatccttggggatttcaatgatatgtttaattacaaagatagatgtggtgggaggaaaatcaaggatatagagatccaagatagcagaaactggcttgctcagtggcaggttgaagagcttaaaacttcaggctcgttctttacttggtccaacaaacatgaagaggggagtttagtctacttggaattagatagaatttttgctaatgaaaaatgggttgatgcttttccgaatgttgaagctagatttagatggggaaaaatatcagatcatagttattgtctcattaagcacatagcaatcaacaacagaggtctcaagccgttccgcttctgtaactactggacctcaaaagttgactacaaggagaatgttctaagcacttggagaaagaggagcaccacagatcttaaaagtctttatcaacaattatttaggatcaagcatgttcttaaaaattgctatacttccaagaatgaagatctgagcaagagttacaaagatgctaaagaagcttatagcaaagctcaagagcttgcggctaacgatcctcttagtgatgctacagctaagggggaaagaaaactttatgaggcttttttggaaactcaaaaacagtatttcagctatcttttacagaattcaaaggtgaactgggttagatatggggatgaaaacacgaattactttcattctatcatgaaaaagagaagggttgagaataaaatttgttcctttagtgctaacggggagattatagatgattacgatcgagtcattgatcacttccttacccatttttgtagctacatggggaggaaaagcacagcgactagaagtcttgattttgaatgccttgacaatggaaacaaactgaacatcttgcaacaagtgagactaactcaacctttctctaaaaaggatgtgaaaatggccttgtttggaattcactcatcaaaaagtcctggcccggacggttttggggctggcttctttaaagatctttggactgaactgggagatgagatctctacagtagtgttgggtttctttcagcatggccatcttccaaaggaggtaaatgccactaccatatctttagttcgcaagtctgagaacccccaaaatgctagtgactacagacttattgcctgttgcaataccatatacaaatgcatctctaagatgatctgttcaaggctctcaaaagctctccccgatctcatacacgagaatcaaggagccttcattaaacgcagacttctagctcataatattctgatcttgcaggacttgttgaaagggtacactcgaaagaacttatctccaatgtgtatcttgaagattgacttaagcaaagcttatgacacggtggactggaatttagttgctgatcttttaaaagggctttgcttcccatccaaattcattttatggattcaaagctgtctccatgaagctacatactctcttatgttgaatggaagattccaaggctcttttaaaggcgataagggtcttcgtcaaggagatcccatgtctccgctcctctttgtgctcataatggaatatttgaccagattactcatccagaagacgaaggagaagggttttggatttcatcctctctccaaatctcttggccttgtcaacttgtgttttgtggatgatctaattattaggttttatgccctaaataaaactctttacaatctgattagt

SEQ ID NO: 120576 - DNA, 1626 bp, Cannabis sativa
  modified_base (1584)..(1597): a, c, t, g, unknown or other
aagcaaggctcaaaataattctagataaaagagggggacaaaaatagattttttttttttttttttcacgttgctactgcataaatactgcataaatgctaagtgaaaacaatattgttttctgaaaaaatacaagtgaaaaacttctaaaaaaatccataaaaacttaagaaaaagtacgatcttaggtatcttgggtaaaaatctccaaaatctactcattggatattaggcaataaaattattaaaattatataaaggaaaaaaaaataatatggtattttctcaaacctttcattttctcttttcttcttcacgacaaacaatacataatcctgggatcaacttcaaataccatttacgagaaagaaatgtaatcatcggaaaactacttaatttgaaacttatttgattcaataaaattgatttaagcaatattgaaccacattattcaaaaaacgacaaaaaaaaacattgaacaattttatgtagtccaaattttgttattttttgcaaaattggttaaagtccaagctttgttacacctgaaatttttaattttttttttactgtgtggcagaatatttttcaaaaatactgtgcactgggttaagttttcactgttgttatacagcttctttttagttgttgcactgttgttttaattgttttattttgttattttatatttattttataaaaaataaaaattttgtaaaaacttatgtggtagtaaaattataaatttttatccaaaattcaatatttttataaaagcccatgcaatcaagcttttgtcgtactaagatcattttaaaaataaaattcaaatatattagtagatggttatattttaggacttctcaaaaatttagttacccttaagtttgtatgtgagctgttagaatgaaaccaatcacaaccattagattttatcttcttcaatccaacgtgtagaaaagtgtctctagacacaggcccaactatctatagacagattaagcttgtgtttaagtcctactcaattcgggagcaacaaaaaaaattctcttttcaaaattacacaacttgttttattaattttaaaaatatcatatttttttttttctaaataaagatcttaaaatttaatttctcttatagctcattatatttgagagccgtttgtacctatacgttacttgatgtatttatatagaccgttgttctacaattttggtaagagaaatgtgtaaattatatggagagaagtgtcggcactttcacgggatcttttctattctctctatcatatccccacacatacatttaatttcaattcacttaaaaaaaaaaggctttggggttggtcttgatctattctccaacaacaatatacaatatcaccaatataatgtaaccaaaatttaagttgtggagttatttggcaaatccaaaatttaaacgggaaattttatttataccttaaaaatttctaaagacaccccattttaataatttttattttatttaaaattaatatcattaattattttaaatttttttaacttttttcttctaattcatattcttaataaatatacnnnnnnnnnnnnnntaaattatattttaaatattatagcaaaa

SEQ ID NO: 120577 - DNA, 2958 bp, Cannabis sativa
ttatgatgatttatttgaattcaaaatgcattttatatgtcatatatggaaattttataattttgcatgttttgtgcccagtaacactggaacgcggtggaattaggcgtgtgaaaccctcagtttcctctcatggcgaagaagaaacggacggtttcgaagccgactaagagcacgacgatagtcaagacggaggctggtgacctcccttaaatccaacctgaaggggatgaaccacctgcgaatgaggttttcctacacacttgcgaaaacttagaaggagatgcaattgaagagggaccgactgagttacttgcttcccccaaaccagtgagttgggttgaaaaagtcgagaaagaggattttagtgcccaagctaaggacgtctggagcaagttcaagtccaatcaggtttgtactccatccacacgtcttgaattcactaaacctatgaaaataggggaccaatttgtttttaaattggacttagatgaggttgaatgtgaagcttcattctggaaaaactctattgtctttattgttctaggagtgtacccgctattcaaggtttttgaggggtttatccaaagagtttgggggaacctgggtattgaaaggattgcgagaatcaactctggatttactttaattagtttcagggatgaggagactaggaatctgattatggaaacaggggttattcattttgataagaaacatgttgtgcttagaccctggacaatggacgtggattcagtaagaatggtgaaatctatcccaatttgggttcggctaaatggtcttgggtttcaatattgggggaagaacaatcttagtgcgcttgtgagtaccataggaaaacctataatggctgacaaggttacgcagagcagaactatgatcaaatatgctagggtcttggtggatatggagaattctaatcatccaccaaaaactatagcatatataaatgaaatgaaacaattggttaaacagagtgtggaatacgaatggcttccataaaagtttggagcttgtgacttacttggacatacaatagggaactgtaacgaagagaagggtgctgtttggaagaagaagggaaatgcagagcagagaagtaaggctacggttgctgaaaaaactgatactgtgaaggtaggatctgaaataggaggtgagtgagtgggagaaggaggctgtcaagcagagaagactcacggcaagggagaaaataaacagcagattagtgatgacactagttccaaagaggtttggcttactcctcgtaagagaggatcaaaacaggttgctatgaatgatgagaaggctacaacaagcaatggatatgaggttctttctgaacaggttgttgaggacttggttacttccactactgtcaatccatggaagtctgcaacataatgggttggaatgtcagaggcttgaataaaagggataagcagagatcggtgttagaaatttgtagagaaaataaggttgggcttggagcccttcttgaaacaaaaataaatcatgataaggtgagagatatgataggtatgagttttcttaatgggtaatttttttcgagcattgctagtagtaaaagaataatttttatttggcaagcgaagtttgtgcatgttgaggtgttgttggataatgagaaatttattcactgcaaagtgaagatagttggtttgatagaggagttctatttcactgcggtttatggtagcagttgccccgccgagaggaagttgttatttgagaagttggctgcgttgggtatgttaaataggcctttgttaattcttggagattttaatgcgatatttaatttccaagataggaatggtggtaagcaaatcatgaccaaagacgttgaggatgctcaaaattggctttctttaggccaagtggaagaaatttgttgctccggggccgtctacacttggactaacaagcatgatatgggaaccagaatcttctccaaattggaccatgtccttattaatgaagattggttagatcaattccccaaccccgaagcctgcttcaagtgggattgtatctcggatcatagttattgcatcgtcaagagtaatagaattggcaatgtgggcatttaacccttgaggtattgtaaccattggtccttccatagttgctttcgtgagagggtgttatgttgctagaatagattttctgatgctaatacagttggtgacttagagaagaagctgctgagagtgaaacatgttttaaagaagtttaacaggaacgaggttggtgatgtagtgaatctcgataatcggtgcaaagctgatttcattacagctcaagagaatttggccagcgatcctaataacagccacttccttcaggaagagaataggctaggccaagagtatgctgctgcgttggaacaatactcttgtttccttcgacaacaaagtaaagtttcttggctgtagaatggggaagataacaccaagtatttccattctttaatgaaaaaaaggaaactggaaaatcggattacaatgtttgagtcaaatggtaaaattgttgatgactactctgaagtagtggaacattttcttaacaatttcaggaactttatgggcaagaaaagttcagctactaggaggttggatcaggattgtctccaacaaaggccaactctgaatttagaacaacaagccaaactcatcagaccctttaatgaaaaagatgtcaagaaggctatgttcggaatccattctaccaagagccctggcttagatggttttggtttggggtttttcaagagcctctggaaagagattagggcggatgtttctaaggccattctcaacttctttgaagagggttcaatgccaatatctttgaaggatgctatcattactctaatcccgaagactcaagatcctaaggatgccagtaattatc

SEQ ID NO: 120578 - DNA, 598 bp, Cannabis sativa
aagacaaaataaaatattatagttatcttatttttaacggacaacaatatttttggagatataaatcaacatgaaaagagtaggttttttatttttattttttttatttaagtgtttatatattataactatattttagttgagattcgaattcaggatttacaagacacacatccacttatgaccacttaagctagcctcaagtggttcatgaaaagattagttaatttcattcgtaacgattgctcgtataaatggtatgctttacttttaatttaatattaagatatagatctcatactttacacgtaggtatatatttatcaaaaagtaaaataaatttatgtaccgttaaataatacactaccatgcaatatatatcttatttgtattcacagatgtcacaatttagtaaatcactagtatatattataagcagtatttcattagttgatgatactttaattataaacttgactttattgacataaattgctcaattacatatatctaataaatatcgacaaagtatttatatttaaactaggtgagttttcacgtgcaattgcacctgttaaactcttcatttgattttttt

SEQ ID NO: 120579 - DNA, 2182 bp, Cannabis sativa
  modified_base (29)..(37): a, c, t, g, unknown or other
aaaaaatttaaaaaaaatattaagagtannnnnnnnnaattatttaagtttatattttttgataatggagtgtatttataatttgatggggtgcaactccctatttttttttatattttaagatatgaaaatttcaaattatttatatttaaaattaaaatactaaaataattttgattcatattatgaaaatgatgtgatatatattataaatgaaaataattattttgatttaatttatattttttttaggaaacaaaatgcatcttcacatttttgaaacaaaaaaaaaatggtattttttaattcagaaatggtgtttgtgaaatgtaaatatctaaaatgaagaactcataccattcatttattttgatttgaggtcatttattataatttttaaatttgtatttcgatttcccatttataaatcttaaaataatcataataaaatccaaggaataagcttattactctgaaaacacctgcaaaccaaaacctgcatgcatacaaccatttatgaaaattaaattatgttttactaacaaactaatcaaaaggcattatattatgaaaattaaaagtcaataccttgctccaatgctattattaagagctcttaaaagccatggattggatctctgagattcttcagcccaacatttttggaacctgaaaaagccacagcaaccataatgcatatagcagcaaagggaaattattgtgtggaaaaaattcaaaaaaaaaatataataattaaagaaatatggaaataaaacagttaaggttactcttagagtccataggagtaactagttacctccttgaactaatcaattaccttatactattttccaatacatcttaactttttttcataaaataacttttttgaagaaaaaaaaactattatatttgcaaaatagtataaaaacccataaaatatgtaatttttaatataataaaggagtatcttgatgccattatgaaaaaatttattagtaaaataactttacaaaaaatattatcaacaaaataattttttatggtcacagaaatgattataaattacactctgcaaccataaacgactattataattgcaaaataatcatagatttacactgtgcaagtatcatagtcgcataaagtaaattaagtgtggttattttataaattttaatatttcaaatagttagtttgacaaatttcacataataaaagcataagaaataaagagataaatgaagccaacttgttaattagagtctcagtttgatcccatgtatctaagtgccaaacatccttttcagtgaggggttttttgtagcctttcttcatgagtggattcaaccatccaaaatagatgactgaaagtgtttcatgatgtcagtacgaaaaaaaagaacaagaagaagaatctgaacacaattcgaattcgatcatgaaaattttgtagtgaatagataatctcttttaactaataaaaatttgttaagacactgaaaccacttgtcccaataaggccaagcttaaacaaactacttactagagagtacattagcatgcctttctggacaaacttgttctcttccatcagctagtttttcgtattcatcgttgtcaagagactcggtttgaattacattataaccaggataaggatccaagttgggaaggtacatgatcagaagagctccaaataaagccttcatgataatcatgataacatagatatttacatgaaaaagttgaaattgttgatagttaagttatagaagaaaattttggtatgaggaggaacaaacctggaaaatcacctttcctatgtagatatacattgtatgtctacaagagtgaagattaaacagctataaacatgaatattttttatataagacaagaaagaatcatattcaaaattttgaatgatttctaacccaatataagttcatcctttccatacacttgttgaaatattaaacaaaaaacagaatgaaaatctctaaaataaggttctttttcttccctattagtagaaaggacttagctattcagataataactatatatcatttcctataaattaaaataagaagaataatttacagtataaatacttaagtttaacttacggttacaaataaatatctaagtttactttttggcagtaataatacttaag

SEQ ID NO: 120580 - DNA, 1227 bp, Cannabis sativa
  modified_base (160)..(160): a, c, t, g, unknown or other
gttctctatattgctgctgtaggagcacattagaggcatgaaaagtagtatatgtgttttttttataacatttcataattagtaactttttctccacacaatattaatttagaagtgatattaaatattgtagaattataatcacttactgatttaaaancttgcaacctcaggtgcaaccaatcattcttagcctttggcaatatgacagttttctgatggtcatatctttctttcaagttttgccaaagcacaagaggatcttttacggttaaatattcagattttaacccctcatggagatgatagcgaaggaaaatcatagcattggccttattttattttgttgcagtattttaatctttgatggtgtctccaagacccatagcatctaaatagatttcatcatcaagaattcatgataaataatttttttcgaaaatatcaagtgccacaaagtcaagttttgaaagatttgccatgaagaaaacttggtcagaggctcgtgctaataacgtattatataatattataatttagagaaagaaaatagagacgagatgagaattttcttagtgttttattccaatgagtgatctcctatttatacacatataagaatcaaatattaagaaactaagaaaaaaggaatattgattacaattattaatattaataaaagaaagatttggacattcacataattattaatatttataacattttatattttctgacacttttttttttatgaattagctttagtaacacacttttgacggtttgatatgactacatgtttcttacacatttttttttatttctttctaaaatactcatttaataaatattatttccatttctttgatttgctttttttaaaatatggcaaacttcaaacgcgctatttggcgcgtcctccttccaccaccaataaataggattcacgtacatcatctttttccttataaaaatattataccgtataaaaataaaaacaaaaaatataaagatttaaaaaagaaataaaacacgtgtttcaataaaaaatgtaatattttaagcattttagtcatgtaaattttcctataattattagttagttttacattttttttttctcttctctctatttttctttttttttttcctaattctctctttttattattttttttctcaatttttttttatctttgtatgtataataagtgtatatttttatat

SEQ ID NO: 120581 - DNA, 1733 bp, Cannabis sativa
ctatgaaacacgaaaatcttaatttttgcactcacctaaacactaccaaacttatccaaataactccaaacatcacaggacacatatataccataaatgttacaatccttacgcaacagaaattgagaaagtacaggcacaagtaaaactaaaagttactcaaggacgaggtccatgactaggacgagatccgtgagtaggacacagtccataagtaggacgaggtctgccagcaactataaccaattgaatctttgtaatcacttgaacaagaaaaaacctaatctttgccaacaactcggtctaaagcaagagaatcctatctaattgcgaatagatgagttggaggagaaattcaggttgtatcaagtcggggaacaagaaaagtagtctggatatgactcggatgaggaactcgattccatccagacatcatgaatactccattacccagggattcaaaaaccctcacgtctcgtcatatgatgggacaacggatccagtctcacattttaataattttaatactatcatgcgagccatcaatgttacaaacaatttacgctatattttgttccccacaacgctagttggagcaacaagcagctggttcaacaaatttactcatcattcgatcacctcttgggaacagttgtctaaggacttcaaaaaacagttctaggatgcaagggataggagacccgaagcatccttgcttactaacataacgcaacagccgggcgagatgcttaaggcctacttaagttgttttagcacagttgctgcgaaggtgattaacttggatgatagtacccaacttactgctctttaagcagagatcgctactgatctctccactgctcgaggagagctatgggatgacctacaagttcgcccagtgaaaacattactaagttcaatgaaagagctcaagtatttgttcgaaaagaggaagccagaaaggagatgaggttgttgaagactggctcaggaagcaaacccagcaatgtctcgacaagcacagtctcaaccaaggctgataattctgcatcctctagttaaaataggaaggataagtctaaggagtcaggcaaggacaagaaaaagaaaaagaagcatgacaagtacgtgtcaatctagactatttacaccgagcttaataaaactagggaaaacatttatctcgcgcatgagcacttggtggaatttcgtaaacctaagcccatgaggcactcgagacataagagagatgcaaccaaattttgcaggaaccacaaagacattggacatacgatagacgagtgtcgtcagctaaatgatgagatagagtctctcatcgtgcgaggccacttttagaaatacgtgaaaagacatggcgatggacaaaactagcccaatccgccctataacccaagcaaccaaggattgcaacctccacctcttaaaggagaggatatcctggttctctcgggagggccacatattgcacgagagataaacaatgcccaaaaaaggtatgtgaaggaagtgaagaatgagcagtctacctttgctctggaaccttccaagaaagcaaagactgaagaaacttcgattatattctcggaggaatatagaaaagaggagaggtctcctcacatcaacccattggtaatcaccatccagctcgctaataagaggataaaaatggtgctggtggacaatggaagttcagtgaacatcctttataggga

SEQ ID NO: 120582 - DNA, 605 bp, Cannabis sativa
tacatttttaggccaaatacaagttattctattcttaatcacatctttaactttgcacacaactttatcacaatttcctatctctcgattccacaaaatattatttcgagtgcaccaaattaagtagatcagagcagttatagcagcagtatataccttctttttaaagccattgcacctagccttggacagccacctgcaaatggttttcagagatacagtcgtgacctcccaacgcagccactctttaattttgaaaaggcagttttttgagaaaatgcagcagaaggaaatgtgctcaatggtttcactgctgtccttgcatagtaggcataagtcttcttctattactccaaatctcattagcctttccatcgtttatagcttcccaagcattaccaaccacgcaataaaactatgcttgggaatattgaaccgattccaaacaatcttgtcccaatgaactctaactggctgatcatgtagagctttataaccagcagcaactatgtacctgtcttgggccgtggctattaaacctatattcttcatttgatcttttaccatcaccactttcttccaataccaactagcttggtctgtag

SEQ ID NO: 120583 - DNA, 1357 bp, Cannabis sativa
atcagtacaacgataataatcatttcatactattacctcgatcagaatcgagtaataacaaacacatatagggatctcgagcataatcgacactattacaattataatcattaatcagaaacagtgtataatacttttcttacctcggttcagaaattaagcgttcatgctggcctaagtggaaaaacaagcttgatgatcccgggtcctatgtcacgacaacaacaaaacaataaataccttaaagcaaaaattctagaaacaaaccctaattctcacaatcggacaaccctatttccccttgggtcaaactaacttaaatatccctaaaaatactctgaattcactacagaagataccctgaaccagatcagacttgggaagaaaaacccgaaattcctcccctgctggccaaaccggtcgaccggttttttgggcagccatggggattttttgtttttcaccccaaaaatcgattaaacctccaccaaacctgctcaaactttccaaaccaaaccaaaccaatccaatatgataaatataacatatctaagcaaccaattccccacaattcatcaatttactcaaaatcactttctcaatttaaaattaagctcaaatcacataactaaatacattcaatccaaacagccattaaaataacttaattcaaactctaacacattctaaaacagacctaaaaatataacctcaacctaatttaatcctacagccataaatcccaaaactctattccaaaaccaacttaaatattgaaaattgtactcctaaaagaaaagagcttacctccaaagctcctagatttatcttgggtgttcaatctgctccaaatctgagagtaattgaggagaattcctccaggttttggcaggctctaggtcacgaaggagaggggagaagagagattgatttctaattccttcttaaacataaaacccatcttttattatttaaatttgtttttttattaatacctaaatagtcagccaagacaaaaaaacaaatagaaagtcaaacactaatcctccaaaaatgactcttttacccccttaagtaaccttaaacctaaatcacatctaggggtaatttggtaattcaaactaatccgccgaatcgacaacctaaaattctaaactagtccaaaacatttctaaaataatccatcctttattgtcgtgacatttctagccactctgccgagcttccacagtcgtcgggactgaaaatattttttatttcaaaaattgtatccataacacccacatattctaaaataatctccgtaattaataaattacgcttatttaatcaataaataaattcaccctaattacac

SEQ ID NO: 120584 - DNA, 1280 bp, Cannabis sativa
  modified_base (37)..(40): a, c, t, g, unknown or other
taccattttggaaaatacagggtttattttgtcattnnnnaaaacagagggtccaattaataatttttataaaacacatagtccaaaaaggtatataaaaattttgctaaaactgttcctaagaaaaattataaaaattgtatgtatataaaaattgtacttaaagatttattgtttttttaaaagatatataagagtaaattggactaaaatatctcagaaaaattatacaatgtactctttaaaataagtctagcgatgcatctctatctgttttggtatttgggagaattttttagtgcaattttttcatagtaggttatttagaacatcttgtaaacttttgaaaaatttagaaaaatttaacatgctgaaatatggctcaaatagtctatttcagacgcgtacaaaataaaaaagtctcgcgtgcaacagaatatttgaattgtgttctcggcgtgttaattttttttttgaatctctcaaaattttgtaaaatatcttaaataactacaatatagatgaccataaaaaaattagactaaaaaattctttcgaatgctaaaacagatagagggtgcattgatagaccccttttaagaggtgcattgtagaagtatctagtatctaatattttcaaaatgttacattatatacttttttatttttggtaatttgtggcaaaatctttaaccttcttttttttttgttggcaacaccccataaattcacgtttaaaaataaatttgaagtgtcagttaaattttaccataaatgtcaactatttaaaataattttttacaatatttgaataattaaaattatttagacttataaatatatcacatatatacagatagagtagccgttctagtgacatttaatggtaaaatttagagaaattataataaatgaccctaaattataacactatgtaagtaaatatccttattataaaatttatagagaaataacccttttacactatttattatttatgtagtcttttgccacataaaaatttcatatttttaatgttcaaaatatatttttatctattttgtttagaattatagaagcatgccacataaatattatgatatatctatattaattttgttaaaatcttttttattttaaagttatgtcgagttttttgatttttttatgattgttgtggattgttggtgttagagattttattataatggaagataatcaatatatattataactctattgtaaaataatataataattaaaataagagattgattaaa

SEQ ID NO: 120585 - DNA, 4674 bp, Cannabis sativa
  modified_base (244)..(248): a, c, t, g, unknown or other
  modified_base (320)..(320): a, c, t, g, unknown or other
  modified_base (2234)..(2235): a, c, t, g, unknown or other
ttttagtacccattaatgggtattacccattaagaaatcatccatatatatatatactatgctaactaaattatatactacaattaaaatatatttaccatgataataaaaatatattccaccattgtatataataaaatagaaactaattaaatattatttaaaattattaatatatcatacaattaaaatatataaaaatataattaaatatatatagtatgccaataaaattatatacatnnnnnaaaatatttgtattatgctaacaaaattatatatcactattatacaaagcaaaataaaaaataaatatcatntaagaataataatataccatacagtaaaatagaaatatactgttcaacaaaatctatataccaacaacccacaacaactcataaaaatttgaaaaaatcgacaatactttcaaataaaaaagattttgagaaaattaatataaatacatcataatttttaagtaatttgcttctaattctaacaaaaatatgaagaaaaaaaaattgttaattttttttatgtggtaaaagactatataaataataaatagtctaaaatggtcatttctctataaattttgaaatgagaatatttactaacatagttctatgattttgggtcatttcctacaattttcctaataactaagatgtttagagttccaatcttaacaacttaactttttcactagtcccaaattttagttttgcctaaagctaaaattagcatactgccggcccacagttaacaacaacaagatatgattctcattttactattattcagtaactgagattgggtcagacattgcatatgaagaaaaaaaaaggaacttacaaaaatactgtaaaacgggaaaaagattacaaaaatactgggacacaaagatttttacattttttactctaccaaatttacaaaaatattgtgttaaggttttaaaattataaaaatattttgtttaagtaaactaaaaaataattcaaaaacaaataaaaaacaaccctagaacaacttaacaaacaacatgaaaataaatataaaacaaccagaagataactataaaataaccgaaaaataacaaaatattgacctaattgcaataagcaaaacaatatcaactcctgaatatgtttttgcattacgatttctttttactttattttgacaacttgatttatcttttagtactaaaatattatttttcttttgtatgaaatttgttggtataacattattctttcaactcttttttctcttttcggttttgagttattgatagttaaaatgatatttattttttaaaagttaaaaaaaattacattaataatagaaataataaaatcttatattgtcaaattggggtatataatatataggtaatatataattaatatgtcaatatctactactgcacatcgcgacaattaaaaaaaccaaaaaaaaataaaatcttagcattgtattttaaaaaaatgtgtcaaaatattaacaaaatatatgtgtctacatctacaaagcaacaaatgtacaacaaaacaaaaaaattatcaaaaataaactaaaaacatacaccataaaaatattccataaaaatttacactataaaaaataactattagggttaggtttagaattaaaaataaaataaaaaaagataaaatttgttttatttaaacccttatgtctgaattccttagtgcgcctaatgggtttcaattgttcaattttattgaaacttatctttcttttctcaaatgtcatcttttaattctgactatataaatgtcaattctattaatttaagaattataattaattatcaaataaaattttcatttaacttgtttatcaattagacctttcaaaatctctgaattaatgaattaaccctaaaatatcttttcttctcaaataaattaattgagtctacaagataatattatctcaactagtgtggggaccatgggtttgtataatcaagtttccaataaacagttttagaatttatagagtaaattttatatcttactaattcctcctaactccactatagattcacaatttcactcttgattatatataactctctataccaagtatagatacgctataaattatctattatttcaatctaaataaccaatgatctttcgagtagggaaagatttaccattctaccctttattatattttatccttaaaatacttanntacttgtaaatgatattccactaaactaatataattactaaaatgagtacttcactatttaatctggtttagcctagctcgaaggaaactattgtttcacctctatgtatttatagaagctatatatttcgtactatgattaacgctctaactcaactgtactactgtgttcccaagatgtaagtattggaccaatgcaattggtcggctttaacaaacaagtcaaagaacataaaaaatacacttaaactagagcctaactgtcttagatttgagatcattaatctaaaatcaactaagtgatattacttagaaaggatattacggtaagtttatgatattttttccactatgaatatcgacctagtctaatgtataaccataaatctaatacaagtttactttgctaatgtcttggaaaagatattccactatacaagtgtaagtaaacaaaattattgattactatatcagtgtaaattatgtgtacagataaagcatggaattaattagtttaatcacataatcttaattattttccactgtgtagacaataaaataataatagaaatattataagaatttactagaatttatatattaaatatatgatcatgaaataaacatgtgaaccaagcattatactaaacaattaataaaataattctattcttttattgataattaaatttaagataatattgaaataggcttttagttaggacacaaaacccaacaaactctcatttgcactaacataaaataatcaatccatttcaactaatcttaaattttctctgtgcttttaaaatgtagtctctgtcaatgttttggtgaatgggtgggctaggttgtcttcaagatcaaccatttttaccagcatgtctcctcttgccacatattctttgatgttgtggtttttcctctccatgtatttactcctcttgtggctttaaggctctatactattggcaattgcaccactgttgtcacaaagtaacactagcaattttttcatatttaaagtaacacctagctttgtaaagaactttcttaaacagactagttccttagcagcctcaatggcaggtatgtatacaaccttcatggtagagtcacaaattgtggattgcttgacacttctccaaataacttctccacccaagggtgaaaaccatccaatatgtagacttcctatcattaagacgagcttaaaaatttgagtcggtatagcctaagagatttaaagcacccccttgtggactaacacaaagttttttatcctcttcaagtatttcagaatatacttaactgtcgtctaatgttcttttcttgggttggaatgaaacctaccaacaattcccactgcataacaaatgtatggtctagtgcatacaatagcatacattagacttccaactggtgaaacataagaatattttctcataccttctacctcttggggatcagttggagcttgttccttagatagtcgcaaaccatgtctagaagacataattacccctttggcattggtcattgagaaactctctaacaccttaccaatgtaagctgcttgcgagagagcaagtgatctgttcttacgatttctaataatttggatcccgggaacataattagcttcaccgaagtctttaatttcgaaatgggtgctaagccactcttttacattagtcatcttcttgacattattgccaatgactaagatgtcatcaacataaaggactaggaatactacaacttttattatcattgagttggtaaacacaaggttcatcttcattttggtgaaagctgtaggttttgattatttgatcaaaccttttgttccaagagcaagaggactgcttaagtccataaatggacctattgagcttgtaaacttttagaattttaatttatactaaaacttgaaataaacaaaacattgtctaaattcaaaaatttgttatgaaacttgaggtgagcttttcctgtagcttggatcgacaccaatttttcattaccaacattaagcttcaactcattgtgacttaaatactcctatgttccaagtagctgcaatgaagagcaaacatggttagtagatctaaaattaacaatccaaatgatttgtcattctctaaaacacatcattcaaagacaaaagaattatcttcattcttagagttgagaagtctgtgacactttgatttaaaatgtctcttctgtccatagtgagaacataaaaaatgtgcttgcttaattattctttaattgttcttattccttgttcaatctcttgttcaagggtaactggttaagtagaagaactttccccaatcttttcaactgagcctaaagttgtagtattgttagaggattctttctcaatattctcaattcttcctttgtcatggtttgaagtgttgggtttta

SEQ ID NO: 120586 - DNA, 875 bp, Cannabis sativa
  modified_base (30)..(30): a, c, t, g, unknown or other
  modified_base (849)..(849): a, c, t, g, unknown or other
aaatcaaattatattgaaatgagttttatntagggcataaaatcccaacaggtttcactcccttagttgttgtcgtcattgatgagggaatcctcacggtgtgaagcttggttgtagggatgatctttccaacaactgcagttgatcatttgtttagtgtgggggtcaaaccaactctttctaaacaactcaaaaataaccttgtccaccgccttacaatgatagctaatgattacgtgatcacgaacctcaatgaactccaggattacactatggtatgatttgtacacaccagctcctttacctttaaaaactataaagtaaacgttgtcatacatgatggatgcttatggaatactaatatacgtacatagcagtgtgtaatgaatgaaagagtgaatagggatgtggttagattggtattgtttgggaaaattagttcaatttaaaaggcatgattgtagggctctttataagcaatgaagcattcgtctcctttacaatgatataactgaattgttgcatgattatatatgcaatttgaatctaataatacatttattgtagcaatagaacagtctccttccttaaaattaatgatataactaaattgttgcatttcatagggctcttcatattttgtagatatgcattgagaatctaataacacatttattaagaatggaacagtcgccttacttacaactaatgatcatataactgaattgttgcatgatcacaaggctcttcatatttcatgtgcaatttggattgttaagtgtgcaattttattgtagttcaagtgatgttatttgatgcacaagctctatgtaaagcccgcttagttantttggaaattagcagttatttatgtt

SEQ ID NO: 120587 - DNA, 3089 bp, Cannabis sativa
acaaaattattttaattatgttcgccaacaaggcatatttatctactcgaatttcgtacttactaacactagacatcaaattagataatattttaaatttaatacttgatatatgtaaatatattatataagtttaaacactaaagtatcccactacttgtatcagtattaaatatacacaacagtttactttctttcaaaaaaaaaaaaaataactcaacagtttaccctacaaggtacatatgtaataaaatattattgcactttttgcattctatattttttaaggcattcaaactcatggtacgcatgctttgataatactgtttcctgcttacatattttctccgccagctttacaaaacacaacaaacatttttttttctttttgtttactttcgatgtcatatataaatattcaagcgttaccagcttcacttcaaatctatcatacttctgtttgaaaacagaggcacgaattttggtaaggaaatccaacataccactaacattgaacgtgcaaattaaattattatcccattttcattttactctgtttgttgagctagaaagtgctctattttgacatctttggtgaactttttggccgaaaacatggacctcacagtatgagtatttgtttgcaacttttcttgttaaagtgaaggatattaaagaaaaaaaaataaaaaattttaaaaaattctcactactgtttctttgacttctattactatcatggggccggttatagaaaaagcaaaatcctagttgtatataactatccacgaccaaggcacagacgaatattcatgacactactatgtcccatcaatgtttatttctagattttagtcaataaaaattagatgcttttgcaattatagttctctgccagaaaatgccatataagtaccttctaggcaaactaattatttccacttccagtccatgtgctttgcctccatgaatgaccatacatcatctaaatctaattcatgctatttatcgtcactcactgttgatgatgaggataacacatatttcaatcaaaatacttctgtcatactcgagatttaacattcaatggtataaggtttgtttattactagtatatgtacaaatttgaaaaatgatgcagatattattacactgttaataaatcatgaataatttaaactatttcctaatataaagaaaaatctcaactgaagtaaaaagaaaaggaatactcaaactcaaagtcagtccttttagaaggatcaaaggattagagtatcaaaaggattgagatttggtggttatacactactacaatgtgggcctttagaggctgttttttcaactaaatttataaaaaaaaggaagctaaaaggtgtgaaaataccgtcttgttcgaaattgacatttagaggcggtttttgataaaaaccgtaagtataaaaattaataatacttatcctgtcggttgggagttgaaaattttccagcttactttattacacctatggcatcggttattagggaaacaatcgacgccataggtgcacacctgtcagtaaactgtgcccttatggtgtcgattattttctaataactagcgccatagatgatatatatacacgatatcaaacttcatcttgcccacttcgtcttcttccttccaagataaatagccaccatagcagaaccataacccatgccaaaaccctcaccaacctcccttaaaaaatcattaatctccctcatttcttcacaattttactcaatttttgttttaaaattttctattttcaatacctaaacttatactgtaaaaaagtttagttttttcccctctatcactataacccaacccattaaaaaaaggtggtggtataactccggctactgattttggtatagagatcgttgaatctcaacatccattaaggtatagatatgatttctattcattttattaatgtatattgctttattttcgtttttaaatttgttttttttggattttaccatcttattaacattatgttgttgtgtgtacatggtagccgaatttttgtcgcaattggttgttggattgcgcttataaggtaaatatttattagcttgtatatatgtatatatatattttgtgttttattgaatatgtgtttatatatattgtgtatatattatttgtgtaaattttgtagttgtattgtatatattctaagtaatatatttgtatgtatatgtatttattgtgaatgagaatgaggtaggagggatttaattagtttagaattaaagtttttaaaattgtgttaatgatataattgattatatatgtataagtgtatgttaatttttcaaaaattaatctatatattttagtaattagtaacttgttacattttttaataactagtaagtaattaaataattaaaattctaatttcgttgtattccattatattgtaggttgtgagtaatttttgagctttgacatatttcaatgttgatcggattttaacttgctataagtatatacattcactaactttttattattataattaattatcaatgcatgcttagtggagtttgaatatcttaaatattcatccgtagtgaagtaatacatgtactgtggtcagatgggtggataaattttgtattattaatgttattttgttttttttgtattgttttatttgttttgtttgttactttagacatttttaatattttgggaacgtccaattacagccgttatgttgccaaaattttagtagaattaggataaattttactaaaaaaatataaatattgaaggaaaagtacctaacatagataactagttaagtactctctagttgtaagaaaattaggtgacataatacaaataattatatacacatttatataaacttaccaattataaatgacaaaccaaacaaataaatagattcactttaggaaaaattattccattctcgaatctattccaatcaactaaacactaccctaattagttaattacaacttatacaacctaataacatgaaccaaactaaaacaagaattatagtaatgtataaattaat

SEQ ID NO: 120588 - DNA, 1739 bp, Cannabis sativa
taacattttagaagattttcaatgccaaataatacttccttcattagttaatttcagaaggtagatccataaatgcatttggataatatagcttggtctcttcaattgatcatctgataaaattaacaagttaagtcaagaatacaaatacttgtattgagtaccctttttctcataatttctgataatcagtgttttattagctcttgagaattctaaagctttaagattgtaagatgtaaaagaaaaaggagagaaaattcatgtagcagaaaacaaatatggatctgcaatttcttctcaaataatcacttgcactaacatagtgcacaaatatataatgtaacatttaatagatgaatgcctcttaacttaaacaaacactacttaggagccccttttttacctcaccatgtagagttcttttagtacaaactctcagtgaaagataaagttgaaagagcagtaagtaaatgtatggaagggaattggaatcggagtatcgaacctctatcttcgtctgttactgatcaattcctgcttcttttggggttttggtagtcatctgatcaacagcatgaactgtgttttgaagctcttcccatatggctttgtacaccattctctgtctattcactgctgattgtccctcgaaggctgaagacaccacatcgatactgcgcatcagagaacagaactaacaaaatatattaaccaaatttcgagcaactactcagaccaaataggaacttaaaccactccacctaaaaagaaaacctattaaaggagaaatgcttaattttccgtatcgacatccgcagtactcaaaaggcactaaaggttgtcagacttatgggctgatctccacaagtcattgcaaaaacaaaagtaaagagtattttcaagcgaccgggtagctcaaatggttggcctgagattttagttactcttggctactaacatagtaattgatatagtttgttttcatgttaacaaagtaaatcaagacaaaatccaagataagtcaccctaaaacttaacaagtgttttcaacttactaaagtactaataacaaatcccaactgccttaactgtctttgacagttaagttggttggtgttatttctgttgcttgaaaagaattgcccaacaagcttaatagcctatttatagtccaccacttcaataagctcctcaactaagtaattattcaagagagcaaaaaaggaagagagagttggttctgtgaattcttgagagagttagtacagacagaaagattagggttctgggttttgtattgagtttacatgtatggatgtaactcagggttgagagtgtgttcaatagagtgaaacacttgtgagatgagtttgtgccattcccattcaactgcagctgcattgtactctgattcaacatcaacaaagatacttagagttccaaagctggagtgggtgtaagttcacactgaaattgcctttgaacaaggataaattccttgtgttttatctcttattctgcttgctttaattttccaaatttttacataatagaccaaaaattaaaaaaaaaaatacattaacaaggaaaattttccatttttacgaattgaactgttttatttacaagattttctatattcttttttatagttgtcttgtggagattcggagactgctgatgaatccatgggcagacaagagacaacctgacaaactgaaacatcttagtagcca

SEQ ID NO: 120589 - DNA, 1075 bp, Cannabis sativa
agtccacgtgtcaccattctcgtgatgccacgtcagaatcccaaatttgggataacacttggtaaaggatattttttctttattgtcaacttgttcaactctcgataatcaatgcacatacgtagtgacccatctttcttcttgacaaacaaaactggtgtaccctaaggagaagtactcagcctcgtaaaccgcaagtcaaccaggttctgtaactagacttttaattccttcaatttttccagtgccattctatatggggccttagaaactagctcagcccttggtaccaattcaatctccaaattaatctttctctttggtggcagtctcggtaattcttctagaaacacatctagaaattcacacactagtcgaaccttctcctatcccttcggtgtatcctttgtggtatctattacactagccaggtatctcatacatccttcttgcaacaattccctggtcttgagtgttgatatcattagaattctgaatatttcctgtaaagataaacaaggtttcaccatctagttcaaatgtcaccatttttctcttacaatctatggtagcattgtacttggccaaccaatccatccccaggattgcatcaaaatcctctaaatctgtactgataattttcttccttctagtaatactagaagagatctaacccacttcctggagattaccacttccccagtaggcaacaaggtaccaaatccactagacatgatatcacatggcctactcaatttctcaatgattctactagagatatacgaatgtgtagcacctgaatcaatcaaaatggaaaacataataccatcaatagaaatctcacctataatagtcaaaggaccaacttgtgcatttgcctgggtcaaagcaaatacccaagtaggaaccctaaggctttctttcttgactttagtcttctatgactgcggggagttgtttctaaaatggcctagtgctccacattggaagcaggctttggtctgacattcgcctaaaggacgtcgcttgcattttgggcatttggggtaggacgacgaatgtaacaccctaacta

SEQ ID NO: 120590 - DNA, 974 bp, Cannabis sativa
aaaaaaaaaaaacaaacaaacccatcaacatgctctaaactagaataaataataagtaaaattttagtattgtgatttatatatttttatattgtgtatattttaaaattttaataaaatataaaataacgtatacatatgataaaataatttttagtgcaataatatttttcacctcacatatctatatagcctatagggtcaaaaccccaattgctgcaattaattcttttttagaaaaataaaataaaagtttgaagttttgaacttttgtgacatattgaattttaaaaatatttttaccactcaaccaaacaactttaactaatataaattgaccagataaatatttgtataaaggctaaaaatttacttagacacaagtccaaaaaggttaggatgggtgctaatttcaggtgactcaattatcctatctatgtcccaaaaagcagccatgcccatcaatcaatatcattcacaatattattatacctatcaaaattagtgaaaagggatatttatagcagaagtattcaaatatatttttttagttattatgtttgtaatactaaaatatttaaataaatattttgacagtgaatatatctaaattagtatatattagtaatactcaagtacttaatttatttttttaaccgtgaaactataaacaaattttgatactttgtaggcagatcttaagtactaaaaaataatttaggttaagtttacaaacataataatttggatgctttctataccacaaaaaaaaaaaattatttaggtatttaaggctaaaagattaacagttaattatttaataatttaaataatttttgtccataaaagaataacgtgaaaattacacaaaatatgagtttttaaaactttattacaaaaatatagtaaatttaggtttgaccactttgtatggcatatttttatttttagacttttttatggtatttactata

SEQ ID NO: 120591 - DNA, 1349 bp, Cannabis sativa
  modified_base (929)..(935): a, c, t, g, unknown or other
attgtatataaattaactccatcttttttcttttgtcaagtttacattacaaaattttatttgttaattttcattgagtagttgaggctgagaaacaatttaaatattctgaaaagcctcgtacatggaatttaatatatgtttacctttctagagcaatataatctattatatgggaagtccgatgttgtttcaagtcatcttcatcgtcaaatttcgaagaacataagctgcattggaggttaagtgttgggtggacaccattgtcgttatggttatcttgattaacttgttccattttacactgattcaagggccaaaaaaagaaaacacaacacttaaactaataattaaagatgacaattatacaaacttttaaatgtcaatccacaaagaaggtaataccagaaaattaaattgtatgtattgatctgcagagcagagccgagcctgtaaaacaaatcaagaaaaaactatcatgcatattagtcccaatcgaactgaagaataatattaacaaaactttaaatggatagggagaatcgtcactaactaaaaattacaagaaataaagaagaatcaattaatgttcattaaagaaaatctcagtgattagagtaaatcttattgactatccaacccaaaaaaaaaaaaaaaaaaacggattaaagtagagccaaagaaaaagagccactgaaaatccaaaaataattgatccaagagctaaaagtcaaaaaatgacacttgtgattcggggatagtgagcgaaaataaaagagagccaccaaaaatctaaaaataccgatccaaaaagtaaagtaaaagaaccacttgtgatcagggatagtgagctaaaaaagagccgcttatgatcaagttgtccaaggtggtgagcatataaaatagctaccatcttgaggggatgttannnnnnnccacattgctaatgtgtggaaacataatagaatgtaacttgaaataaatgtatcacgacatacctactagattggaattcaacctcttccgtttgattgttcaagtccaaaagccagagtagtaaatcttggggagaatgatatcaagaattaacgcgccaataatgtaaagacttgtaaaccagagaaatagaccagaagcagagaagagaaaaagagagagcagtaatggaataatggagagaaaaatgatcgatggaaagatggaattgctcaacttaataatgttgggctttggaacttttatttatactgagtaatagtcagagaccttacaacaagaagctaataacagaaatcaagatgttacatcaaagcaagaaaatacagttaaaacggttttgcaaactatcc

SEQ ID NO: 120592 - DNA, 1566 bp, Cannabis sativa
tcacttttcagattttgaattaggattaaatgctctgactgttctcttttgcaatgttcccatccgttagatcaaatttcttttgatctaactgtggcctataacaaggtataaaaatcaatagtatcaattcatttcgccatttttcgcatttcagaccttcaaatttcttctgcaaatcacgattacttcccctttcaacttgcatgctcgcattgtcattgacttatttcttgcgagtttcatcaaacttcatcttcaacctcagagactctcagaacccatagtttcaatcatcaaaatctcaatcgcgaaattttttttgcccaaaaatcttcatcaaaatagtgagtggctcatccccttcttccttatacttttcatttcggtatttataaattttgtcttatgatttattgtctcctttatctgctttgtttggttatttttttaggtaatttttattttatttgtgtggataatttaggattaaggaaaagatttaggttatagattcatagattcataggttaggttatattaatttttcaaaaattaggattgcacatgttcataagaatgacctaatttgatctagattttacaatcccagaattcttagaaacttactgtcctgaaaatttagcccttccattcgagtttaaaacttatgtacctaaaaccatcattgagataagcgatgccaaaattagggatcatctaataaaaaccaatcaggacgagatttcaagtcactataggcaatttttacaagaaataactgagggtaaacgtcattttttgcgagatgcagcttggcctgaaccctaaattttatctattattcctttagcaagacccttatttttacctcgagtcactgttgctttttcaccaggtgacttagattttgaaattatgacttctaaagctcaaaaatccaagactcctcaagatcccacaatcacttttgaagtagaactcatcgatttgaaagttagatccataagagcatacgttggagatctactaagatcatgtggcatcaagtaaaagaaaggatgtcgtgttaggtccgtagctccaagggaattcagctattttcctcctaaaagaataatttgagaagagggttgtagcactagtggctcttttgggataggcacttggagcctcaagaacatcagagttggagcagtactccctctgagagactaatacaaggatttttgcaattatctcgaaattgccccttttcaattatttccgagttcatatagaattttggcctttttgaaggtcttgtaccaaattatggagtgggaatgtccaactccacttgaaatcttatatttttactctgtgaaggcctgtcccgcaaggaaacgaggatcaggtggtttttattaccttgggacccacacgaatgattgaaggatcatcgtgaggttgtcgaacaaaatttgttaggctatttttagcctacgttttgggtcactttttatagttgttttccttctttgttattctttttggaatagaatatgcttgttttctttggtttca

SEQ ID NO: 120593 - DNA, 972 bp, Cannabis sativa
aaaaaaaaataataattataacaaataaatgaacattattacaaagtttataacaaattttcactacaaataaacaatattgataaatacttaaatagtaacaatattagtcgttctaaatgaaaagtagaacatttatcttgtcaaatgcaattgataacagtagtagatcttgaatgcaagctacttcaaataattaataacttaaatcactcgataactttacaattctaataaccaataactaatacattttaccaataaataactaataactttaagtaataataatatctactttataaaaatttaatataataaaatttaaaaagggaattataaactaatcataatagactaatacaaagtaatatatacaattttttcaaataactaacaaaaaaaattaatttataaaaagaaagtttagaaaacattacaaaaatatcaaacacatatatgaaaagataaaatattttaaaatagtaataatattttaaaagtataataagataaaagtaaattagaataatcacttaaaaataaaaatttataatttttatgtatattatagtaattaattatattatacgtgcatagaattttatttataatttatcatacattttattaactatgagaaacatattcttaatttatatacaaattatatatggtaaaaaataaataataaatatataaacatatataaaaaataaataattaaaatatatgttttatttataaatttgtatttaaattttaataaatacattatatcaacatatagtaatttttcaataattaataagcataagtgttacatttaaaattatttatgatcttttaataaacaaaaaaaaaaggtgtttattcaaataaatgaataaacttaagtgttttatttttaaaattattatgattttttaataaataaattatatttaatataataataaacatactaaatta

SEQ ID NO: 120594 - DNA, 551 bp, Cannabis sativa
aaatatacaataaataataaaatatttttgtcaattaaatatgtcaaaaatagaattaacaatttctttcaatatttttaaattatctaaccacacatatatatctcatatatttctctcatatgatctctctcatttattaatttaaatatatatagatagaaagattatattataacctaatatatattattaatctagatctagatacaaaaattaatgtgtaactttactccaattatttcttcctcaagcatagcaatttagtaagcattctctgtagcctggtatcagttggagaaaattctcctataggatcgagttagatcgattgacccgtgtataaaataaaatactaagttttcgatcatatatattatatagttcatgtattagttagtagtgattataattaaattgttgttatttattatttttttttttttgagaattactctatacacaatttttaactgttttttcaaatttacggtttgagtttctaaagtggttgcaacgctagttgcaataggggtttctataagattttt

SEQ ID NO: 120595 - DNA, 515 bp, Cannabis sativa
atgaaatacacgaaaacgactgcgaaaaattaaaacgacaacaaatgcgaagtggaaaatggaaatgcaagtgcactgatgaaaatttacaaactgcccaactttaataaattgttaaaattaaatggaataaatcgatcaaaaatacaactttgttaattagtcataccaactaatttgttagttatgtccaagtttagtttaatcttttgttatagtccgttaaagtttttgtaactaatttctattattttcttatatcaaagagttgtataaatgaaagtttaagctgtcagttttttttagaccaagttgaattagttagttaggatatttctttggttgttagagtcttgattcaagtagcttattttctgttacagtcggttatttgccaactgtttatgacctgttgtatctgagctatataaagctcaatccttctccttgtaaactttaatcgagcaataataaaagttttcctctgcttttgctctgttctctcttttctcata

SEQ ID NO: 120596 - DNA, 583 bp, Cannabis sativa
ttttttttttttttttgaggagagtgatggggtttgtatgtggggagattgggatgaatcgtcataatggggttgggagagaagcggaatatggttacttgaattggccatggaattggggagagttaagaaaggctagtactgtagaagagaaacaaacattaataggaaattaagcaccaccaattgagacactgttattactactttttaatatttggttaaccgtatcactgtatagtgttagatgtacatttattatgaaaaaaaatctgctgtccctaaattagtgtgcttttcttgttctaccagttatttgaggacacattatttagatctatttcacatgtattaatttagtttagagtttgttaacggattattataccttaaataggtatagatgatatgtactacaataattacgccaattaaagagagcaaattttctttcttaggtttggttgaaaagaataaaaaattaatactttaaaatgaaaccaaacaaatgaatgaaataaaaattatctcatttctattgagcattgctattaagcaccagtggtgcctagcacctttgtga

SEQ ID NO: 120597 - DNA, 1140 bp, Cannabis sativa
  modified_base (42)..(53): a, c, t, g, unknown or other
aacatgcccaaacactggattggacaaattagcctgtctaannnnnnnnnnnnctgcgtaccaaacgggcccttagattacaagtggcaagagtcacgcaatgcttggagacattcaaggaagcactccaacacatggtgttaattgtgagatgacaccttgagtctttgaatatttgttttcaagaattcagaaagtttgtgggcttttaacctttagccaactcataatacaatttgattatttgttgactttagataaacttgttacataatcttttgttatgcatctttcttgttttcagttatacaaataaacttacttttccttttgagtctatggtagaatcttatgccactataattttccaacaggttctaaaacagatagatgtattggtgtattctttttaagggggtgtattataaatttcttttttataataatttagaagttccacggatacacccaattttaacaaagtttttagtcactacagtagagcccataataacccacttttatttattacctgtcaccaattataattttagatattgactatactgatacacttattttagaggtgtccattgcagaatttttcaatattatattatatttttttagataaaatatatcttaaaatattatacaaaaatgaactctaataaccttatatatgattatttattaaaatatatgcttatgtaaaagaattttaaaaaataaaaataaaaatatcatttgtaaaattggaaaccaagaccatatatatatatatatatttatatatatacattctaaactttaactaaccatttgtgctaccatttttttatacaatatattaaactaaactttatatattatattttgtttctacatacatatatatataatataaattttaattttttcggagtctctaaaattgtatggcctgaggcctcggcccttgttgcaccaccctatgaccagtcctgtactcaccaacttttattactttatttcttttttgatgcatattatcaatttattattgtggtaggtaggtaggcatcatccaatccaatccaattgaaccgaaccgatccaatccaatctaattataaaaagttggatatccaattacaattg

SEQ ID NO: 120598 - DNA, 2789 bp, Cannabis sativa
ttcatcgttttagaagttcatgtttaggatgttaaaaacatacttgttagtaaatctaggtcctggtaaaatatattccaacagtcccaatccggatggtttgccctatcgaggttagtaccatattactgggcaatcctgaaatacaaactattacagcttaactggacatgatgcttgggataccaactatcagcaatgtgatctacacaattctagatatagaattgtattgactatccctaaattttactaatgttgtacgctcgggtctaagtacggttggggaccatccacaaaatccaagtttattacctcgggaggcatcatcttcagcttcccgaggggttatgttcttcaagtagtgggtgcgagccacataatctttatcttcctcgtcaacaagaactggaacctgctgccagtctgaatacttcgagactttgaagtccctagtggatttcttgctaccaagaagattgaaggtcttaaagttatcttcgtgtaataagaaattagctgcttgcagcccaaaaggaagaccaagaaattttttttgtctcctttcaatatctggagttgcaataggcctcctcgtaatcgttgtcaatacaacataaacaaaataagtaaaggcctacatttattaaatttaaaactcaaaacaaagtttttgagataaggcaatacttacgtattatgcgaaacacagttgtgttgataggggtgagaccagatgtccaaaagaattcgtcctttaattcatttttattaggcagcctcacaatgatcctttgatcatttgtgtgggtcccaagatagtaaaaaccacatgctcctcacttccttgcgggacatgccttcactgagtaaaagtaaagaattttgagtggggttgtgtactcccacttcaaaatatgatacagacctttaaatttgccaattctatatgaatttggtaccagttgaaagggagtgatgcctaagtagttgcaaaactccttaagatagtctttaagagggagaactgttccatctcttatgtgctcgaggccctaggcgccaatcctagatggctcgctagtactacaaccttcttctcaaatcacacgttcaggaggaaaacaactgaattctccctggggcaacaaacctaactcgacatccttgcccatacttgatgccacacgattttaatacctctccaacataagatcctatagatctaactttaactcaattagttctgcctcgaaggtaattgtagggtcttgaggggtctttgattttcatgctttcaaggctatgatctcaaaatctaagtcacctggtgaaaaaacaacattgactggaggtaaaaatagaggtctcgctaaaggaatatcaattaaattatgagattcagggcaagcaacttcttgcaaaaaatgacatttacccttagttatttcttgcaaaaatcgcctatagcgaccaaagattttgtcgtggttagttttaatgagatgatccctaatttttgcatcatttaattcaagaatgatttaggtatgtgagttttgggtctgaatggaatggcaaaaatttgagaaaaatttgattctagggattctgggattgtgatttttggaataaattaggtcatatttttaaacaatactatcccaatttttggaaaaatagaacacgagtttaacctagaaaatctatgaatcgaataaccttaaatttttcctagccctaggatcatccacacaaacaaaagcaaaattacataaaataacaaaacaatgcagataaggaaacatcaatcaaggaaaagaaattaaagatacagagaagaaaaatcaataagaggagaaagtatattacttactgtcttgactgaaattattgaagaaattggaacttcacgattgaagtcttgaagattgaaaggctgggtcctgataatttctagaactatagacgtgatttgatgtaacacgcaagaagaaggtgaaggacaacgagggtatgcaaattgtaaaagaaagcaatcacattttttcagaaagcttgaaggtttgaaaaaacgaaaatggcaaaattagctttcagtttcaattttatacccaacaagtgatcaccgttcgatcaaaagagatcaaatcgaatggatgggaatgttacaaaatgggaacagtcagggcattaaatgctcaatgatgtgcctcaaaatcctgaactgccaaaactcaaaacatgcacttttttaaaagggtttaatacgattatacccctatgatcatttaaaaagttctttttatttaaaaagcactttttagggggcaattgttatactcaaaatttggttatgtaccagaagctgatacgtgtcctacataaggaatatgaatcaactcaaggaatacaataatgacattatatcattaaatgcaattcaaataactcattctaattaaatacaagtttgatagacatgttcaaactcactgactacttagtcgtatgcaagacaagaataatttctattaaactagaattgacgagatatatgtccacctcaagataaatagagtaataaaatatacgagacaagatatccaaagacctcgtgaatcattgactctcccacacgagcaaggtgaagatagtaacattcaactgcctctcgttttacacaacaaagtagtcatctcgtaacatcaatacaaataaaagtgtacaatgagatgaattacttctacacttagtatattttcctctcaagacagataagaaggata

SEQ ID NO: 120599 - DNA, 672 bp, Cannabis sativa
  modified_base (617)..(632): a, c, t, g, unknown or other
tatgaaacttataaaaaaaacacagtaaaaaagtaaaaaataccgcctggcagtatttttgtaaataaatggcaaaagttagtataccatgtaaatttcccttaaaaaaacttaaaaagagtgttatggggattcgaacccatgatatacacctcaaccatctaagctatgactatttgttatttacaatacacttaattttactttaaataaaggttatttttttattttgggcctccgaaataagtgggtcccaggcacgggagctagcccgcctatgctagggctagccctgcaaggaaggtaccaatagtacccgaaagtggtacaagaatctctgaatgtgctttcgaaagaattatcagggtttaccaccaaaacaagaaattgacttgataatgggggcagatccagtttccaaagctttgtatcgaatgacaccagtaaaattttcatagtttttttttttttggtaaagtttacaaagtatggagttttttttagaacaaattattttgtggcaaaattaaaaagaaaaggttaatgtaagaaaaacagtttaggataaccacttacattactacaagataacgagtatatataaatatatatatatnnnnnnnnnnnnnnnnatattaaaagtgcctatttaacggaatttcttggtttaac

SEQ ID NO: 120600 - DNA, 1073 bp, Cannabis sativa
atttccttaattagaaaataatttccataaataaaatattctaataggctatacactaatttttccattcttttggtaatattttcaccaaaccatcagtgcataaagaatacttctttagattttttatataaataaaaaataataattacgaattaaaaatttacatttttttttttttaatttaaacgtttatatattacaacatgttttacctggactcgaacccaggacctctaacactcacacacccatctatggctacttgagctagcctttgttaattaaaaattcacactttcaacatagtacaaaaacctcaaagcaaaaaatcattctcagcaaaaaaaaaatcattctctttactaacactgggaccaaatacacaaacgttattataaaattttatgaaactgtgtctctcttaaaacaaaatgacctcatcactaaagcaccaaacaactaccaattaaatgaaaaatagtaaagtaaggaaaagaaaaataaaaacattgttacaaacaatcaaatccgagagggaatatataataaaaaaagtacagaaaaatcaaaatggaatgtaaggagattcgatcaagaggagacaaggttaagaaggatcagaaaacccataacacatccacattgtataactcagtcaaaaagaaatcaaaagtactcggaaacaagacctaaatttccgtacatcattcggatccagaaactagagtgaggcagacaattaccttcagatcccggcgaaacggtcgcactgaactcggaggggagttgggcgagtccaaccccagcccatgtttggtattgcatttttattttttttagctagggattcattttactatggcctcaacattgaggtaactaatatccacctcttgataacacaacactttcatttctcaggaaagctcacccaagatagacaggaacaacaacctatcatttcgtcaaacctagccgcctctgctcttcatctccttccttccatcaaccaattcttgctaaatcaggtatttctctctctcgctcgctcgctctctctctctctctct

SEQ ID NO: 120601 - DNA, 1737 bp, Cannabis sativa
atatagttttacataaaaatattgcataaaatacaattcaatataatacaatacaatacaatacgatgtaatacaacattctaaacgaactcttaataattaatcacttgtattgttttataagggtgatgttaagtactattaatgtttaataacaattttttttttcaatcttttcctttcctattccatatcggtcgagctcgagagtgagccaattattacaatttgatattacgttgtttttatttgtaagcagcagccggtaggtggacctagattcaattaattaatatatattagattatgatatatcaaaatctaattaataaactatactcttttctcctactttgaatttctggtgctatttttttctcacttcatacaattaaaatactaatttattttatataatattataattaaaactacatgtagacagggcgccccccacattaatataaaggttctgataaatatactatcatacagggttaattaatttaattaaatgtagtggtaattaattaagctttctagaaacttgtaatcattctcttgctctcttctctgttgttagggatctccaaaccctaaattttgacccctcgtaaagtgaaatatgtcggtcacatctctctttttgtaatttcataagtaaaatttataattacttgtaatttcaccgggtaatacattaagagaaagagaacggttaaaaagcattataatagcttagtatattttttggtatcatattattattggtgtaataaataacgagtcttatataactaaataaaattttttttagaccaatcatagggtgtcatttatagaagttgctagacactactagtgtgcaataataagctctaagaagagatgctaaaagggctctaacaacctcaaatgtaatattattattagtgcatttaagtattgattgagtatcatataatataatttaaaataataatttttataaagtattgttaatcaatcacaaaacaacacttctaaatagtgttaagtgctcatatattaatccacagactattaattactaaagaaatgctaaaagagacattccaatgagtcatatcgttatttgaacaattaagtattgagttttatataatttaatacattaatttttatgaattataccaatcacaaggcgtcatctttatatggtgctagccgtaagggtgcacatgggctgggttggctgggttagagttgttttaatgggccaacccaatgactgcggtttgaagtagctataaatcgtttaaattttttgtattatacaacccaaccctactttgtacaataatttagggatgggttgggttgggttcattgggttgagatgactattttaagctttaatatttaatgataaaataatttaacctagtgcatacacaataaaaataatacatgtaaatatataggtgtgtatgtgtgtatgtaaatatagtgctattaaaaaatgtgaagtggtggtggtatcattgtctgggtagcaaagttgataatagtaattgatattctcatgttaaacttgtttataaaagtagtaggataactatgaactacgtgttagtaatgtgttttggtcaatttaattactttctaaggttatcgtaataatataatttatttattaaaatataaaatctatatttttatatattttgtgaatgtaaaatatattttatatatgaa

SEQ ID NO: 120602 - DNA, 1238 bp, Cannabis sativa
caagcgtaaagatggactttacatcccgagtgatgggtcagacaagtccaagtctaatctacaatgtcttctcactactggattcgagtctgtccaatgttcttgtagaaatactgccctccattcttgtaatgttaaaaataatgtacctgcttgtactcaaaactcaacaaataaagaacattgttccactgtttctttgcctactgcttttcttacttcaagtttttaatgatgttaatacttagcattgcaagttaggccatccatccatgtccacactaagcaaactgttaccacatttaccccatacaggttctcttaagacattacagttctgtaatgcatgtcaacaagccaaaagtcatagattaccttttcccatatcccgaacctgtgttagtcaacccctagaattagttcatactgatctttggggaccctcccatatccaacaagtctcttatcaaggcccctgacccaattagaattcatagctataaagctctttagcctcgggtgatttcgattaattgtgatgcttctttgtgtgattccttatgcgattgtgggatcggggtggttggtcaggatcacttgggtcaggtgttagcttttgaagcctatttcttcaagggagtgtactctattgaaattgcagaaagtttggccattgctcaagaagttaaacttattgggtcacttaatatagccttccaagtgacattggactgtcgagttgtgattcaaccttggtagagaattttgctcgttttactgattggtttggggtgcttgcaagcattcgtttggatcctcactttataaagtatacatctgtctaatattcttttcaaacatctaattgggtagtacattgtcttgctcggttagcttgttctaatttttacaataactactggtgtggtagtgttttgggattttgccgtcgcagctgttgttgccgagttgccttgagccacttgtttgaataaagagttttgctttcaaaagaatatatgaaattttgaattcctagattgggtgggtcctgtggaggcaattctaatccgcctttactcccatatattattgagcattgttattgaacatcagtggtactcagtattttctagaggtgtcgtcagggccggccctgaaatgtagtgggctatagggtaaaaattattttttgggcccttatttagaaaaaaaatggtatttttcaaaatcagcaa

SEQ ID NO: 120603 - DNA, 799 bp, Cannabis sativa
atttaattagtgccgtacaggaaccattgatatgttccaattgaaatgtaaactgttgtatgctatttaacatacatctttattttcttatatataccaaagtttctctacatcaaaatacacaaccttctcatttttaatacaagctctgaatctcatataaagtttcataaccataagaaaagtaatggcttccaaatttcaaatcacatcaacaacactagttttagtcttagtgttaaccatatggctctctcagtctcagtgtcgaacattgaacgatgcttcaatgtcagaacaacatgagcagtggatggctcgctatggtcgaacctacaaagatgatgctgaaaaggaaattcgtttccaaatttttaagagaaatatggaatttattgagtcatttaacaaagcagggaataagttatataaattaggggtcaatgaatttgttgaccttaccaatgaggaattcaaagcctctcgtaatggttatagaaatttctctagtatttctagatccactccattcaagtatgaaagtgtgattgcaattccgtccagtatggattggaggaagaaaggagctgtcactccagtcaaggaccagggccaatgtggtaatgatgaacaagaacatattttattaattgaataaaatggtgtccctaatacatataatatatataatatcagcttatgttaattaatttgatatgaatgtattataaatatattttacaggatgttgctgggcattctctgcagtggctgccacggaaggaatcacacaattgtc

SEQ ID NO: 120604 - DNA, 1674 bp, Cannabis sativa
tatatatatggcattaattaaggacgtgctgtcgtttgttaaaattttaggggccatgtatttgagctgtcggtgagccattgaggaagttcccacgaaattaacggctttattaatatgaattatacatctatatatttatataccatgcatgaacatacacaattatatctaatcgaagaatattaggatgaagttggccggaagaggagtcactaaccccaaatttgttgagaatgttgtatatatatattatatatataattgtaacactcgtgtgtgcaactaaaataatgtttatataaatatatatattatagtactagctagcatttttttaattagggaaaaggaagtgtactaattaaaaagataaatgtgtaggaacagcatctttgaagggaagaaacgtgagagagagtggagagtggtaaaccgaaataataaagattatatataattggaaagaattttattaggtcaaaagatgatttgtaatgatattcattatcaattagtgggaaggtagttatgattaattatacatatatattgattatatatatgttaatgagctcactatagcttctacatgtacgtactatattactaaagtgctatgtatatattcttccattcttgtggttagagacacttaattgaatactagtatatatataaaggatgagtttgttgataatgaaagtaaatgatgaatcattcagaagatttagttattgccatgaagaattcagctgaactcaagtcttaccttaacgtgataaaaagaatgaaaattgatataataattaagcaactacttcgagcataagttaagatactataaaccaattaagtatatttaagggaatgacacaaaataaagtgcaacaatttttaattgtatattctaattaaatacttatgtgtttatgctttatattcataaaacgtacgatgattaattaaactattataaaattgttatggagacatgatacataaattaatgggaagaaaaaaaaaatttcactcttcactataactaaattatttaaatcgcaaccggcatgggatgcattgaaggtctattttaatagattattttttttaataaattttaatagtttaatcaattaacttaacactgataagataaaaatactaagtttttttcataagcagtcaacactattagtagctagtttgggacaattgtgttgaaagaaaaaacagttataactgtcctataaagaaattaacgtaactgcaattaaactactgagaaaaattgtacagtatatttagtaaattatagattttaaagcagcctgaattgttaaaattctaataatagttatattatattttaattaattatattaataatatatataaaaaaattatgttaagtaataatttaatgttttatgtcgttatttattattttttttcttaaaaaatatgaatttttatgtatttgctattttaaattattttttatgatatctaagaaaaaaagtacataagaaattttaggttattgaaaagaaaaaagaaccctagtttaaatgggttttgctaacataaaattataaaaataaaaaagggttgagatgcaaaatgaccataaatttggaaactaagttcgtaaatgtccactttttacaaaaa

SEQ ID NO: 120605 - DNA, 827 bp, Cannabis sativa
  modified_base (766)..(794): a, c, t, g, unknown or other
agctgcacagtacgtttaaaaaaatcacgtaatacgcctaaggtagttagggtgttacaacatatcacatttttctctcatttatatattttttaaaaaaatctaactaaattatgaccctctataaatacaactaacataaggagaaaaaaaaaaacttaaaaaattggactattatcctattgattgttttttctccgtcctttctcttttcttcttttttaattttaaggagcattatctctacatcatcagaaagttatagtcctttcttcaatttttgtataagcttttgataaaaaagaagctataatatgtgttttacttttgttgtcattttaatgatatctttgatgtttcttcaaaggatataatacctgaattattatttctatttagtaattctacattattttttatgttaatttcatgtacgtgtagctttagagtttctcttttaaatagtgttatatttaaatattttgtaattatgttatttttatttaaagattaatttacttatattctttttttcaaaaaattgtgttgcaaatgtatatgtatcaactcaagttgtaagtcttccttctttacatattattattttcaatcaaaataaacaatataattagaataatttgttgttatttatattatattatatgatatatgtgagaacataattgttgagaaagagaagaacaacaaagttatcagaaacaatattgatcaatcacggatttaaatatattgtagggtgtaacgnnnnnnnnnnnnnnnnnnnnnnnnnnnnnttcatatagagaatcattgatcaaattaggatt

SEQ ID NO: 120606 - DNA, 2339 bp, Cannabis sativa
tatatatatatatatgaatattttaggaaggggaagaggagttttgactaattaattactaatgtatatattgaaaagaaaaaagaaattttattttaatttcaaaaaatttctacgctaaatattaattattatataatatgaattttttatgtaattattaattattttgtcaaacaagacaattagaatttatctataattgtcacttttatatctaaatacacaatgtattttaaaatatagtgtaattactaattataatagactatgtaattatgtaattaatatcataataagtccttataaataacttttgtgatgcgtaatatataaaaaatattttgttcaaaatataaatttttaataattggcccccttaatgattcagtcctggctccgcccctggctgctcaaagctttgtctcacccctctttaaaaagagccaaaattgaagtttccaagattaaaaaataacaccaaggtcgcgactttacaagcaatttcctcttttcttcgctgatttttgcagtttcccgttttcagtttcctactacgacgattgataatattttggccataactctctcgatataactcagaattcgatgattcaagattttttggaaagataaaagagagatctagaattttagttaacaaagtttttccttgaaatgaatagatcatagtaaaaaattggtttgaaatttcagattttattttaagtcgtaaacggatcgtgttgaacatccaaaacttagatttttcaatttatttttgaaagcgatcactctagaccacgaatttcggagctaaaaatgcaatattttacccattttaggcaataggaaatcaatccaagctaaaagaactttcctatatttattatgttttctcatttttgccaaaattgaagatctccaaacattttttctaaaaaacaaataaaaacaaaaatcaagtgtaattctacactataaaataataaaaatactaaaacaccctctaaattagactttagaaaatacataaaaataaacctaacgtgttttaattatggatgttcaacaaaccgtcaagccggtctcaagccaattgggggccttgagccaaaaaatttaattggattttttaaatgattaattatatatatagtggtaaaaatcttaactatagtattttgaaatataattggaattttttcttaataaaaaattaaatgtaggggagttatatttaagccccaaaaaattctaattacaccccaaaattataattacatatttaacctttaataaaatgacttaaatagatatgtttaatttctttattttattttttataagtacaccccaccactcaaattttaacagaattatatatataaattgattatagaatcttttaaaaaactcctcgttaaaagatttcaaacctaaaaacacccgtcaatgaaaaaaagctttgatatttttaatatatatattttttttttttgattgagcacgggacttagtagtagttacagaaaagcaaattgccattaatacacatcaaaagaagaagataatccaattttgtttcaaatatactttttggagaaacaacattatataaatccctactcccttaaaattttaattgatgaccttcaataaaattgatccaaatatcagttcaaaattttcagctaatcaaattagtaaaatgcccatctatttcaaaaaaattcaacacaagttcaataaataccattattcccagcaagcgtttgattgaaatctatatttcaaccttacaaaataaaaatcaaaattttaacaagaaaatcttatcttttattatgaaaattcaatatacatgctacaatatattccaaaattcccaaacttaattatctgagagaataatatataattagaattaatactttttaatattttaaacaaaaatctgatctgtatagttctattagtgcaaagatgagaaaatttaaagaataaaagggtcatgggctagtgagcaatgaaccaatgttgttccaaactattcatcgacaccaattacacaaagagaactgagtgaaacacgatttgaccagagataagtagcagtcgtcaactggcggtggcttttgtaactcgcggtggttcttctaatggttggcggagcagagagcgagagtggtggaccgcaaagtcttgtgtgacaatgaagtacaggtggattcggtgcgaagtcttagctagggaaagacgtcgattatgttgaagcctaacttcttctcccgttctttgagaagttttttctttttctttttttttttaagtcttgg

SEQ ID NO: 120607 - DNA, 2225 bp, Cannabis sativa
ataatcagatcaagatgtatccgccagaccaaaaacatacaagcttcctaacagatataggtttgtattgctacaaagtaatgccctttgggctaaagaatgcaggagcaacctaccaatgtcttgtaaacaagatgtttaaggactaaatcggccacaacatggaggtctacatagacgatatgttagtcaagtctaaaaaggctggaggcacattaaggacatgaacaagtgttttggattccttcgagaatacaacatgaagctcaaccccctcaagtgctcgtttggggtcaagtcgggcaagttccttagcttcacaatgaatgttcgaggaatcaaagcaaattttgagaagatccaatctcttttggatatgaaatcacccacaagtatcaatgagatacaaagtctaacaaaccgaatagcagcactaagcagatttgtatcaaagtctacagataagtgtgttcttttcttcaacatcctatgagaaaacataaagtttaaatggacaggagagtgcaaagttgcatttcaagaattaacaaagcaacttgctcagcctcccatcctaacaaagaccctaaataataaagaactaggaatatacttggcagttacagaatttgcagtaagtgtagtccttattagagaagaaaatagagtccaacatctagtatactatgttagcaagaggctcatcaatgcagaaagttaatgccctccaatcgaaaagttaacatattgcttgtcgattgcctcgagaaaactaaggtcttactttcaagctcatcccaagtctacactaaccagtcattgagacaggtgttatagaagcctaaagcctctggccgatggcttaaatgggcaattgagctgggacaatatgagataacctaccaacaaagagtggcaataaaaggccaagttctcgctaattttgtggctgaaggtacaaatgtaatccctacagactcaaaataagagaaatagcagaagcaaaagccaaagaagaagcgagaggaagagcaaaagaatcttacatggaaataacatgtagatggttcatgcacagatcaattgtctggtacaggaattgccctcattacacttgggggcaacaacttcacgatgccatatagtttggtttcaaagcctcaaataatgaagctgagtatgaagcgcttattatcagactaaaattggcacgcgaggtctgggcagagtatttgaacatattcagcgattctcaacttgtggtaaatcatgttctgggtgaatacactgctcaaagggagaagatgatggcctacctgagcaagatacaagacttattaagtcagctcaaggggtacaccatcaaataaatccccagagaaaaatctaatagtatatgcccttacccatgctagcagcacaaaaacaaataaggccaatctagtccatgtctagtacctgccagatccaagtatctctatactagaggaagtagatatattggatgataacccaacctggatgacactaatagtagcatacctcctgtccggagtcctgccagaagataagattaaagaaatgaaaattaggagaaaagttgcatggtatatcatacataatggagtcatgtaccatcgtaattttttgatgccactcttgaggtgtgacactaaagaagaatttgcacagctaatgctcaaacttaatgaagaattttgcagcaatcatgctgaggggcagagtttgtaaaaaaaaaaatacttaaataagggtatttttggcctacaatgatcaaggactcaatggactgtgtcaagaaatgtgacaagtaccaagtaccaaaggctcttcaagatcccgagagctccgctaaacgagctcatacagatacaaactccatgttcatttgtaatatgaggaataaatcttatcaggtaactccctaaaggaaaaggaggagtacaatatgttctggtcgtcataaactattttacaaaatggattgaagttgtagctttagctactataacttcaaagaaggtcttggattttgttgttgaaaatatcatctatcggtacgatctcccacacaagattgtatcagacaatgacaaatagtttgatagcaatatgttcactgatttctataatcagcacgactttatcaaaagcttctatgcagttgctcacccacaagcaaatagaaaagtagaagttgtaaa

SEQ ID NO: 120608 - DNA, 1132 bp, Cannabis sativa
aactaagcgggctttacatgctaaatcacttttcggagacttaaacttgaaaataaaagtttccctatcaatgaaaaaacatggcaataacctaaatattgccaaaatgggaaaaactagggttcccaaaaatctccaaaccggtagaccggttcaccaaccagaattccgatgctatggggtttcctagggaccaaccggtcgacgggttcctacaagtccccctgaactggtcgacctgtttattgcaggaaacaccaaaaaccccactacaacctcaaattgactacaaaccacaccaaaccttccagacctgcttattataccatagagaacataaatcatgcaataaaacaaaccaaaacaaccagattcacaaaccaccattaaagaccaaagtttgagctctaaagctcaaaccttgtctgaataccaaacaaagccatcaaacaacatcaaaactatctaattaacctcatataagctacaaaattccttaacataaacaaacactaactacaacaacctaaggacaccaaacatgcataaccctcaacttaaaacataagaaatcaaagataaatatcttagggaggtatatgttggattggaacacttagaaacttgctggaaattcactacattgtgcagaaaaactcaaaccctagcttattctagggacatcgagagagagagagagagagagtggaaagagaaagagtgttttaatttttcttcttttttggataaaatgaataaaataaaagtgattttaacttaattaatcaacaaaaatcagaatattaagtcactaactataactcactagaagacgaaacttcttttagggaaaaagaccattttgcccccacttacccaaaaagtcacaaagcctcctatgggtaatttgatcaattttaaaatcccgacattctcaatgtctaactttattgccctgctactcctaaaatactaaaatgtgattttattagccaaacgccgcgctccaatgttgtcgggcacaaaacatgaaaaacttaaaatttcataaatggcataaataatacatcctgaattcaaataaatctccataaaattgttgggttttgtgccctaaataaaaccctttaca

SEQ ID NO: 120609 - DNA, 2245 bp, Cannabis sativa
gaaaataaatatgaaaataaaatttaagtttcaacaatacaataattagagggctttgagttgaatattcttggacctaaataaatataaaaattagtatttttatattatgcagtttggtgcggtttgagccatatattgacaatttaaaatcgcaaacggtactatactacacaatttgaaaaaaattcaaacttcgacactgtaaaaatttcatactgtattttttttatagtacaatacaataggcccactttgaagaatttgatgaacactcctaaatagaatcacctaatcacgtcctcacaataggatgggaacaactaggacagacaatcataatttaatgttttcaatgtgaagtctgattcttaattctgatccacacaaacaacaaaatctagtttgactttttcagttttattttagagttttttcatatggaaaaaaataatagaatttatttttggacaatttttatttatatataaataaatatataatattataaaaaaaatatgtaaaaaaccataattatataattttatgaatatttataaataaatatatatatttactattttaatttgttgattatttttaattaattttctaaaaaaatcacataaaattaaatatgtaaatataaaatttatatttatattatgatatattactaaaagaatatatttactaaaatttaatacaaaattaaaaaaaatacaaacatatttataaattttgtttatattttataaacagtatatataaatatttattaaatatttgattagtataattaatgtttataatgttattactaatctagtatctttatcataataataaatataatttgtttattaaaaagtcataacaattttagaaataaaatacttaagtttatttatttatttgaataaatatatttttttatttattaaaaggtcataaacaattttaaaatgtaacacttatgcttattagttattaaaaaatatatttaaaaaagtaaacaaaattgtaattaaatgtgactttatgtataaacactatttatattattattgataatatttattaattattaatctaatatatttgttatgataatatttgtaataacatatttttttttgactaaatttgtgatgatatgttgatataatgtgtttattaaaatttaaatacaaatttataattaaagcatgtatgtttattatagaagctcttgcacagttatgagctaccatatttgctgatcgcttaacaaataaaacagaaacaattttcaaattggataacaactttttacaatcataaataacttggccaaataacgaaatcatgtcaaccgagcttcttgcttgaaccaccgtaagacaatcgatttcaagtataacattctgccattcatgtgtttttatccaactcaaagcttctcgtacaccaatagattctgctaattctggtgagaccataccatattttctatagttaataaaatgtataatagattgtaaataaatttttatgcacatataatgtaattaagtattataaagtacataaagttgtaaatttctcaattatattcagggtgcgtttggtcacacttttttaatcagtcttttatttttaaaattaaaaaagtgaaatattttcaaaatcatgttctataaaactctttttacttttcaattttttaattaataatctaaattttaaaaataaaaaaaatcactttcaaaatttttttaaacagttttttaatcaatatcttagaccccgacctcaacttagaccttgaaaactgaactcgtacttgagttgacctcgcacttggacccgcccccgatcccaagttcgaaccagacctaatttaaataaaatcaacaaatgaaatgaaactaaaatttatagaacaacacttttattttttgtttttttaaattgaaaagtaaaagtgattatagaacatatttttatttttcaaaaataaaaaaattatttttatttttgtgattaaaatagttaaaaataaaagtattacctaacgccactttaatgtatcgtgaacttgaaacaactcaataacttaaacaaaatatttatcttgaggcttggacagagacttatgatatgatattataaaataatatagaataaagaaagaaatgagagaagagagaaaataaagagaagaagagaataataaaggtgctgtttggtaacacttttgttt

SEQ ID NO: 120610 - DNA, 635 bp, Cannabis sativa
ggtatatgtgtaataaaatatagagaaaaggtaaaaaagttgctttaaccgtgtgtaggtttatatgtaataaagtgtgtaatttgtatttttggtgtaaaaatttcaatttgtaaagtgtttaaaattaagtgcaatatacaattatatacatcatataaaaaaattaaaatttattcacatgctaaaaatggttaacaattgtgtttccaaaaagtgaccatactatattataagtggtaacaattcattaagtcctgaaacacaacacaatatgaatttaacataaattatgccagttagtattatgaaaaataagtataagtcgaacctgaatgaaatgataatattttgggttggattaaactcaatgacataaaattgacacgaatatgtttatatttaatatatcgttagaattatatttattttttatataataaaactctaaaaaaattgcttaaataatagcttatctatattgatattatgagtttgttcgttgtatattgatattttgtaattgattaaacaattttatttatttaaagttttatatatttttatttagtatattttttttaaatgagtcaaataaattaatacaattaaaaatagaaatttttttattttta

SEQ ID NO: 120611 - DNA, 1549 bp, Cannabis sativa
cttcctgaattcttccattcatgattatggaataggaggtcgaggttatgcaagtcatcaaccatttaataaatctttggggcatattaaaagctaccagtaagctttcaatgaaatcccaattcaccgtgtcataggccttactgatatcaatttttatagcacaccgaggtgagatatttttcctattatagttcttcaaacgatcctgcaaaatcatcacattatgggaaatagatttaccttgaacaaaggcaccttgattctgattagttatcaaaggaagaaccttggccagtctagagcagagcaatttagacacacacttgtataaagtggaacaacaagctattgggcgataatcaactgcctttgtagggttatcatgcttaggaattaaggatatcatggatgagtgaagctcggatggcataacctgtgataaagaaatcagagatggctttacaaacatcctttccaatatcagcccacatcactttgaagaatccagaattgaatccatccggtccaagagatttttgtgtcagggatgctaaaaagaacttttctgatttcattgtaggagaaggcttaagtaaaagagcttgttgatccagattcaatctagaattcgaatcaaaacttgctacaatttcattcctagtccccataaagcctttgaaatgactcatgaagtgatccacaacttcagagaagttatcgatgacaactccatgatcattagtaaaagaagcaatcccgttttcatattttctcttctttatacaagcatgaatatattttgtgttatcatcacccttttaaatccaatcgatcttacttctctgtctaaagaacttctggtacattttatcataactgttaaaattggcagaagctaccctcttttgatcctgaaaatctgaatcccctggatgagcttgagccttcatacgagcttcttgataataatctttggcttgttgaaaattcttaccaacatctccaataatctcattattgaacttcttaagaacatgcttcagtctcataagcttaaagtaaattcctttcataccaaatgctgcaagaggcttctcccagctatgtaaaaccatatctttcaaattagaatggtcagcccaaaaattgtagaatcaaagtggcttaacccctattttcatgtcagccttagtagagacaacacaggagcagtggtccgagatagtttcccaaccataatgagcagaagtatttccaaaagtctagaggagagcagtttggacacacattttatctttgattggtttgcgactatataaggaacagtctcctactgatctccaagagatagaagatattagggatgttcgtggtgcgggtggtgcagtttttgaccattttcttaaaccaacccgcacatgcgattttttaatttctcaaaccgtatccgcaccacgatactaaaaaatatcagaaactgtactgcaaaaaaaaggtgcggtgcggtacggtttttgcggtttctgcagtttagattattaccaaa

SEQ ID NO: 120612 - DNA, 1344 bp, Cannabis sativa
actattttagaaaatacaagatcattttatcatttaataaaatagagggtccaatcagtcacttttgcaaaacacaaggtccaaaataatatttaccagcaaaaacgaagcaacttttacaagatcaaataaaaacgacaattattcttgttggacataaaataaaacgacattttggggacattaattccgtcactcgagtcagttccactcctctccctctctttctccaacagtcccactcgcctctataaagcgcggaccttaacattcacagttacaagaccatacttaacctgcgcaccaccactcccactaccaccaccattaaaacccggaaccagttttacctaaacaaagtactacttaaatggaaaaggccagtactgaaacctggagacctgacccggttcacacatcctcattgttccggccaccggagactccacgagagcctatggagtttctctcacgctcttggagcgtttccgccctggaagtatctaaagccatagctccatctcatatggtcctttctaagaccatgggcggcggaggaggtggtaacggagcaataccggaggacatcgccggcgagatagaagaaggtggtgttactttttccgggaacccgttttcgtttgcttcttcggaaacttctcagatggttttggaccgtataatgtcacagtcggtaagtattgatgaagatggtgatgaagaataagaagacaaataagtgggattttatctttagtttttgtttttaactctatttatatcgttgttgtttatttttgtctttgttagctttcttctgggttttggttttttctgcaaattatataataatactaataaaataaattttcatcaaatttttgttcattttccaaatttccatttctgggtcgttcttataattttaatcggttcactctttttcctttttgttctcgcagcaagaggtatcgcctagaacttcaggcagactctcccatagtagtggtcctcttaatggaacccaaagctgtggttccttaacagacagtccaccggtctcaccctccgaaatcgacgatgccaaggtttgttgtgtcattctctttttgggttttcaacggtggccggactatgatgattgtctctttcttcttctttttttttttgttgtttcagtctgtgtagctttaaaagcaggaaaataaaacacccaagtctctgacgcgctcagagagcggtcgaaacataaatcacagctttctctctaaccaatacgcacacacctggacaacgtcatacataattggttttaattaaaaccaattcacagctctgtacaaa

SEQ ID NO: 120613 - DNA, 1702 bp, Cannabis sativa
tccaatccaaaaaaaaaaaaaaagtaaaattttaatgttaactttcatatatacatatacttttttcaagtataacaacataaatctaattactcatttaaagtaaatgaagttttttattagtttgattggatgttagatgtattggatttttggacacccaatctaatatccgatccgaaccgattggatattcaaaaatatcatccaatctgatccaatcacaattggatatccaatatttgacggtcagttataattggatcggtcaattgttcttgaattggattgatttatgcacactcttacttagcataacaatttgatttattttgcaaagtctgaatcgtcatttaagaaaacaaaacaacttttattaaatcctcactaaacatagaggttaattgttattttatatccaaaaccaaatgaattttgttttttcatttatttatcaatgcatacatagaattttttttcttattccaagagttgtttatatttatttcaaaaatacaatctgtaatcatagaatcatcttattaatttttttgtgtatctcttcttccaactcttatgtacaattgtcaccaaagaactgaaaactcttccgcgtgaagcttccaccaccaggcttagctctgggtcttctagggctttattgcattttcctttccttcctacctctctaacatttattgccctaactgccattttctttgcatttaatacctctgtctgcgttgatgattaccgaccctttttttaaaatccaaactcaccttacatcaattaccgtctcttccaagaaattaattctgatggcacatgttttaccaaattttatatgggcacaaggatctaatggtgatcctctcgtctaccgtttcagccctccctctccaatcgccaattttcagtttcttaagacccctgagaataatcattacaaccctaatgatgctcacccaagatctggagaaatctcaacaggctgacctcgagatcccccgtcttccaaggaggctctctatgtccaagtactcatcttctctcctgcttctttgctatttaaagttttatcttcccatttcctccgtctttccatctatgcttctcaactacccattttcccaaccctcgatcatggcttcctcctttcacaactcaccaagcacccttaacctaactgatgaagaaaatatcatacacgattttgatcatgtttcactccacttcggagatccactccttcaaacttccttgttttcaagatcctcacaaccaaatccccaaaacctcttttgattaaaaaagctatccgcaaggcctagacacttcatttccttgttgaaatatcaaaataccactctgggtttttccttgccacctttcaatgcgaaggtgatagggatcgtgtccatgaagatccaccatggaattttaaaaatgcctaatcatcttcactaatcttgaaggtctggacactctgtcaccagaccaattctgctttgtgcctttatatgttcatgcccatcgcaccccatttggtcaaaaatcactctaacttgcccaatttgttattgatgagttaggtgaccttttagaatctactccatgtccttgcttgaaagttttggcccttacctctgttgggcttttgtgccctaaataaaattctatttcaatgtaatcttttcta

SEQ ID NO: 120614 - DNA, 3133 bp, Cannabis sativa
taccctgattttttgattcaggggtttcaacaggccctaacggatagtggtttgcaggacatggacttatgtggctatcctttcacttgggagaggggtagagggacggataattggatcgaagtgcgacttgataggggtttggttaatcaagcttggcttgatatgttctctgctgccaaactttttaatatggaagtctcaacatcggaccattgtccgatctttatggacttaacgactgagcttccaacttctacgattggaaggttcaaatttgaaaatgcctggttgcgggagcccatgtgtatgcagctggtgaaggacagttgggagggctgtgttgagagtgatattcaaaggaaagtggctgcttgtagtgctcagttacagggctggggaaaggaatatacaggaaactttaaagaaagaatcatgcgttggaagaaggagatgaagcgctggaagtttgggcgagatgatttgtctattacgaacttcaaacaagcaaaactgaacttggttgaaacttatgcacagcgggaagttttttggcgccaaagatcaaagcagttgtggcttcaagatggggataacaacagcaagttttttcatgcttcggcttcagctcgtcgacgaaataattccattcagaaacttcaaaatgagtcaggcttatgggtggattggaacacgggattacctgatgtgatgatgaattatttctcaactcttttcacctcggcccaaacgaattggcaagaagttactgctgcagttcaatctcgagttactcatgatcagaatgaatctttgatgcaacctgtttcttgtgaggaggttcgcaaggctctattccaaatgcaccccgacaagtccccgggacccgacggtatgactccagctttctttcagaagtgttggtcagtggttggtaatgatgttattaattttgtcaattcttttttcgaatctggccattttcctactggtatcaatgctaccaacttggttttgattccaaaaaaaaagcaacctcttgatatgggagatttccgcccgattgcactgtgtaatgttctctacaaaataatttcaaaggttcttgcaaatagacttaaacatgtcttgcctacaattatttcggagacgcaaagtgctttcttgcaaggtcgtttaatttctgataatatcatgatctcttatgagattatgcattttttgaaaaggaaaagaagaagaggtcgagaggggttcatatggctctcaaattggatatgagcaaagcttatgatagattggaatggggctacattagagctatgcttgtaaggatgggttttgatggaaggtggattaatttagtcatgtactgtgttagttctgtgtctttttctattgttcatggtggacatgaaataggccctattggagcgtctcgtggaattcgacaaggagatccattgtctccttatctctttattctttgtgcagaaggtctatcatgtctcttgaaaagttatgagcaaagtggtctactcacggggtgtaaaattgctcgtcaagctccagtaatttctcatatgctttttgcggatgacagctatatttattgttgagcaacagaagaagaagcctttaatgtcaaagagttattgcatactttcgaaatggcttctgggcaaaaaataaactttacaaaatcttctgttttttatagcaataacactgttgctggcctaagagatactatatgtgacttgctgggaatatttgaggcagatgaaaatggtacctacttggggcttccatatgctattggcagaaataaaaattccatcctgggttttctcaaagataaacttaggaaaagaataaatggttgggaaggaaggatgctttcaagggcgggaaaagaagtgctactaaaatcagttgcccaagcattaccaaactatgctatgtgtgtcttcctattacctgttgatacttgtaaagagcttgaggggctcatggcaaaattctggtggaatacgggcaaatctcagtccaggggtactagttggatgagttggaaacgcatgtgtagacacaagcatgctgggggtttgggatttcgtgatttgcgtgattttaatatcgctctccttgggaaacaggcgtggaggttattgactcatgatttatctctggttgggagggtgtttaaagctcgatactaccctgcagcaaatttcctaaagtctgatttgggtgacaacccaagttttgtttggcgcagtgtgttcgaggctaaggagttgttgatttcgggtgttagtcgatcaattggtgctggaacaacagtttctattatgaatgatccatggttacctgacattaatccttttgtaatttctaaccatcctgctttgatgcatcagtcggttagtagtctcatgagaatttattctcgtagttgggatgatgatattatccaggatttatttgaggaaagagatcaagctctcatttattctattcaactaagtgatactactgtggaggatcaatggtattggaagtatgagaaccatggagggtatacggttaatagtgcatacaaacacatgcaggttttgaagggggcttggcctactgaccagtcaataactatctggcgtactctctggaatatcaaggtgcctcccaaggtctgcaattttttgtggagagcagtttcgggatgtctgcctacttgtgttaagttgcagcagagacatatccctgtaaatgcaatctgtccagtctgtaatgaggagtatgaaacaatttttcatgtccttgtcacttgtcccatagctttatcgtgctggaatagatctcgggtggatgtgggaaatgttgctgatggtgatatggacttttacaactggtttttgctggctgttaaccgtgggagagatgctgaattggaagagttggcaatggtagcttgggcaatatggaaggctcgcaatgaagttgtatggcagcaaaagagttctactgcagcaagtatagtagcatctgcaagatcaaaccttgatcaatataaatttgctcaagacagaagaggtttctctctctctcatctggtggtagatgggaataa

SEQ ID NO: 120615 - DNA, 565 bp, Cannabis sativa
gatctacatcatcacgaggctgtgtagcatcctttacaactttgactcttcccattgttgccatcctagcaacatgaggattacatggcagcgctctacgacatgtttgtttttttttggccatgactgttagtcttgtatcacgcgaggtagcaaggggacctatgtgactgtcacctccccaaatcaacactcagaatcacctgcataaaagagacaagggtaggtgagcaatttgacaaagctataaaaacaattctcatcaattgtacctaaacgtaccttccaggtaaatcacaatgtacagggctgatcatttgcaaagtaccatcctaagtacatttacttagacaaatagtgagtcctaagctgtgcactcaaccataaatgactcactaccacgtctcatacaaagttcccaaggggaaccacacataagactactgctgtatattcctctaagaccatcacgacaccctagctgaagtaaatagatgacaaaaaactggctaccttcttagaaccttggccttggccggcaagaccccatggtgccatccttggc

SEQ ID NO: 120616 - DNA, 1329 bp, Cannabis sativa
aaagaaaaaaaaaataaaaagaaacacaaatttaaagttttttatggcattcctcatgactttttcccatatttgtaagtttttttaagaaaatgtcatatatagagtaattaaatttttatgccatatatatcaaaacaatatattcattttcccatattttttgtaaatagcccaaagttaattatgttccaaggatgtggtatttttaaaaattaccttaaatttttgtatatttttttaaaggatttttttggggctaggctgagtgggccttaagctcaagcttcacccatctacagcccaaggaatttttttagactcaggcttgaccgtctaatgcccaaggccagccctcgtaacaaataaaacatagcaactaagcccactaatatagcaagagcttcagtttgtgcaatttgtatatgtataatgtacactaatatagcaagagcttcagtttgtgcaatttgtatatgtataatgtacacaaatattaaaagaaaaaaacaaaatcaagctacttacttgaattgttcagatctttggtgaggcagaaattcatgagattcaacttcagttgatgatatagttggtggagaagttccccagttcttaaatgcagcaacaaacacactaccaatcctaacaaatggacctttctcattcagtgtaatgcaataatacctataagtccttgttccaatcaagaaaacaaccaaagcaatgaccatagcaatacaaggaattccaaatccaagtgcccaactcaaattatcttgcacataactcacaacaaaaattgctactgtaccacccacacatacaccaaaataccaccaattaaagaatgaacttctacctttacattcctcaagatcatacccatcaaattgatcagctccaaaagcttgtgtgcaaggtttgtgacccccttgagcagctcctactaaatacaaggaaaagaagaacaacattacttggatctgaggaggagaacatgaaattggatcatctgtttggcagttgaaaccaatcagagttggcaaaatagctgacagagtcaataaacccaatccctattacaaattgaaacaaacaagcataagaattaagaatcgcccaattagtgttttgtttttcattgatttgatttgattgataccaaaatgtaaagcacagaagcgagaataatggtgcggaagcggccgagataagaatcggcaacgaaagctcccaatagaggtagcaacgacgccgttccggtccaggcattgacgttggctgcggccgcggccgttgactggcggagcggtccggttagataag

SEQ ID NO: 120617 - DNA, 759 bp, Cannabis sativa
  modified_base (689)..(734): a, c, t, g, unknown or other
tattgttgcacagtactagcaagctactattcttttttgtcgatagtcttaggttatccaacactgtttaatatatattattagtatataattgtgatttgcttttgatgtaaaatataaaataactatcattcaataagtgatgaagaataatatttgtaagtgccatattaatattttttagtggcaaattatgttgattgcttttatgagttgcatctcgtctgattgttcgtctaatattttgttagatgcatttgttttctctgcaattattttattggttgctaggctagcatcgagtacttcttctgtgttagttggaacaactcattgcaagttgtaatgacttagttttacatctggttaacttgattgtaccgaagtagaggttatataaaaagcttgttaagctttttctaactaattctcttcatcattgttagaatcttcttgtaattcttattttgcatgtggttaatcatgttggcccaaactcttaatctccttgttttgataattaaaaaatatttaattattatttgttactaagttgtcgattttgtagcacaagataattaactttttaaagacaaattaactttaggctaattaggttttttgtcccctgaactttaacatgtaccaaatattgccccctaatcttttaaggtcgttaaaaatacccnnnnnnnnnnnnnnnnnnnnnnnnnnnnnnnnnnnnnnnnnnnnnnattcaattttactatttcagtgatt

SEQ ID NO: 120618 - DNA, 1146 bp, Cannabis sativa
cacattgaattggccaacttttgtgaaaatgaggatcttagtgatgaaaaccaagcaatcgtaattcttaattctctataagaatcatatagagaagttaagaatgcaataaaatatggtaggatagagataactttgtaggaagtcatatctgctctggaatctaaggatctagaaatgaatatagagaagcacaatggatctcatgatgagttaaacctaagtaggagaagatctgtacacaagaaacaatggcacaaaaagggaaggagttcaagcagggattccaatagagatcatcactctggaaaaccaaagttctaaccaagaagtcctaaggatcctaatggctgctaccattgtagaaaacctggcccccttaggagagattgctatttttggaagaaaagtaagaagtataaatctgatagtaatgacactaattcgaaaaaataagacagttacaagcatagggaacatcaagaagaaaactacagtgatggctatgatagtggggaagtctatgtggctgcaactatttaaagaatgactggatcctagattctggctgcacatttcatatgacgaagaaaaaggaattactgtctagttacagggatgtcagaggaggaaaagtcatattgggaaataatcaaacatgtagaattaaaggcataggaacaatgagcttcaagatgtttgatggtgtgatcagatcacttagaggtgtaaggtatgtgcctaacatagccaaaaatttaatttcagtaagtgtgcttgatgatttgcagattgaaaataaaatcaaagatggacaaataaagctatgcaaaggatctatggtgattatgaaaggagtgaaggaagatggtctctattatctgtggggagcctatagtaagctgcaacaatattgttccaaacctgaagatgataaagcaaccttatggcaaatgagactaggccacataagtgaaaatgtgctacaaatagtcaacaatcaaaacctacttggtaaagacaaggtatctaaggtagatttttgtgagcattgtattttaggaaagcaccacagattaaagttcaatactggtacccataaatcaaaacatattatggaatatatacattctgatttatggggac

SEQ ID NO: 120619 - DNA, 1774 bp, Cannabis sativa
aaagtacaattggccatgatatcactcttaaccagtactatgcacgtactgtcgaactgacacaatggttgtgccgctataatagctcccattaatactctctgcggtgaatatcactcttaaccagtacgatgcatgtactgctcaaccgacacaatggttctgccgctatgatatcacccaaaacatatacaatcacaaacacatcatgcatatataatatattctatgctaatcttatctcatttatgaattcaagtaagttggccgacctgaacgaaaaacctcgtcctggatggatgccttagtcacatttacataaataagtaaataatgcaccaaaaccctaatccgagaaacccaaactactaagggttcccctattggtattcgttattacgataccctaattatcacaaaaatgggaaaaactaaggttcctaaaattgtcccaactggcagaccagttccccaaccggtcaaccggttcagagcaagaaaccccaaaatcactcctaacatctcaattcaaccccaaacttttcaataacttccaaaccacatgtttatactccaacaaactcaattcaagcaaaagaactcaacaaatagcttagaaattaaaaacaccattagaggaaaaagtttgagtccttaaactcatacttagctcaaacaccataagtaccaacaaactcagctcaagatatcacaaacattctcaacataactccaaaacacgaaattaggcaccagctatcactatagaacctaaactcaaaaattcaaacattaaaacctaacaaaacctttagtaacccatataatagggtttcttaggccataccttagcttagaacgctccaaacgctagctggaaattcaagaagttcattgagttggctgctactacccttgatttttcctttgagccgagtacaagagagagatagaggcaagcatgaggttttgttctttgtatattcttgagttttctaattagagaaactatgggataatgtattagtcccctctttaattaaaaaccagttgccaacacacacaagtgacacctaatcccttttcgtaaaattcataaaatgcccttgacttgaaagttaagcaacatacaagcttacgggtgaaatagtccaaaccttaaccctgcctaagcccgatattctaaatacctcttatgtttgtcccgctaagaataggttctaaatttacccatgtgactttaacagccatccattgcactatccgtcgtcgccgaacaaaatcataaaaaatttcacaattaatatttgacttaactaatactcatagagtttaataaaatctaaaaattataactctagtacctatttctaagaatgggacccacaacataataaaatcgtacataattaaatattcataactaatgctaattgtttttactaagatgtataataaacttaattatttggatgaaagattactaagaggtatccctctttatgtgactaaatcacttttgtggaaaaaataaaatattaatagtaatatacgtgtaaatttcctttcactaatattagtaaaattaattagcaataatatatacatgtatatcttactattatgaaagtggcttgttggtgtgatatttgtagactatcttaccatttaattttattacaattctatattttttttttttgtttttgtctctactctcacaatcacaagttgaagtcaaacaattatacatcattgcaaaaaaaaaaaaaaa

SEQ ID NO: 120620 - DNA, 900 bp, Cannabis sativa
gcacctacctttctccaattttaataagaaaggcacatttagttttctcaattgccacttcatccataggccaatttccagaaccttccaactaaaatggagcaacaaacttttcagaaattagtaggaaaactttccttttctttattttccggtggagataaaatgattagtcaagaaaattggtcaacaagaatcatgcctgaatcataacttccagcggctgaatgcaggaagaagtgaacctagatagtctaacagcaccacccttttcattagccagtggatgaggctcaggtgggaacacagatgtaaacctgaaagctgtgaacaacataagacattaaacctttgattacttaaagagccatttaaaatatctacagcatatataaacattcaacaacaaatctagaataaatattacagagacaagaatagtcaagacaacccacagaatctccaatgtgaaaggatttacaacattactgacatattttatataattatgactataaatttttttatcattattattacttttataagattacatatgatcacaatcaatttgaagcaaaaacttagtaaaattgggtttatttaaaaatagaaagaaaagaagtgaagaaaaatacaagagggacaacagtcatttgcaattaaaccatgcaatgaagatcgacaagaataaaacttaagagcacaagagaaacacatcagaaacttaaaaacattttatatatatcccttaattaagtaaaaagagatatttttaattatgtagctacattaaagcatataatctcaaatttctcttttattattggtcattgtataagaaactaatagtttaatatttctaaaattgatatttataattaagtttttcaataacca

SEQ ID NO: 120621 - DNA, 872 bp, Cannabis sativa
ttttccaataacctcgttgattagtaacgagctgcacagtacgttaaaaatcacggtaacacgcctatgctagttagggtgttacagtagagcttccgcgggctaaaggtgtagctcggtttggcacatcttcgaaatgccttgatccttctgggtaaatcccatactcttgacgggagcagatggctttggttcccgggactgggaagacttcagctcacggatcccttttgtgttactgatggttaggggactcctagtcacggagaccctttccgtgagttacggcttttatcctcccaaaacatcaattgaggaagttggtcggctaataatttcttagcctttcttgattaaaatccacgtgtcacgatcacgaaaatacggatataacaatagtaattaaaaaaagtgttatttattgtgagttaaaattttgatgctatcttttgtaggggtgtacattcatcggtttagtcggattatagtatatttttatcaacccatataaatatcgggttgcaaacattcaattgtaatccccccaattaaaaattagaaaaaattcaaccaacccagtaatttcgttggtttggtcgggttaacccgtccaaaccgctcttcactttttttttatacttattattcttagtttctcattcaaaaaattagatttaaaaaatataaaaatacatatttatatttcaagttaaaaaatactatagtctaaattaattttaaaaggtagacatggaaacaaatagttgctgtcaagaataagattaagcaaaaggtacacatgaatggttttgtgatgcagaaatataagatccaacaagggtaccaattgttattctctgaatatgagaaat

SEQ ID NO: 120622 - DNA, 1198 bp, Cannabis sativa
aataattcgagagaatttttaacagccaaaaaagttcaaggacatgatttaatacatgtcaaaattcggggaaaaaaaatcttaattagccaaaataaaattttaaattatatgaaataatatatttttcttaaaataaaagtgaatagaaaaaaaaatgattgcctaaagaatcacacaaatacataaatatgtatgtgtagaagcttaaaaaaaggagctaaaatggacattttgttagtgatatgagtaattttctataattatttatgtttgagatgtattgtgaagtaaatagaatatatttggttctacttaaaaatacatttatttagatattaaaaaataatttattaattaaaagttcatttcttatcgtatttttacattatattatattaaaatatgttatatatatcatatctttatttatataatactagaagtcctaattaatctgaaagttaagtaattgattttaagtttgaatttgatgaattaagactaaaatgataagtcattgaacaaagaatttacaagttttctcagacattggaaacatatttcaactgagtagtgcttaggtccctttagatctgagaagaaaagattctcttgcttccatcaagctgaactccctctagcagatcaatttcaacttctttcagatattgaagatcaacactccttcttcaatccttgaatatccaatgaattacaatctgcaacaacaacaacaacaaaaatgacaaaaaagtattttgctctaacagagcaagaatcactagaagattctcttaaatatatagagttagttagaaaaagctaattcagcttagttagaaaaaactagttcagcttatttaactaacacttcgataacatcgacttaactaactaacacactaactgatcaatccaactggcaacgagttgaaccaaaaaataaaacaaattaaaattaaaagttgacgacttagcaaaagataaatgaagttaaactaaacaggtgcatctaaaaaagacttagttgatcaacaaatagtcaaaaaaaaaaaaaacagttcagaatagggctgtaggctgtacaaaaaaaagtttaaaccgcccaaaccgaataacccgcccaaatcaaaccgaaaaaatcgataaaaattacaaatcgaaataacccgaaaaattacaacccgcccaatct

SEQ ID NO: 120623 - DNA, 2175 bp, Cannabis sativa
agcatagattatcaaatttcccaaactaaattacatacaataaacaattaaaaacacatttctataataaaaaaaaaccagttaaaatacaacaacaataacataaccagttaagaaactcaccttcttcttcttagcacgggatttcttaacctctggtttgttaggtgcatcaactggaacttcggaaccagttccaaatttagcacccacaaacgcaacattaccaggctcaacctgttaacaaaataaaaaatacaatattaaaattagttataaaccaggtataaaaacaacaagaataaaacaaaagaatcaaaaatggaataaatgaacatgaattaacaccaataaacaagagaaatgagttttaaacctggtcctttaaatttttgtaaacataatcagattgttgagaatccttctgttgaactttaggatcaacataatgaataatgtcctgaaaacattgagtagcagataataaacaaaaaaaaaaaaaaacagtaaaatacaaaaagcaaaatgaaacatgaaaatttaataacataccttacttacttcaccccttttctttttcttaatatagactattgtatgaggggacttatccattgtatataacctaaaactaaataaagaatacagagaaaacaaaacaagttaataagtgcacattaaaaaccaacaccaaatacatataactaagaaattgtacctgccaacccacataaaacaaaaaataaaataaaataaaataaaactaccacatcgtggcaaaaacaggggtaaaacagttaccacccccactaaatactctaaccaatgaaaaaaaaaatattaagaaaagcaatttaaaaaaaaaaacagaacaacaaataaaaaatcaaaatacaaaaaaaaaacataaaaatttaaatacaaataataatattaacctaaaaggtcaaatctattgcacaaaaataaccggttacattttataagcatcctcaaaaactgtattgcatgcaaatgtataaacccaaaataaacactaaaaataacaaaaaatcctctaatctggaaaacagattcaacacaaagaaaacagaaaaaaaaaacctaccaaattcatgaagattaaacaaaaattaacagagaaaacaacaaaatcaacacaaactcaaacttaaaacaaaaataaactaaatagaacaatgattaacaacgaaaataagaacacattttgaaaaaattagaaagaacaaacaccaaaacaccaaacacaacctaaaaacccaaccgatcatcccaaaaacaacaataaacccaaaaaacccagccgatcatggaaaatcatcaagaaaaacaaaaaaaaaaaaaccaacaaacattacaataccgaactataatcactaaaactaaacacattacaacaaacattatgaacaactgaaaacttacctcacttaaacaagcaactgagcttcaaaatgaccacaaccgaataacccacccacggcagcaccggttgaagcttgaaaaacaacaacaatggcagcaccgtcgaagcttgaagacgaagaacaagaaaaatatgaaggaaaagaataaaccctaagctaaaaaaaaggggaaacgaagagagactaggagagagtaacagtgagagaaaacctcttgctcagaatatgaaatgacaatgggattgattgaactgtatgaaacaatgagtacaaagttaagctattccatgcaaatgctacactagctgtagcttaattttatttattttttttttaaaaaaagaataaaatatgggaattgggccaaatataacaaatatatggctttcataaaacccataaaaaggaacacaaaacaaaaatcccatatgacaaaggctttatttaaaaatgccataaaaaagtaaatggtaaaaaaaatcccataatttgggtaatttttactaatttgtaagggaaacttacaaaaatactgaaatttgggttaatttttataaaaatactgttacacggaaattttttcaaaaatactatattttttttaaaaaaaacagaacataaaatagaataactaaaaacaacagtggaacaactaaaaaacaacagtggaacaactaaaaaacaacagtagaataacagtgacaatttaacacattacacagtataa

SEQ ID NO: 120624 - DNA, 724 bp, Cannabis sativa
gaacattttttgatgcgaaaattcaactcaaactatatgaatcgtagcaaatatctctttataattatattttgatcattttttaaaaataatttgctgattttactataagttataggtataattacagtataatgatctatttaatagcttgaagctatttaaaatataatttattgacattaaatatataaatattaactttaaaaatatatatattctcacaatttattatggaaggaaaattataaaaaataataaattcaaaaggtaaaattttacgaaaattttagtttaaagagataaattctatttatttgtttttttttttttataacaatctacattgtaaactcattttaaattttaaaggttttctaaaaataataatatacgtaaagtgatgcactctctaactttttacttatgtacaaaaacaaaacaaggataaagacaagtaccagatatcaaatgtaacggcgataagaaatacaacgtaggacccactcatttattcttaaatcttaatttaaaaaaataaatggataaatgggaaatgctaaaacagactagagaggctacgaatatcatataagttgcgtttggaaagccacaatgtaattagatttgtgtgtaattagaggtaattatacaatttgacatgtttgacgtctgtccatgtaattacactgtaactatgtaattagaagtaattgaggggttc

SEQ ID NO: 120625 - DNA, 2896 bp, Cannabis sativa
  modified_base (2530)..(2535): a, c, t, g, unknown or other
ttcaaaatatttcatcagtaatgtgattttacaatcattattctcaaaagaacttccccagttcaattgcttattttatcaatcttctaggagaatctggttttgataaaacagtttttgatctctagggtgaatctccaacatactcccacaattgtttcgatattcagggtcaatccctgacatataccggggttctaggtaaagtaatccatgttttagttgtttgtcttcgactgctactagttgacgtcgagctttcctcgcgacaacttgataaggcaaccagattgggccgttatctactcacgttgcaattgtttttacacaattgctctactggagtaactgccctttgtattcttgtgacccgcttttcctctagagataactaaagtgtccgttcttctcacggaagagggttataatcctcagtcgctcgagttattagacagattgaactgatcataggcatcttcctgcccctttatatatcgttgaaggtgcccttgcgatatgagaccttctatctcatctttcaactgacgacactcttccgtggtatgaccaatatcaacatgatattcacactgcttatttggatccctcttgcgcctcacatgtttcataggtcttggcttgccgaaaacggcttcttgtacatgtgcaaggtagattttttctcgagtttcattgagctcggtatattcggcataaagagggatatacctattgggcttcttatccttgagcagccttttggaatcgtctttttctttgatcacgaggcctccaaatcaagttttccaacagtaacacgccccagttgtctcctgggtttcgtgacttgatgcactctgaacttattctccaactcgctcatttgcaaatggaatgaatccttttgccttgaacagagtcattgacggaggtcaggcttcttcaagtttagatgttctcgtatatcactcttgtcatgattgtggtcggaccttgcccttcctctcaaggtttgactcacctttttcttcctataagggtttccacgagtttcactctcatgagcctgaataatgggttggcaatttttgtttgatgttccacgtatctaaggctgtgtctccaggtttttctcagttccctcaggttgcatttcttgagggttctgagtatatctctgggttatcctccgccccttggtctgccagccatgaggtttttcttgtgaatctcttttcccaatgtcaggtttattttgggtaccatcttccctggctgcctttaccacaactatatcactctccaactcggcattacgtcggtttacttcctctaatcgacgcctaaggttgcggttttctaattccacgattggtatgtatctggttggattgtaagcgccatcctcatcaacctggttaggcagtgactgattgtttcccatccaaggtccgtcaagccaggggccccacactgggtcctcctggggcttgcattctgttcatgcgattactcggtagatccctatggactcattggttcttttctgggacaatgattgattccttcttgaggattattatctttggtgtcatccatcacttttatgtcaggaggctttaatctgagcttttgtttacagaggctctcaatgaaagcaccaaactgttaacacagattttagttaaccaaatttgagcctcatgatgataattcaacacagaaaaaataaaagctataaaaaataatatatgaacatagggtttttttacgtggttttgcagttaaaattttgcatagtccaagagtcaatcttattcaggcttctgagtattttttttcagggcctctttcgtaagagttttttcgtccccaccttttgatcttgtctgctactatttataattgtatagtgacagttaattacaaagctgaccaaagtatgtttacagccattatccctaaaatcatgggatctgattacaaatcaagtcatataaatgaggttttacacagctacgagtatcccgcttttattgggccgagataaacacgtaatcaaatatatacgataagccttatctcataaggatgcctcgctgagaatggagccaagataactttgatagcgagcagttgcttgtcattttggcttctcgagactaatattattttaactctgattactataccttctggagtcgagatgatctttctcacatgtgtaccatcttctagcgagataaacgcctcactgtctcttatcttgactcgtcccactatctatactcagtttgtatatcgtataatatatgctaagtgtttttagtgttgtcgctttctctttcacgtagcgagtttgagacctcgtcatgaacgcgtgcacccacatggtttctcgtcaatacgtaagttagcagttcgtacgtttttatctcgcagaaggctattcagccagccgagttataaacataccctgcgaattatatttccaacgagttgttccatgctaagtatacttttcgtttgnnnnnntgagttcttcgttcttcccagctcgatacgtgtcttcctctgatgtgcttaccaaatctcgggtataacaccttgctcgggtaagtagacgttgtgcgtgcatatgtgctacttgaagtctattcgggatattcatctctgcccaggtgcaaggaatgttggacacgtgtcactcgtatgtgttaccacgtcgtagtgcaaaaaataggataatacacatgactcattacaaaaactactacttttagtgataattttttagtcacaatactattttttggtgacaaaatgtgatttttagtcacaacaaaatgttacttgtgactaaaatataatctttagttacaagttgtcactaatt

SEQ ID NO: 120626 - DNA, 3540 bp, Cannabis sativa
  modified_base (3460)..(3463): a, c, t, g, unknown or other
atatatatatatattaaataatgttacaactgtattgctaaaatacacataaaatagagaatatggagatgaggagaataatctcaacaccacaaccaaagtgataagtaggatgataaattgatattttgtcttctaaatatagtcaatttatgtattaatattcttaaattgattctttaaattattaattagtgtgattataatttgttaggctaccttaaagactgatcatgcatttggagtcatttggagggattttagcacattttggtgaaaaatagtgaaagtcgacaagctcagttttgcaaggcagaacttaattgtataggagaatcaccaaacttgaacaatggcttacacctttgtccaaaaatttatttctgctaccacaagcacttaagaaaaaagaaatggaaataactttctgaatttatcaggcctatattatttttagcaaggttcttacttgatagaaatgtaaataactttcatgttgttgtttgagtttttatagttgttttatagttatttttctattattttgtgttttttttattgtacaattatttttagttcatgtgcatttattatggtatatacttttaatttattttagataaatttttgttgtatatatttgcattattttattttgatgttgtgttttagttatttttaagtggtcttcatattatttttttgttccacagttattttttagttttttttattcatgtgtatttttatatagtgtatattttgagtctatttctgacatttttttttactgtatttgtgttgttttgtagatataaatacatatatttagtttaaaaatacaatgataattttttttaattgacacaatatgcagtagtagatattgacataataaacttgttgatgcaaaaatctggacacaaatatttggcaatacgcgctcgttagattgaagagaatggaatgagagttaagtataagtaagagagacacaacaaacttatagtagttcactcctcctaacactacagtaatggagctatgtccacttggtgtttttatttctcacgagatttacaaagaattggctaagtgtgggattaaaaattctagagagcgaaagtagagagagatattttaaccttttaaaacttcaaagaatgtgaaaaataaactacatgagctctccttttataggaaaggagatcctattaaaataataattaaaaaatatgaaaaaattattttgtgatgatcttgacctttgatgatgattcatgatgatccaatggtgaaaattgactcttggtgaaaattgtcaatttcgaactttgaatcttgtccattggattattttcgagttatttgttaaaaaaatagcaactttgttgaggacaaattttggacccaaaatcttcagaattgcgatgtgggtgtgataaatgacttgattgatctttgaaataacttcaaaatgcaagtttaatcgtgtcaatcagatcaatattaagtgagttatggtcgttttactgaaggttgttcatcactctatgaccaagttgacgacccagcgcccaggttgacacccaataccaggttaatattataacgtcaacttagacgccgggtgagtgccaaaacgtccaagacttgtatttttttttgatgtctaagtgatgtgttgacaccatttattagttagattcaatgttcgagtgaagctgttcacgagttctcgaagaggtcgctgttttgtgaaatcgagaagactcgaaactctctgattttgttgatattccaccttgttaaaatggtaaaatatcaaagtgtgaatttgacctttcacaagttgtagctctcatttactacaaaaaaatagttaaatgcgggaaatgaaatcgacagaacctagcgcaccagattatggtgtcaacttgggcattgggtgcttcccgagattcatttggataattctatagaattcgagattgtgaacgaggtcttctaccctattttttaaaccattttaagaataatgcccaaaacataatttatgtttgaggagtggaaacatgcgaaccaggttgaatgtcaacctgggcgtaaggcccagtgccatttcaacttgggtgttggggccctgttcaggctccctgaaaatctcgtttgctccccgagatcacttgtatcttcgttatttctaatgacgaaaaaaatatctagaacacttttttagaagaatgactggaaatagcccaaattgacaaaatataaacctggcactgggtccagtttctagccaccagatgactctgtttgattcccgaagacacttgtattttaatctttgacaaaattgagaatatgcctgaaataactctcagaaaaactccttgaaaatggcccaggttgataaagtgtcaacctcggcgctgggtcccaattttgacccccagacgacttcgtttatttcccaaaagtactcaaatctatatttttgatgaaaaatgagaatatgtccaaaataatttatctgaactgctgatggaagtgttccatgttgacatttgtcaacctgggtgctagtccctgttttggcctccaagtcgatccgttttctctcgaaagcacttgtttcctcgttttggatgatgatgaagaaaatgctcgagataattctataatattgtggttggaaatgcccaagttgataatatgtcaacctgagcgttgggtgcctggagaacctggtgctttaggtgctcaaaactgcaaatgtttcgattttgattatgttgccttaaatatgtttgtgataggtttcactcatgtctcagtacaaattttaactcatttgcactaagatgggcccagaaaccaaaaccttagcagggttgtcaacttaggtgctaggcacccgggttgacttttgagttgttgttttgtgttttagcttccaggcattgaatttagattcttcatgtcttcatgctacataatactaaaagatatatagttagttgaaaacaacttagcgggatccacacctattcgagagttcctggagttaacctgggcacaaggttaagggacccttctaggtcgactaccatgactcgggactactcaacttcgagatgttttatatcttgtcttttgtcaaatattgatgtccatgtcactaaagtcggtttcctaatttaatatattaactttatatagaatattgctaactaatcgcaaaacactatctttaggtggtgctaggtaccacttgtactttatagcaatgttttttttaataatatatttttgagaaattgttaactcgaatttatataaaaacaacttataaatatatgattagttggattcaaggtaatttgaagtgatattaatagatatctattctatataaagtgtgtctatataactaaattcttggtttatgagaaannnntgggtgactttttatttatatttaataaataaataaatttttattttttttaataaaataaataaattaaaattaaa

SEQ ID NO: 120627 - DNA, 2448 bp, Cannabis sativa
  modified_base (2408)..(2423): a, c, t, g, unknown or other
cactcctagtgagtctactactttaaacgatacgtacacttgcgtgtgcaaaaatatcgcaacagagccttagattgtgatgccattctggataatcttcacaaaaagcttaacaattagggtagtaggaatctttattttactggaagagcgcaactctgttctgcttggagttagaaacttttggatgagcattttacctcaaaaagttgttgcaaccattgataagtgtcgttgggatttcttatgggattcgaatggtaactgtagcaagcttcatcttgcatcttgggacacagtttgtctcccgaagaaatttggaggaattggttttggtaaaggtagaaaatgaaatcgagctttaatggctaaatttatttaggcggtttcgagtaaggaagaatctatgggttaaatggattaactccatgtatcttaaaggaagagatttttgggatgttcctgataaatgtgatgtaagctagtatttcaagaaacttttgaagcttagatgttcgattgacaaaaaggagtttatccaagcgggtaagtttggtaaatttaaaactaaaatcttttatttgtctttatctccaacaattgctgatatagtgccttatgatattgctatttgggacaaattgtgtgttccgaagcattgtttcattgcttggcaagcaataaacaatcaacaacttactcaagatcaaattgggcattttttaaagcttctatctcttctctaccctgtttgtgaatctaaattggagacaaaccaacatttattttttgattgttgttttaccaaaaaggtgatgaatgagatttctttgtggatgagtatgaccgattggcctacgaacctagaagagtggaaaaatctctgttcgaaagtcattttctctttgaaagaggccttgtgaatacagttttctcagttgctatatatgcaacttggcgcaatcaaaatgactgtatttttaaacttgcttgtagatcaactagaactttgagtcttgatgtaaagatagctattaaagctagagtgatgaatttggctttccatagaattaaaaaaggtgatgttcgtgcaattgagttatttaagtcaatttgagtttagatggtagctgctgccatgttggtggtagtttggttgtgtgttttgtcttgttttgtttgaataaaattgtcctccagctccaaaaattataatacaactataaatatagcataaaacaaccaaagcaaaatagtttattattttactaaaatctgtatttttgtaaacaaaaaaatctaaagcgtaaaataaaatttgttccgtgttaacatatttttgtattttttttttaaattttggccgattatgtaaatttaaaatcttagaaaaaattacataatataccaaaaattagaaaaaaaaaattacaaaaataagtcaatacgatttttttttttatttttacgttttgcacttttttatttacaaaaatacctctctagtaaaaacaataaactctttgatattcatttttggttttttatagtttatttatataaggagtatattttttaaaatttaagaatacccattataaaacaacaaaaaatatcaacctcatgacaactataaatacatcttcagtagaacctctatccaagaatactatatttaagaataatctataatttattattaaaaaaattaagtcccaatttgagttagttataaataagaataatctctaaattataattagttatactttttctaagttccgtattaagaaatccttaggtaaaacttcactttagtatgtataatttatttttattacattaaactcttaataattaacttctttaatttttaacttattttttatgcttatattatttaagtaccgatttttatagttttattttgtttataacttaattctctaacgttacactatttttttttttttttttaaaaaaaagaataattccattaaaaggcacaaagccaacaaatcaaaacgattaaaacaaaatttaaaaattaaagaccaagggaaagactagggctcttaactttaaaagtatccaatgaaagagcaattcgagcaagcaagcaggctaatccattaaaggaccgcttacaatgaaagaaaaatactagagaaagaggaccagccatttctgatatccttaataatagtgctaaattcagttaaaggtgtttctttacccaaagtagtttgcactaagtgaagacaatcagagaatatcgtcatacttgtgtaccgtaatcgataacaaagaatcatccgttacaacaaagctactgcctctaccacataagatacttatttatgtatcaataaactcttgatttgtgtctgttgaccgagattttcggnnnnnnnnnnnnnnnnattataataaagagctgtaagaaag

SEQ ID NO: 120628 - DNA, 2049 bp, Cannabis sativa
  modified_base (653)..(656): a, c, t, g, unknown or other
agttgagtgctgacttaatagaaatgggtttaacagattttgatattatacttggaatggatttcttatccaagtactgagctagtattgattgtaatccgaagattgtaatcttccaagtagagggtgaggaactgtttgtctttgttggatcgatttgagggatctaggatcccagtgatttcagtaataacatccagggaattgttacaggatagatgtctaaggtttctgcccgtggtattggataccacacgacatgagttaattcggccagaagacatcaaggttgttcgagaattcttagatgtttttcttgaaaagcttctaggtttaccaccgtagagagaaatggattttattattgacttagaatatggagaagaaccggtatctaaggccccttacacaatggctctagcagaacttaaataatagaaaactcagcttcaagggttgcgtgacctagggttttcacgacctagtgtgtcaccctagggagctcccatgttatttgtaaagaagaaacatgggtctttgcgtatgtgccttgactatcgggaattgaataagttgatagtcaagatatgtatcctttacctaggatcgatgatctttccgataaacattaggggaagacggtcttttcaaannnngatctccgatcgggctatcaatcatatgtgtaaagaccccccttagctttaatttggaaattagcaaataattagggtttacttatgaaacttgtttattagttttgaattatttattaatgaagatttatctgaattaagaatgcattttatatgtcatgtatagaattttataactttgcatgttttgtgcccggcaacattggaatgtggtgtttggctattagaatcacatcctagtatttttaatatagaagggaaatttagttagacattgggaatgtcaggaatagtcaaatagtcaagattttaagattttagaattttagaattttagaattaaccaaaatacccctaagtgaccttttataacttttagtgtgggaatggaaaaatggtcttttatccatttgtgttttgtctttatgtggatttcaatctagttaataatcttaatttataaagtttaattggctgagtttacttgttaataaaacacatttcatttattcattttagaagaaaaatcaaatttgacaaaaattccatttctctctctctttcaactctttctcttttcgaacctcctagacaagctagggttttgaagtttgttcatcaatccttgcagatttctagtatgttttaagtgaatccaagctaaagtaagattttaagcaagtccctctctagttttcttaagtttcaagtttggattttgcatgaattttgaagtagttgagctctgtagttgctgagattatttggaatagttttttgaagctaaattatgtttagaaatgttgattttggatggttttagtgggtgtagtgttgtttgagcaagcttttacttttagaactgaagcttggcctttaatggtaattttattctcagcttgggtagtagtttcgttgcttggaatatgtcatttggggtatactatggaggtctggaaggtttggcaaggattagaattgatttggttaggttttggaatgttttgggttttttagggtaaactggctaaccgattttacacacttgtaaaaccggttacccagatttgctgctgggttcccagaaaaatttttgttgtcgattcgtgttagtttcagagctttggttggttaattccctgttagtttaggtatttccatgttatgttacagtagataggtttttgtttaaaacctaagtccccgattgtgatttagcgtgtcacttacatttgttgtgattgatgtgatttaggagcctctaatttgtcgagcagttgttccactcaggttggctggcacacctgaatttagaattaaggtaatattactataatgtcatgcatgtgttattacttgtttataatagatgttgtttatgcctattagaata

SEQ ID NO: 120629 - DNA, 1179 bp, Cannabis sativa
ggggggggggggggggttgtgtaataattcgaatgagttgctgccttttaataatgcagagggagttctatttagaagatatgtggcagtgtgaattaggtggggccagtttacaagaggaagatgagattgaaaaccaaaggcctgagccacattaacaatatgttggtgttttctttcaaccactgaattttgttgtggtcgttcaacacacgaacggtagtgtataactcctttggaaacataaaaggaggtgaggttcaattcttttgcattatcagatcgtatagctttaatcgattgtgagtattgtgtacaaatcatgttaaaaaaatttcgtatgattgtttgtacttcagatttggttttgagcatataggtccaagtgtatcaagatttatcatcgacaatagttaagaaatatttgtatccttatacactcatgatatggaagggatcccataaatccttgtgaactaaatcaaacaagttcatgggaaagttgttgcgtgaaacaagcaatagtttttttttttttttgctaaatggcaaacatagcagtggtgattgaatttcatagtaaaagaagggttaatctttttattgaaaacattcgaaatgtacattgatagatgaccaaggcgattgtgtcattgatctaaattgttcttattgaaatctaaagaagattagacaatggccttcatctctttttcaaaaaaaaaaagaaataatataaagaagattgactagcagtggcaattggattagtgtactgatgcaggagatacaatttgccatgtcgtttttagctatcccaatcaccacattccgagaatgatcctagatgacacaagaagtggtgttaaagaaaatatgatgtgaaatgttatcaacaagtgcagtaatgtaaagaagattaatcctgaaatttggaacatatagtacattgtagaatgtaagaaacgaagtaatgacaattgtacccatgttagtaacagaaatcttgagaccattagagagaacaacacttttaggaaaagaggtgttagatcatacctatagaggacagctgttctagcaattatgtgggttatttggctcgaaagaaataacagaatttttgaagggattgaagcctcagttgaagacttgtgggaaaaagttagattttggaca

SEQ ID NO: 120630 - DNA, 1664 bp, Cannabis sativa
  modified_base (1052)..(1057): a, c, t, g, unknown or other
attattatatagtatgcctgtgttgtctttttcaggtgtgttctgacaagattgtgcggtatagtcacaattgggtatttcaggttgaactgggttcgggcccaaaatacaattcaaggattacttattggcattttatttataaatgagaaatctgaaaattattggaataggtattatatatgaaatgacttaaatgcccttaatagtgtatgtatatgttatatggcccaatgggtattttggtaatttggtttgggatttatcttgttgtaaaattgaattattgaggaaaagagattggatttttctgcattttaccttcaacccaaaccgacctccccctctattctctttaaaccatttttgctcttgatttttcttggttgaggttggcttgatttcaagtttggtgttggaagcttttgagctagtagttggaaggaattgaggtaattctttcactcatttttaattgaaattattgctggattttattgttgtaagagaatgaaataagttgatgatgatctttagttgcatgttagtaatctcttgttgatttaagcatgtttatacttgaatcttttgattttgtgtttgggtgaactattggatgaattttagggtatttctcatacttgaaatcaaattttattttggtgtttgttgctggaaaatataaggttgtatagatttgaagttcttgttattgagcttgagatttgatggtgttaactcttgggagaagcttgttattgtgtgttgtttaatctgattttggtggttattatttttggtttttaatgcttgaaattgggttttaaactctctgtatgatgattaaaaacctatttgatggtttgggagttctggttaagaattcggttgtttggatgtgatttaagggctgaaattcgtggtttattgctagtttttctaggttttaaacccaagtgttgcgacatggcttttttgcatgccgcggccatcccttttttttttctcggcagatcctaatgcaaacttcaaatggccataactttgtgatnnnnnntccgatttgggagttctatataccattggaaagctcgtttcgagctctatgtggatatttatattttgaatgccaagtatatattttataaatttggaattagggattaaccttatatgtgtgaatctcagaatttgtgactaggaataccggtacttggtcaggagcacccggggatttgaaatctcctcttttctgggacattaggtaagacagtagtatgcacgttgagttaagcgcagtggcgctcatattgtatgttgtgattgtgattaattaagaaccaagattagggttattaccctaaaatgagcggttgttttgtctagggttattaccctagtagttacaatatgttgaatgttatgccatgttaaatatgttggaataaagagttatgcgtctaaggcataactaagctagactcggtaaactagtattttgagtttaattttaatgcggtctagggtcattaccctagaatattatgaaggtaagaaatcgttaatatatggtaatattattaatccagtgaaagtatgaattagggttaacactcttagtaaatgttatttgagtatatagtaatgtattatatgagtgatta

SEQ ID NO: 120631 - DNA, 568 bp, Cannabis sativa
tagggcataaaactcaacacttaattcgtcagatgactgttgaaaaacatatttacatgatcttattatttttcttgtcaatatttttaaatgtaaaaaataatttctgaagataatttaaataataattttatatgaagaagaaataaaaattttgtattaatttataataaacttcaagagattcatttaaaaactctaaatagaatttattttataatcacaataaaaataaactttcatgaaaatatctctaaaatacattaaaaccagaaattaaaagaggagagaaagaaaaaataatagattagagttgtcttgctccaacttttatctccaatcctctcattcttttcttctctgtgttatctaatgttctttatcgttaattacttgaaaaaccctatcgaattccacctaattaactttaaagtcgtaattaaaaggaccagccagcatttgcgtgtaagagactctgcatgcggattgcttgttgtccaaatatttttctactctgacctcttttagtaaaatacactttttttttgaatgaaaatcatcaatttat

SEQ ID NO: 120632 - DNA, 1015 bp, Cannabis sativa
agagagagagagtttggtgagtatgtttagggtttagctctgtgtttgtttgtcttggtttcactgttctagtctcgtgagtggttttctgttttggtttctctgctgttttcttttcttggttgtctctttgtgtttgattcctgtgttggtgtgttaggtcccagggttctgagtctgtgggtgtttgttgagtgtttaagttttatcctaggttggtgaggatgggttgtcgtttgttgtcggcatttatggagatggttaatgagtcttgtgtttctcttaaaggcaaaagattcagttgtgtggaagcatctatttcattatccccgtgtcccacttctctaaaagctttgtcgtctctttgtctggttggtaaagtgattgctcccatgcatgtggacgttgaggacattgctgatttggtaaccagagtgtggaagaagaatgtgtctattgtttctttgtctggtacatcttcgaagaataacttctttatgttcggctttatcaatgttgttgatagagaatgggcgttggagcatggcccttggacggttagaggatattctctggcgctcaaggattggagtccctctgttgaaggccctgcttcagtggagcgtttgagagtgtaggtgcaggtgcacaacctgcctcatgagtattactcggatgagaatgctactctgctgggtgggttagttggaaaagtggttaaggtagagttggtggcggctgacccgacgtcatggaagctgttttacaggattctagtggacatcaatattgaaaaacctttgatgtcgggttgttactttgatttggcctcgagtgctaaacgatggatccagtttaagttcgagaaaattggcattttctgctaccagtgtggccggctgggccaccaacgtcggggatgctccctgtcatctccagtcacggtggacaatggagatggtgttggaaattattttaccaggatcttagatccactcacaagtatgtttattaa

SEQ ID NO: 120633 - DNA, 1222 bp, Cannabis sativa
  modified_base (1137)..(1141): a, c, t, g, unknown or other
ggatttaacagaagttactacgaccattattctaagtgggtggcatgctaattgtaaagaaagggccaatgttgacaaggctaaagggttactcaaatctaagtttgagatgaaggactttggggtagcaactaagattttgggaataaacatcataatggatagagacaagaggaaactaatgctacaccatgaagagtacgttgccaagatcaaaaatttctatgaaagatgctaagactattacacaaccaattacctaccaataccacataagacaatgttccttaagacataaagatgaaatggcagaagttccctactctaatccatcatggcccacaatgtatctcatggttagtactagacccgaccttgactatgcaatcagtgttctaagcaagttcatgtctagttgagggaaagagcattggaaagccatgaaatggcttgtgagatacttaaagggcacatctatatagtaggactaatataccaggcacaccagacacatcagaacattgagagattcatagatgccgactatgcaggagataatgacactaaaagatctacatcagcctatttttttcttagcaaggggaaattgcactagttggaaagctcaattgcaaccagtggtggaagcactatggttgagagaacttatggaagagctaaacctagttgagaagatccctactatatactcaaatagccaaagtatcatctacctatgcaataatcttgtgttccatgattgaacaaaagacatagagattaaatatcatttcatcagggacaagattactcaagaaaaattgaaattgacaaggtgcctatatagaagtaaatactacaaatgtgggaactaaggtggtttccctaaatagacacgggttagtaaatcccctaaggggttcgagctaaaatcctcagataatccatggcaaacaactaatagtgcatatgaggagtcagatagaatttgttggagtaaatacccatatacactgaacatattagcacaaataaattacaataaacacaaggacataaaagtaaaattacatgcaaatggccttcaaccttaaccaactattaagcagaaccaaagttagttgcaaagtttgttannnnngttgcaactaactctcagctctcttacctatttcctaaagctataaatacaagctcagaagatcagaaaaaatagattaaa

SEQ ID NO: 120634 - DNA, 740 bp, Cannabis sativa
ctagaaaaggcattaaaatttataaagtaaaataaagaagaaggaaagaaaagacaaaattttagtataataactagtggtaaaatcttatacttaagcactccttaaatgatcctatttatagaaccaattttcttctaaaattagtgacaaacgtgtactgcacagtggagaaagtggctctaaaaatcggttaaaattattaagtgacattgtggagaattaacttcaattgctgatgagaaaagaccacgttttcttgaagagttggatatatgatgtgccactaaagaatatgacttagtcatttattagaatgagggagtttttcttgatgggcttggagtaaagtgaagctcataaaaccttgaggtccatagctgtcaaatactaagccactcctaaatgaaccacttgaggctagctcaagtggccataggtgtgtgtgtgtgtgtgtgtgtgtgtgtgtgtgtgtgttggaggtcttgggttcgagtcccaggtaaaacatggttgtaatatataaacacttaaatcaaaaaaaaaaaaaaaaaaagccacgcctaaatggaatatagccatatagtgattgaattccatctcatgtccataaatgaataaagccatataggcggctggaaaaagccacacgcgaatagtgttggtttgggcttttagttctttctttgattttgggcctgccatttttataatttatttttactctaaatctgaaaaat

SEQ ID NO: 120635 - DNA, 895 bp, Cannabis sativa
aataatttccaacattctcttcatgcattttgccgaagtcagaccacacaaagtgctaatttcttcttgttgtccaaattaactttgtttcctctgtacgaaacattttatcttattcttttattgttgcatttggcaagttgattatcctagccgggcacttggaagaacatttattccactcaggtcttgataacatgatacgtgtcacccaaaaaatatgccacatcacccagacaagattcaagataataatgtaaaacgtgagataaaggccatgatttataactttccactaaatagtcttgagtaactgttatcctgattctagaaatagtgggaaaatcaaggggaaagagatggctaattgatacataaaaactctgccaaaatttctacttatcaaatactcagaaaatatactgactcgtggactagataaatttaaactactgaacaaagtaaaatcttgtctttttttattttgttttaccgcatacttattattatcaacctacgatcaattcatagtattaattatctagcctcatttattattactaaatttttgagttaacagataacctttaaaaaaattataaagcaaaaaataattatcgaagatatctaaattaactaagaaaatcatatttaattaaaaaaatagccatgagtacaaaaatggattttcttcatcctcatctttccctcccactaagtcgccatagctgtcttgacaaaggttcagcgattcattctaattgtaagtagaatcaaatgggttcaagacgtcgtttaattcctccattctgcttcagtacaatgttgcacactattaaattttaggataagttgaatgaggttccatctcaaaaccaattggtaatgggaggag

SEQ ID NO: 120636 - DNA, 987 bp, Cannabis sativa
  modified_base (798)..(811): a, c, t, g, unknown or other
aacacgacctaatatactcatgctatacacttgtatatctatgctcacatctctttgttttggtatcataaacaagagcttcaataatggttgactttttagtttttactgaatgttgagacttgatagacaaatcaatgtcaatattaggtttctatttttctttttagaaaagaataaatagtatttttttttctcatcctagtaagttttgttttttaattttttttttatgtaaaatttttaaaacattgttacaaacatttcaattcagttacaatcctcattctctaaaggaaaattttgactgtaatacaatattacatgtgtttaaaacaatagtttgcttatatagtcatgaattaaatttatagttacaatataataatttatttaatctatataaaatttaatttattggcattaacatataaatattaattttaaatatttatatatttatatatttttataatttataattaaattattatttatacatttaatttttatctaaactcttaaattgcttagtattaatattatattagtgttatatcaataaattattttaaaaaaataaacaaactgacattaaagatgatatttgtactaatttatgttcatgataaattttacgtgcaaaaaaaagtaaaactctactataatcatagttccacccaaacaaattttatttactttttattgaaataaatatctaattaaacatattttcacttgtttttttttttatatataatataaaaattttgattattttattaaataataataatnnnnnnnnnnnnnntaataataataataaaattgtttaccctaaagatgtggtagatagatagaatctctctcgttttctttttaatttagttttaacttcatattgacttggtgactacaactggttaacttgtgcgtgtggccaattgccttgctaagagcatctccaaagaaacaccaaatttgttg

SEQ ID NO: 120637 - DNA, 1225 bp, Cannabis sativa
ggccgccgcggcttgaatatctctggccgtacacgtggacggtttggggagatgatccacgtcttcggggaaattcaggagcgcttttcggcctttgaggcagtaggctgccacgtcataagccttggctgccatttcgggcacgggaaacgatccaagccaaatgcgggatttcttccgcggttctcggatttctgagacccatttcccccaccgcctcttccggacgccgcggtagactgggtggcgcgtgcctccacgctgcagtccctgatcttcggttagtgaggcaattgcggtggaggaggaggaggttgtgctggtcgagtcgtcttcggcgaatagaggttgctccatgctcagttgggaccggtaatggtttttgttttgagcgtgtcatcagatctcattaaatatactatgaattttctttacccataaaaaagaaaacgagtactatgcaatattatttgaaattacgactctacccttgtttacttaaattaatttcaccagtaaaacttatgaaaatgactacttcatcgtctttttcttttctgtgtcttttttctttttttttgaaataatcagtttatttacttcagactttaattaagtactagtcattaaataatttctttttttaaaaaaaaatatattaatgaagttattttattttacgttatttagtataacgtaaaattaaaaaaaaataaaaaaataaccatatcaaaaaaaaaaaattaggtggaataccaacaatatggcttgttatgctaggatttttctgttcctaaattcttaggcgaaggcggttgtgtttttcctctggcaacttggcaaggtccgttgatcctccttggacttaggtacttggtctgggtttgtggtgttgcagttgctactacaattatgtttttactattgtaattagtcttgtgtgagataattttgaatattttttgtgtaggttactacagttattcttctcttgataatatgattttatttagttttgtgtcacgttattgattcatcatctttgtttttttatgactcattataaaattattgtttgacaataacaaattctttgcgactatgaattattagtggtacaatgacataccttacaatagtgagtgctcgtgcttgtgttttttgagcagaaggaatatagctattcttgattctgcaatttttttttattttgttttaatttttg

SEQ ID NO: 120638 - DNA, 1136 bp, Cannabis sativa
tgtgctggcaaaaaggtcaaagttttaccagcgcacatttacagtggctgaaatctaacttttactagcgcatttacgcgttgaaaaaaggcagcggttttcattttatgctggcaaaagttataaaatttcctaaaatagtactctttagagtaattaggttatcaccgtatgatagacttcaggcttatttagttcgcgaaaaataaaaggtgatgcaccctgttacttttctctgttgtatcctaggagacgtgttagaattttctagcactaattaaagatgcgaatttgttttaaggaaactaagtgctaaataggcgtcagatattaatcaattgaaattgcatacatcaatgctacaaaagttatttttggtgtcggttcgagggtcacttaattaaaaaaaattgacaccaaagatcagcctatatatctcttaagtgtcagttataacccaacactaaaaagtattcaatggtgtcaattagtagagcgacactaaaataaaaacgaacacttaatttttttttttttgaaaaaagaaaacatcccttataacctctttaaacccaaccccaaatatatttctcaatttttgatttttaattttttttgcttaatattctctctctcatttaaaagctaaaagtcgtaatcttcaaatcggaccagagcaaatcctaaacctaattttatttttcattttctctccacatttttgtctcagagcgcatagagctctcaactaatacttctctcttcttcttcatattcttcctcggtgacgcccattctcgaccaccgatggtctagacagagcacaattctgacctctagcggtttaaacaatgcttcagtcttcatagccacccctttttcttttcactctcccgtgtggagcttcttctcccttgttgttttctctacgtgcgacaactgaaggccaaaagatcaactctaggtgacttcaatgggggttcgcgagggattgggcacctggtgactgaaggccaaaacgaagcccaaatctgagattgcaacgtgaaatgtacatgtattctctcagctaaaatcgccttctttgttcttgatcggtgctatatcaactgtaacgtccccgcttcaagcctcca

SEQ ID NO: 120639 - DNA, 1344 bp, Cannabis sativa
  modified_base (1302)..(1319): a, c, t, g, unknown or other
tcatgtgaaccatgccacataaaacgatttttgatctttatttattagtaaatctgattatattaaaatgagttttatttagggcacaaaacctaacaatagtaagtatagttagggttaaggcaataagtgcgtaagtgtgggtttggttcctgactcactggggttgtttatttcagggccatttgaaaaagagtggaccatccacaataatttagaccacatggcaagcacgtacaacctggtaatgaccaacccattccaccaacattgcttgcacctccatagaatctgagggataatgcgggggtgaataatgctaatccacctgccgactggtagtaaatgtttcttgaaatgtgaagtatcatacttcatcaagaagataaattgcgtcaacttaggcaacccgcaccagcagctccagcagaacaagtgttaccaccagctcctattccagtggtgggtaactcaggatttattctaccacatcgagactttgtgttcgaatgtttcgtgaagctgcaacctccaatgtttttgggaggtactaatattattaagactgaacagtggatgagtactattaccagcatcctagataacatggggtgacggggatagacgagttaattgtgcagcattcatgttacaagatcatgcccgcatctagtgggatattgttggtcagacccgagatgttagcatcatgtctcgggaagagtttaaaacccagttcgcagaaattttttataacatttctgtaagaacttgacatattcatgaagttgactcaaggaaagatgtcaatggccaagtataccctagaatttgaccgtctatctaagttcgttggtgaccaggtaccaacaaacttcacccataaacaaaaatatgtaaggggactgaatgccactattagtcaggacttaaaaattaccaccaatcatgacacttatacaagaaagtggttaagttagccttacaatcaaaatgttatatattattattaccatttcttgtaactatagcattacaatcaaaatgttatatattaatatataaattattattatttatatgttatatttagtagcaattatgagtcaatggagaaatgagaagacaaagctaaagagactaactccacacatttataaatcaaaactgaaaaataattattagtcatactttttgaaaaaaaaaactttttaaactattgaatgatagaaaaattgaaaaattaagaaagttaggaataggagtaggggtgttcacaaagtatccgatccaatccaatcnnnnnnnnnnnnnnnnnnccaatccgcaaaatgcggatatccg

SEQ ID NO: 120640 - DNA, 1969 bp, Cannabis sativa
tcgagtttcattaagcttggtataaacagtgtaaattggcacgtacttatcgtgcttcttttgttccttcttatccttggtgattctttagagtcatcttttctctttgtgctagagccctctatattgtcagccttcgtcgagacggtgcctgcagagacagtgctggatttatttcccgaattagtctttatcaatttcatctcgttccttgctttttctttttgtacgaacacttgagctctctcattgaactcatggatgttttctacagggcgacccagtaagtcatcccacaactctcctccagctatcaagagattagtcgtaatccctgtttgaatagcagtaagctgtatacggtcgttcgagttcctaactctaacagcggctgtactaaattgacttaagtatgccttgagtgactttcctggctgcttctttacgttagtgagggaagacactttaggtcacatatctcttgatgcctaaaattatttcttgaaatctttagacagcttttcccaagaggtaatttaataatgggttaatttaattaaccagctgctcgctgccccagtcaagaaggtggggaataaaatacaatgtaagttattcgtgacattgttggctcgcattattgtattaaagttgttgagatgagagatcggatccgtagtcccatcgtatgacgagatgtgatggtttttaaatccctgggggaattcggcgctcataatatttggatgaaaaggttcgagctcctcatcagagtcgtaattaggcagtttcccatcttgatatttcttgaatttattttccaactcaatgattcgcaattggattggatcctcttgcctttggttggaattgagttgtttgtgtaaatcgggcttcttaattgctcatgaagatctggccatctttgctcatagttacttgttaaccttgtgcttgagtaactctcagattggctactccttgtatgactcatgctttctcaatcatcactacgtcgaggtctatcccctcctcacgtagatcgactgtgatctcaagatgtagtatgtcccgagctagaacttgcctcgtcatgtacgggccttctcctttgtgagaggtttgatacatgtcccctgttggggttggtatatacgtctcctccttatcagtgcgagaaagacgttgatgatctctcggtggcaatctgcttatcctaggttgagtcctaagatttctctcgttaccacgagggatttcttgttccctagttctgggttatcttctgcttgcatttttacgagaagactctagaaaatcattgttttaattcccctaggttgtgaatccctggggtcttcgaggcacttcttgacgaggtgcctggtcatttggttgttcatctttaagaacatcccttccccaggttgctcctcctaagtgttttgggaggtttccttgagctgtatctgtctcctggttcttgagccccgaggtctaactcacgatcttctcactctaggatcaggttggttctctgtgttattttcttgtgtcaccctggctgcggctgcctccctttccaatttagaatttcgttggtttgccttagccagatgttgccaaagttggcaattttccaactcgaccaaccggtatgtatctagtggggtcataggcaccctcactcataggcctagaaccattagcattggtgttgggtacctcatttcaagtttctgggttttaatcatcatcacattggcttcttcttgaacatgttgatcatgttgaatgccttgttcgtgaattgggtggcctttatgagcccattggctcttttccaggacgacgattagtctcttaaagatgagtgatgtcactttccccattatcagccatggagaagaaattccttctttggttaggagggatttttctaagcttttatcacgtaggctctcaatga

SEQ ID NO: 120641 - DNA, 1067 bp, Cannabis sativa
gccactctttggcagccgggtagaggtttgtatgtgaaggaactagacccaaatctttttctatttcaattttaccatgaagttgatatagaacgagtaatcgaggagagtccgtggacgttcgatcgtgcacctcttatctttgaaagagtgaaacagggagagaatcctaggcacataccactggtgaagcttgatctatgggttcaattgcataacatgacagttggttttatgtctgacagaattttacaggggatgggcaattacattggcacttttatcaaatctgacccaaacaatttttctggtgtttggcgagattatttacgtatacgagtgaagattagagtggacatgccattgaaaaaaaaagaagaagcttgaaatagtgggaggtctgaaatgtaatgttttgtttaagtatgaagacttgccaaccttttgcttcctttgtggtgttcttggacactctgagaagttctgcgaaaagctttttgacacaccaaaggatcaactcgttcaagaatatagccttgagttaaaagcggcaccgagaagaagaaactacgctgatggctcacggtggttgaagtcaggtctggcagttaagaacctctccggggcaagcagttcacaaggtggtggccgtagcaaccaaattccatcattccgagagaatcaaggaagagctacaaatcaggtatctccattaatgtcccatgattcacgtactgtcaatgttaatgtagtgttggaaaaatcccatgatttaaggaaggataatgggaatgaggtggtggcgccaactggggtagatttgaattcaggtttgacttttattgataataaaagaaggagaatggacttggaaaaggaaattgggcttactgagacacatgagaatgagttgggccgtgtggggattagtaatagtcaaggagtcaaaaatatggatatttctaacttggatgacaatgatactacagcccctgatacggtttcaaaaaacatgctcgaggcgggtgctggtttccaggcccgccaagaattatgaatgtgttgag

SEQ ID NO: 120642 - DNA, 663 bp, Cannabis sativa
tcttttaataataataatgaaagaaaaccattaaaaacattgatttttatcattactcgtagaagacaccgattatgtatactaaactcaaaataaatagaggaaattaggctctataccctttttatattgttctctttcatttttaccctcttttttaaaacctatcatttttacctctttttctaaacactttaccgattttacccctgtcacatcaatatactctccatgtgattcccttatatcaaggtattttgggtacaatacatataaaaagatgtatgtttcaattaaatataaaattaaaggtagttttggttaattgataagtaaaagaggtatttctcaatatacccctttccgatatggtgatttcgtcaataacaattactattcattgtaataatcacgaggtctgacttcttctatttagaaaatgcattttgtttaaaaaaaaaatgaatctctaattttttagtaatattttaatcaaaagcaatattaattttttattgatttataaaattaatttatatttaacaaatttaaattataattatattattaaaataattaaataaaaactaaagtaaacaacataattagaataacaacaataaaaataattttttattttagcttaacaaaaataaatactac

SEQ ID NO: 120643 - DNA, 1534 bp, Cannabis sativa
  modified_base (1433)..(1436): a, c, t, g, unknown or other
gttaaaagccacaacagagcaatatggaaagcccgcatttgaggcgtagtctacttattagttgtaataacatgttgtgtatttattattcaatactgattattttgttttggtatatgctttaaaatcaggttggtactcttgttatttgatgagagatttttttttttggttttttttataaaaaattatcgtcaaaatatcgacatcttgtcgatatactatcgaaaatattctctttttgttctggtatctgcttaagtcaccaatgtcgacaatataaaatcaatatatcggcataccatcgataagtgaaattataacaaaaaattaactatgcccataaatggttacactaattgttttatactcgaaaagatgtcgagatcgacattatgtcgacattatttgtcaaaaaacttcctgattgtgagaaaacatttgtaaaaaaagttagttaatcgaatatccataatatatcgacaacatattgttataccaccgataaagtcgtaagttaatagaaaaaaaaggaattaagtaaaattatacaaaagatataaattatgatgataaatagttacactaattgtttaaaataacgaaaaatacaaaaaatataaaacatacaatgtattttcaattatacacagagatatatatcaactgaggttttggtaatacagatcaacgcaccaccgttcacgaaacatcctcatccgttcttgcgtgacatcaactattagacgttgcatcatcagatgctccacgtactcaatagcataaatgccacaatcaccactaaacgcaacataaaatatgaaattagtagaatctaaaacaaatattattattatagtacttttttatcgctatgtaccttaatttttccttcaaaactaagttgtgggtggctcgagatgaatgcatccttgaaagctccttgatgtcgcccatagttaacgctgtgatctgattattgtttgagaaatttctgattgcatagatcaatgatggcaacatatcttcccaggtcttcaggatgtcttcaatgttcttccaattacaaatgttggaatcacagtcgtacacattaattttccatagctcaatgtcaacttcaatagccacccagtgcctctgtgtgggaagatgcaaaatgaagtaaatgaagtcattacccacccatctcggatagaactgggactgtaattatggaaaacagataaacaattaacaaactataataaacttgtaattatagttgaaactttaaaaactttctaaaaaaatacttgatgaacacctctgcagtactccatgatgtaatcttcccaaacgaagttttttctgggacccatgtggtttgtccatgcattgctgataatagaggtgacatatgttaagggaatgataccctactgaggaaatgnnnntggaaagaagtggcgtcgcctcctcagcatatggactgctgcatctatatactgcatataaaggttagagaaagcagttagacaacaaaatatattaa

SEQ ID NO: 120644 - DNA, 1406 bp, Cannabis sativa
aaaaatttaagaagtgtgaattttagttatcccaggtgtccttttaaggtacattgttagtaaagataggatcatggttaatccgaaaaaagttgaatccatcaggaattggccaaggccgaagacaatcactaaagttaaaagttttctaggattagctgggtacaactgccaatctgtagaagggtttttcaagatttcaatgcccttaacagagttaactaagaagaatcaacaatttatatgaacaaacagatgtggagctagttttcaagaactgaagcaacgattgatcacaactcctgtgttagctctaccattagataaagaaaagtttgtgatttattgtgatgcatttagatagaatttaggatgcgttctgattaagttgatagggtttatgacctccttacttgaatgacattacttgaggttcattttgtcataattatggtgtgatataataataatttgattaaatgagactaagtaaaatatcacatatcaaaactgaaggatcaaaatacatattcatatagttcatggtatatatatatatttaaatatatttataggaataagtgtaggatttatttataagtggggacattatgaatgaattattacaaatttgataacacatgctaatttaacttttaaagaattgagtgactctatcattgtcattgattacttgccgcccaaaatattcctttttgttcatccatgtaaataatatatattataccatttgaaaaatatgaattaatataaaattaactatataatataaattgcaaatatatatgtatataattaatgtcatttgagttttgaaacgaagaattaatagagagaattgatagttttagaatgatatgcttacttcattacctagctaatcacattaactcaccaacatttttaattagggtaaataacggtataagtactcaaagttttatgtttgtaagcggcataaatccaatgtttatttttagcgccataagtacttaatatttgtaaaactataattttcttccagtttcgtcagtacagactttgtcttgactttattaaaagaatatttaaaagtaactgattacatatttttatcaagacccaatgatcaagaatttaggccttatatgtgtcttgtttaagataataacagagtctatactgacaaaattagagaaaaattacagttttataaacattaggtacttatgccaataaaaataaacattaaatttataccgcttacaaacatacaactttgagtacttataccgctatttaccgtattatgtccaattaaactaaaggatcatgttctaattaattaaaaaataaaacaaaataataataactaacttaagtggaaatatatatatatatatata

SEQ ID NO: 120645 - DNA, 701 bp, Cannabis sativa
  modified_base (631)..(661): a, c, t, g, unknown or other
actaggaacaggaagtttttttaaatccattgaatagacttattaacgaaaatttccttttacgtccttgtaatagaaaactttaggttaccccatgtgaatggattaaaccatatttacgtagttctcaaaagtcgctttaggtagtgtcctcgagaaaggatcagctaggttttctttatttgaaaccttctccactagcacgtgtcccctggctacaaaatctctaattatgcggaacttcctctttatatgctcacttctcttgtgacttttaggtttcttactattgactatcgcattagtgctatcacaaagagttaacttagaatttcatcaacattaatgagacttggtaattaattctccataatagtataaacaataaatgatatatagaatgtggcaaagaaataagaagagattaatattttttacgtggctttgtagttaaatctatagagtctacaattcatttatactctgaataataaagtataaattttggcagatggtatctatacacagaattgttgttccgtttacattttttgctgctatttatagaagtaggatgtatagcagctatttgacacaatctaattggtagttactgttgggttttatgccnnnnnnnnnnnnnnnnnnnnnnnnnnnnnnnttacttattaatatagatcagaagatcggaagagcggttc

SEQ ID NO: 120646 - DNA, 1917 bp, Cannabis sativa
aaaaaatattttctcaattttgtcacttgtaaatttacatttattaagtgccataaatgaatgtatgtatggtgtctcaatttgtgttattgatgagtcattgtctaggggccttggctaactttttgatgggcaaattattatgtgatcactcaaaatgttcattattatcatagctattcccattcttgtgtgaaatagtaccatatgctatatagtcttatgtttatatatctctatatctatatatatatatatatatatgtttgtaggtaaagatcacaagggaacaacaacatcaatctcaacatcacttttgtctaaatcttccattccatgcctactcatcttaagacaagtcatttcccactttattaatattattaagttaattatatttattataattactttggaatataatgacaataattaataaggtggaatgggatattcaaattatttttatttcattttttgtcaaacataaaaaaatatatattataaattttgtaccatactatatataatttagtgatacttgacatgattgagatgaactttgtatatatatttattttttttagtttttgtttttgtcaatgtaatattatctcatgatgtatactacatgatattattccaaacatatttatgtttagtcaaaagggtatttttgattgtgtcggtgtatatataaataatataaataaatatatatgtatatattgacctttttttttttttaattatttggctataaatttatataaccatgttatccaaaagagaagagaatcatgttcttctctaattaatgagcttttctatttaaaaaagatgataaattaaaatacacttgtatgtatatattgaaatattcttttctttttgttttaatttaaatatatatatatatattaagccgaaagaatacactttttttaatctcatcttactttttcattaataataaataattaattaaaaagcaaaaaaaaaaaaaaaaaaagtatttggcaatcaaaaccaaatgatgatcattaaatacaaacaaggatgaatttttcttaccttattggaatatgtgagatgagatcattaaagtaattaaagtaattcttctcatgcatgaacaatttttgccaattcttattgtttatttttttatatataatttatatagataaatatatatatgtttatttataatatttatgatatggaaacttggaaatataaggaaccacttagttacaagtactagaagatagaattggcagtgtcacatccaaataaatgacacactaaaagtctctcatatcaaacaaaaactctcaactcataatcatcatgtactatacataagcttatgttagcaaatagagtaagtatttaaaatcttaaatttgtagtattataaaattcaatatttaattttaaggtcatactaattaatgtttataaaaatataattaatttttaattttataagtatagattttgttattattttaaacataacatatgtaaaactcatattctaaatcaatgaatctagatagaaacatgtaatatcagttattttcaaatattcttttaataaattcaaaacggaatctatactgataaaattaaagaaaattataattttacaaatattgagtacttatatcactaaacataaaattttattaaacttaaaactttaaatatttatgtcgctattactctattgttaattatacatatattgtgggtatgtatacaatatactctcttaaagggttgtttagataaagtttttattaatttacatatttatagcaaagttttttaatttaatttttttcataatcgtgtatgttatagttatttaagaccatttataaatttttagggtgcgtttggaaagcc

SEQ ID NO: 120647 - DNA, 1895 bp, Cannabis sativa
tatacgtgcttcgcacgtaattttttactagtatatatatattaggttgatgttacgtgcaatacacatataattaattttcctttttagttaagtttaattaaatgatgttaagtgcaatacatgtatgtttaatttttttaattatgtaatgaatttttattttttaatttttaaaataaggtttaaaattttaatctttgagaatttttttaactattgcaactatattagtgtactctttaaatgtgtttatagatatacgtattttatatgtacaataaaaggatgaagtatcaaaggagtacgaagattaataaatttctaatccaaataaacatacggcaaattatatcaatcaatgactattagtcatacatcttccaataaaaattaggtattaacaatccattatttaacctaaaatgggaaatactaacatcaatagctatggcatttatacattcgttaatttgttgatgatatatatatttgaaatttttgttgatgatattgggcaaagcaaatgattcaaaaccaatgattaatttaatgttacgcttaatagtcaatgaattttatacaacaaaaatttcattgtttcttcaatgtatatgtaataaattattttaattaatttacttattagttttaactatctacataattaaaatttaaatttaattatgacatataaaatgtttacataatttttatttttaaatatatgtaataatattataaaattaataaataatattttgttaagaaattgagatattctaataaagttaactttaaaaatcaaaaaacacaataaaccaaaaattcttttgcatagcactatatatgttttataagcaatttacaaatttacttatattattataatacttcaaaccccaacaaaataaaaaaactataaataaactttttcataaatactaagctactcaaaaatttaataggggtgaacaagccggagaaagttataaaaacaaaaattggctaaaaattagtgaatggctaagaaaacaaaaacaaatatctaacaacaaatactatgtttagaaaaaatatagactccataatgtggtgaagtagattcaactgctcaaattgtcaataattctagaaagagctgaataggttccaaagcttgatgacaccacacctactgtaatcacaacaatgcacattgctccctggcaaaaccacaatcaaataatcaaaataagagttatgatacaaagattaatgtttattagtgaaaaatatttgtcatggaatactcaaataaaaatatgtactaacctggactttagttattcttcctctcaaaatgcttaggtaacaaacacaaggaagtatcaatgtctggaaaaagaaaaagggaaaattgtaatttgcattgtaaattatgttaatgagcaaatcgaatttagtaggatgagtaattgagttgtgtgaagaggaacttaccacaagcattgtcagaaaagatccaatgagtgacattactaggcctgttaatcaagtttcagaaattaaaactttgaaataggaaaatgttgaaatttaagataagagaatgagagattgattgagttaccaaaaaatggaattgagagagccactatcaaagttgagataaccaatccagttctaataaggatagaataaatgtgacgagacttggattgacttgatggaagaagttcctccaaactcattgctactggagttatggtcaatgcatacttagtaaatggattcacaacctgtaaaattaaaagaaaataaaacattattattagtaattaggctaattaggatttttgcctcctaaactttaacatgtaccaaatcatgtcctttgaacttttttggccgtt

SEQ ID NO: 120648 - DNA, 750 bp, Cannabis sativa
  modified_base (43)..(64): a, c, t, g, unknown or other
tatttttgaaaaaaaaaattcgtgtgatagtatttttgtaaannnnnnnnnnnnnnnnnnnnnntttgtaagtttccctttatttattcttttatatttttttttcagtaaaatttatttattctttttaggaggggcattttaacaatttaattagagatgaaatataagattattattttttttttttttttgataaatttcaatcaaactaactctatttgggattataacattattacttagttttatttatgtataataatattattaaacttatattggacctatattgtatctatgttttcaaaatttattcatttcaacaatagaaaagcatcaaatttatattggacctggcgtaaaaactaatttttggtcgatggtagtccattgatcggagaagagagcaagagagagagtagaggaagagagagtgttgaaaaatagagaagtaatttaaggaatagacaaaaattagtatagttggtcaatattagttagctttagtttaggatagttatactgcattgaatttattgtagaatttttctaatatataagtgtacattcaatgactacatttttattgtaactatcatggttatatttttctttgacctgtaatagcatgttacttactaatatgtaaacattccttttttagaattaattaattataattaattatttttttaaaataattagttaaatatttaacaagatctcttttaacaattaatatttata

SEQ ID NO: 120649 - DNA, 2490 bp, Cannabis sativa
  modified_base (1019)..(1022): a, c, t, g, unknown or other
cagacaagtacttaatggccttgggagtgaactgggtcggacaaaggcaaaaataatccacaaccttcttgaagtacgggtgcaaaggcagtatcgccccttgcttggtgtgggcaccagaacaggcacaaaaccctttctttgggttagtttctcggtcgttcgaagaagggacgtaacactcaagtccgcccagatacccagctttatccaggcccctcatgcgtgccttgcttattttggacagagggcactccattaggcccctaaagcactttgcctcctttgcaggactgcttacgtaaactcctccgtgacatagtcttccccttcgaccaagacgtcaccctctgcagatactggctccctgacctcattataccctccaaaatttggaggttcggccactccttcctcctcaactttggaagggctattaggacggtcgtcatcctgctcctctttctcttggacctcaatgtcccccctcacgatcctcctcattcatagcgggcagatcctgctcgacacttggcaatgtggcaagctgggccacatgagggtaagacgcactaactttccgcattgtctgctttgtgcgggccatcaaccttctcctggatggatactgatgtgtatgacgtgcaacagttacggcaggaatagctattgggctactaaagttaccagaacttggacggccaacgggaagagtatcagcaacacctggtcggacaatatacatccacttgcacagaagataacgtctccaacccttcttcagctcccaaatgaagcgaccgtacccttctcctgcaatctattcggagtaagagtggtgttgcacttcaggttttggagtaggagaaggattcactactcacttcccaatcttcaaagcaagagttagaaagcctgtcactcgaagaggacggactagcgtgaagatgaggttgatcctcgtacagaaattgaagcagatcatggtcaattcagtgttcgcctccccaaaactcacnnnngttcatctacaaaagacaacacattaaaaggacaaaaagcgcacacaaattaagtcatgacctaggagttttaaatttttgggttaagggttaaatttcacaaagcttcgaatgagcaaggcaaaaattgaatattgcgagattaaaatcaaaatgttgtaaaccacgaagttgtaagaactattgtagagaaaactacaaagttttgagcccagatcttctacaacaagtcaagaaaaaatgtattttctacaatggaaacctagagattaaagatacaaagttaaaagagaaaaagattgaatatttactcactgtttgaagtctaaacatagtccacacaaagctgctcgaatgcctctgctaaaaatctcacgacagacttgaaggaaattccttttcttctctgagttttctttgtggagaaaatggggaaagagatttctgaaaaagttccagccttattaataggtagatttgtgaaaagaggtaatcatttcgaaattcctaagacgttttgatttcccccataaagtaaatattgggaaataaaaggcaatcaagttcctcaaggataaccgccaaagcgtgcaaaggaaatcgtgtatcgaggaattaattaaatcagagcattaattagccgaaaactgaagagacgccttgttagactcacatcgaattacaaataggtgcattcgatacgtgtcacccattcaaatgtaaaggcaactaagatgaagtctccacgcaacttaagaagtctcgtacagacttgggggcaaatgttatcccaatgtttgcactctgacgtggcatcacatgctggtgactcgtggaagtgattccctacatctgcttgaaggagatgttctaagccgagcaccacgtatacctgtacggacgaggtcctctcaaccgagcagtagacaatctgaacaacataccaacacttagcaaattcagtatttgtatcgtgaagcacaagagcaatccctataaatttgggattatatcacagagatatggcaagctatctaaatccctcaatctgtgtactttatatatgtaatggctaatcttaccaattacaaacattgtaaactgttgacttcgattttagcaaacgacaatgagtctattttataagcgataaacgatatgtagtaacagatatatgataaaacaataataagacataggaattttatagaggttcaaccccgagcagttcggtaatagcctaatccttgttatttgtattgacttaagatcaaggagaaagattcctattcttatagctcttacaacagtatctctgaatatataattcttggacaatagtatagtcttagcttagttgctttttgaccgatccaatgcctagtgaatatacatcactatttatagggctaggaagcttaaggagaaaaagtttcctctctcattacaatgcgtataaacagaaaga

SEQ ID NO: 120650 - DNA, 1430 bp, Cannabis sativa
tttgaaatttcagggataggtgcttgatcgaactcactgcccctagtccgatcaatgctggacgacctaacaatatattgtaagccgatggcaggccaacaactaaaaagtcttacataactgtggcggataggggtgcctcgcccaaggtcaatgcgagctcgattaggcctagactagcaatactgtcactagtgaagccatagagatttaccatacaaggcctcaattttggctttttcgagccacatcttccttagtgtttccttatgaaggatgtttactgagcttcctttattaaaaccctctttttccttttattggcgagctgaatggtaatcaccaatggatcgacgtgaggatatctcacgtttttctcatcttcctctgtgaggatgattggaggttcttcagtttttaccttcttggaaggttctggggcaaatggcgactgctcattttttatttctttcacatatctcttttgggtgttgttgctctcccttgcgatatgcgaccctcccaaaataaccaggatgtcctctccttcaacaggaggaagttgtaacccctagttgtttgaattgttgggtagactgggctggttgtgtccattaccctgtctcttcacatactgcttgaagtggccccgagcgatgagactttctatctcatctttcagccgacggcattcttcggttgtgtgaccaatgtacttatggtatttacaatacctcgtatgatcccttttatgcctcgcatgcctcatgggctcgggcttgccgaaggcaaccttttactcatgcgcgaggtaattattttcccgagtttcattaagctcagtataaagagtatacactggcacgtacttatcgtgattcttctgttttttttgtccttggacgattccttaaaatcatcctttctttttgagccagaggcccctgagttatcaactctagtagagacaacacttgttgaaacattgttgggttttcctcctgagcttgttttcaacagattcatctcttttcgagcttcctcttttcggatgaacacctgagccctttcgttgaactcagtgatgttctttactagacgaccttgtaagtcatcccacagttcggccccagcggttgatggatcagtagaaatccccgcctaaagggctgtatcttgtgtactatcatcctgatttctaacccttgcagcagtcgtactaaaacgactttagtatgccttaagtgtttcgccgagctcttgcttttatattagttagtgaggctgcctcgggtcgtctatcccttgtagcctagagctatttcttgaaatcccttgatagttgttcccaggaagttatggaatggtgagtaaacttgttgaaccagctacttgctgctccaactagcgaggtgggaaacaaaatacaa

SEQ ID NO: 120651 - DNA, 2220 bp, Cannabis sativa
atgtatataaatataaaatttaattatacatattattttactgttaaaaaaagaaaaagaaaatttggtgtagtttatagtgtcacactaaaaatagtgagatattataaactttcacataaataagatagtatttagtgttctattgaaataattttgtgtctaaactcattatttttagaatttcagtgtcccatcgaagaaaccctgacgaaaaataattggattcaaaatttttaactattcaaaatgtatgtatgtaaattatttgagtggattttgtttgttggtaaaaaatgattggtgattattaaaatggaatggaagtagtggctagtgggtatagttggggtttaagattaaagctggacaatgacatatttgacaagtgacaatatttgagggaggaagagacttaactagcgagcggtagaatagaagtgacttatcgaaattcattcacacacattatatttatggtctcgtcctagccttgttttgtatgcaaaaacaacaacaacccactttctctattctattcccattattgtttcagcccaggaaggaaagcttatcttctaaccaacaccaagttgttgttttctgtttttggggtcccttttgaactgggattcctctgcaattctccttattaacaatggcttgtagacttgcagattctatgttcctattcaccgtcagtttttccacattcccattattaccaacaacttttcaatgtctttctttggtttttgtttaaaggtctaaggttttatttgtttattctggttttgatttcagggaccccatcagaagcaaattcgaattcgaagaatggctgctcattattcaccaagtgggtcttttactgtttgtttttctcttgcctattttgcttgttgatgtgtatatacaattgggttcgttaactcgttgcctattttcgttttttggtttgagttatgaattatggagggtttgtatccaaatgaggacttgggttttcagtaattcacttattctgttatttcttttagttgttgttgttctctctggtttctgagtttcttggccaatttggtggttggtttgagttctaatgataaagtaggtctatagcaaatgggaatttgggcattgacttattctgcttagagtcaaactgagtagcttaaaagtgccactcacttttcttcattccaggtttaaaggaggaatcaaatttagtgatgataaagatggaaatttatttttcatacaaagcacccggcttttcatttgaatggatttctttctatagggagtttgacacattctgggtttaaaagtgcactttggtattattgattttaagctgtgatttattcaaatgaagcaccaaacttcttatttaagtgggttttcttatgtatgttgattcacaaattccttaggttggacatttgttttgagtttgtgtgattattctatagagctcttgaataacagttatggtttctataaatcttataaattgttagacttgtatgctgtctctaatagcctcgtagacaaatcgcgttcctcattgttagcgccaccctgtggcaatttctttgtgatgatgggcaggcacctctcttctgaaatgggatggtcttctccagaagggaatcaaacgacaacaactttcatattccaagagaaaaactaactttgtacaagctgtggctatcccagctactccatctccattagacactgctgagaacagagaacaattagcagaaagttacggtttcagacaaatcggagaaccacttcctaacaatgttactttaaaggatgtcatcgatactcttccaaaagaggtacttcttcttcctgcaatgattttaacttatatcagctatggaatttacaggatacatcttaagtgagcaggcaaagtaaagtaatgtaatgatatgatatgatatcagttttaaaatattaaatatctgtttaatgtttgtgttttatctttttcatttttttttatctgtaaggtgtttgagattaatgatgcaaaatcctggaagacagtgttaatatctgtcacttcttatgctttggggctcgtaatgattgcgaaatccccatggtatctacttcctctggcttgggcatggacagggacagcagtaactggggtttgttcttaacatttctctgtatttcatagatttctgaaaaggc

SEQ ID NO: 120652 - DNA, 1129 bp, Cannabis sativa
ataaaatatttttgggttcagcgaccgtggaaactcaatggattggccaaagatgtcacaacgacaatagaatagttttattagaattgtaccagactggtttagtatgttgagtttcgatttagttgagatagctagcaatgacctaagtacccctaggttataaaatagcttaagtgttaaattgagggtacaatagtcattttactaagatatatcctttttgtcctatttgatttctagtaactttaggctgaattaaggttattttatttagtataagttattagttagataattaagaaataatcaacaaagaacaaactaagaaaaaatcacacaacattatcaactttctctctctttcccttcgaagccctaggaaccccagctgaaaatcagagaaattccatctcaattcagtcattctctagctaaaataactgattctaggagctgttcaagctttgaggtaagctcttctcttattcttgatgattcatagggtttaggttgagttttgttgggggttttgtttaattttgagtctgtaggttttattgagttcagactatgttcttaggtttaattcaagtttatttgagtgtgaatgtgatgtttctaaggctattacgttttgatttgagtgaagttgagttcaagaactcaaaagctcactcaactatggtgaatttgtaatttaagtgtatttatgagttttgaatgtttggctatgttgattttatattgttaaactattttggaaggttccaataggtttggaggagctgtgggtatgttttggtgcaaaaaccaagttacccgttttctgcagtagaaaccagttaactggttctacatggtactgtggaaccggttaaccgtttgacctagtggggaacttcattttctaaaaatagttagccgtttggggtgtttttccagaacctaggtttaggtgttttatccatgtttaccagattaaggtttgtcaagttttaagtttaaggtgtattatgggtttgattaagttttttttatcaagattttattgtcgtgacatagtgttgggttttatgccctaaataaaactctgtttcaatgtaatccattttattcaatatcaata

SEQ ID NO: 120653 - DNA, 958 bp, Cannabis sativa
ggggaagaagactcccgtatttttgaaaaaaaaaaaaaactttagtttttctaatttggtttattttctcttatagtaataaaaatgtaaaatttgaccctaataaaactatatatgaaaaaatcccaattactttctagaagatgtaaggatgtatctctttgaagggtgtccattaaagaattttctaaaattattatataccttatcgttacaggttttccaagtaaaatctaccacaatctatataaaggaataacctgtccatatttacccctagtattttttacaagttatatacattatctgtattttttatttttaatctttccaagaaaaaactaagaacagttgttgtatcaattcttttgtcgtgttgtgtgtaaatatgtgatgtgggtccaaattatgtcgaccatgaaagtacaaggttttcattttagaaaaatagaacaagaattttctatgtttataattgagataaagttgagaaattagcatacgttaataataataataataataataataatattactactcttttaatttagtcaaatcttttgatttgatatcaaacacgcgcgcttacaaaacatgattaaattccaaaactatatccaccttttatctttagtggaacttccacatatttttggtttctttcctttaattctagttttttttaaaaaaaaaaaaaaaaatctttttattactttccgatattaagattaacacaaaaataaaaggaattttcacacatttttcaaaaatactgtctcttttttataatgtttattatgttaagtttcatttattgttctacttttattttttaattgtttcacagttacttttttttttgagaaagtttcactattattataaattaacaatcatttacaacagtagtgaaaatagaatagggaatttctcctacccaacaaatgtcttggtc

SEQ ID NO: 120654 - DNA, 1071 bp, Cannabis sativa
gttagatttatattttagggttaggttttaaatgggctaaagcccataactgattttttttaatgtcttttttcttcggttgtgcaccaacgctaatagtatatacaatgacttttttcgtcggttgtagaccgacgctaatagtgtatacacatttttttatatattttatattttgcttcagtttttgtcttagcgtcggatacataaccaacactaattaataattatttgggttcgtggataactgaagtaaaaaagtatgggttgaattttgcgtcggtcaataagtttgaccagacgcgttgaccgacacaaaaatccccttttgtacaatcctaacaccaagaaaatcatttttagccacgatgtaatctctgatgaagaaagaacttgggcatgaaataagaacattgttcaggaacaaattctagcagattttgatggtgatgaagagaaaagagagcagcaacaggctgtatagacagtccaaccaccaccaacaataatccctcaaagtccacctgctaatgaagcacccagtgaacaaaggcctcaagagagaggaaaataccttcatggatgatggattatgaggtatctaattttgatgattctgaagaggattcactcacgcatttttgtttatttttagattgtgatctagtagcttatgaagaagctgctaaagaattaaagtggagaaaggcgatggatgatgaaatggcggccatagaaagaaataatactttggagttgatggagcttctaaaaggtaaaagactattggtgttaagtgggtgtacaaggcgaagttgaaggaaaatggtgaggttgacaagcacaaagcgcgattggtggctaaaggctataagcaagagtttagtgtggattacaaagatatttttggtccagtggcgagacatgatacaatcagattggtcattgcattggttgctcagaactcatgacctatcttctagttagatctaaaattagcattcttacatggagactgtaacgccccaatttctcgagacgtcacactagctagtccgtttaaaaccattt

SEQ ID NO: 120655 - DNA, 740 bp, Cannabis sativa
aataagttaaaataattgaattcctttctattgggtaggattaatgttttagtaggagtattcaattgtatgataaattttttaactactatcaaattgtaatgctacatcaataaataaacggtaaaatattgaaaaatctaacaaaagggcatgtttcaatacttgttatatattaggaggtatttttaccaagtcataaattataaagaacaaaatctggtagtattataagtaaatggggcaaaaatgctaattactctatttttattggagcataattgtttccaacatcggctctaacttcttttgtattagttgttctataaataacaagagtatgatctcatagtaacaaaaatttgtagttgttacatcaattacgaccaaaaactaatgcagagatttattataagttaattatgatttttgtctcgtaaaccttaatatgtacaaaattatatcccatgaactttttaagttgttaaattttttttttctgaactatcaagattgttgaaatcaagatttttttttctaattttagtaagaaaagtctaatatagatgaaaattcaggagaattatttgatatatgttaaagttcgagaagcataatttggttgatattaaattctagagagcataatttaggtggcatttggtaacacttttgttttttaattttaaaaacagaaaaatgaaagtagattttttgtttttaaaaaataaaaatgtgtt

SEQ ID NO: 120656 - DNA, 1383 bp, Cannabis sativa
atctgattatattaaaatgggtttgatttagggaataaaacccaacaggacagccaacaggaagagtgtcagcaacaccgggtcggacaatatatgtccaattagacggaagataacgcctccaacccttcttcaattcccaaatgaaggggcagtaacccctcttcggcgatctgctcggagtaattatggtgttgcactacgggtttcggagtaggagaatgatcgctactcaccttccaatcttcaaagctcgagctagatagtccgtcattcgaagaggacggactagcgcgacgacgaggttgatcctcatacagaagttgaatcaagtcctggtcaattcggtgttcgtttccccaaaactcaccagggttcatctacaaaagacaacacacgagatgagtatttggctgggatatcaaacaatgacaggaaaatatgccgaccaggagtactcaacagattaaaaggatgaaaaatgtacaaaaatcaagtcaaaacccaaaagtttgaaatttttgggtttagggttaaatttcacaaagcttcgaatgagcaaggtgaaatatgaacaatgtgtgcttaaaggcaaacatcgtaaattgtgaagccgtacagactattatagagaaaatcacaaagttttgagcctagattttctatttatcctctataacaaattaagaacgcatgtattttccacaatggaaacacagaaattgaacatgcaaagtaaaattatgaagaagacccagccttatttataggcaatctggtgaaaagaggtaatcatttcaaaatgcctcagacgcttcaattccctcccaaaagcaaatattaagaaattaaaattaatcaagtgtaatcgtcaaagtgtgatgagaaaaactgggtttcgaggcactaattaagttatagcattatttagctgaaaaccgaagagacgcatattcagcttcgcatcaaatcacgaacagatgcaccaaacatgtgtcacccattcaaatgcaaaagcagctcggatgaggtctacacggaacttcagaagtcctgtacagacttcggggcaaatgttatcccaattttggcactttgatgtggcatcacatactggtaaaacatggaatcgacttcacatatctgctcgaaagagatatgctgaatagagcatcacacatatctgcacagacgaagccttcctggtcgggcgatggacggtctgaacagcgtgcccacacttatcaacttcaacatttgcatcgtcactcacgaaagcaatccctataattctgggatcatatcacagagatatggcaagctgtccaaatcccttaattattgtattctgtatttaatgtgtaatcttaccaattatagaca

SEQ ID NO: 120657 - DNA, 1387 bp, Cannabis sativa
tttttttttttttgcatttttaagtattggaatgtcattctaatagaatgttctttctactatttttgtggaatgactattctattttaaaatggaaagaaaaaccattccaatgtaacatcataaaaaaatttattaatttttttttttatacattttaaattttattttatttcttatttttatttttatgttttcatttctcccaatcaaacgcaatcttaatatttggtaaataagtagtaattacataaaaaaaataacagtcatcatttaaaactagtaataggtcaaatgtgtaattatttagtagaataaacacatcaaagttcataattattttaaattacactcattttcaattacttacgaactttctaaacacaccttaaataattaattttcagatctaaagcataatacaataagcgagaaagttcacatctctaaacaaaaattaatagttcttacaatacgacaaagagtctctttactttgatatatagatagttataaaataaataaatttgtgtcttttaaactttatcggttagtaaaagaattcctcaaactatatttgttactaaatttagtcttgcgtgactaatatagctccatgtaaaattcaatttttactttttttatatatttattaaattttaaatattaaaaaataagatatattttaaaaataaatcttgtatttttcaaaattacacataagaatattttgaattaattttttttatcaaaataaaatttaataataatctgacatagacatagtattatgatcagactagttatgaatactattttgacccgtttgaaaaatgtagtctaatttttcatttaacaacgcagttagtaacttttgtgaattggattcgaaatagtatttatcataattcaattaatattttttttaaaaaaatatatgtttattaaattttaaatatattatttttgaacaatattatctttttaaatattaaaaatctatcaatccgctaattttaaaaccacacgaaattaaacctattctgaaaaaacatcataaaaaatatttaaataatttctctcaaaaaagtaaatatatattacatagaaaatataattttgacattttatttacaaaaatacctccataaggtaaagacaacatttatactttttatgtgattttaattaccaaaataccacttacacaatcagacgatgattgcagggtggttgctgtgtggttgcgcggtggttgcattagacgaaggtttatatcagacgatagttgcagggtggtagctaggtggttggcaaaaggttgtatcagacgaaagtttctgggtgattggctgaaggttgcatcagacgaatatttcaatcagac

SEQ ID NO: 120658 - DNA, 1445 bp, Cannabis sativa
gtatttttgtaattttttttccttttttatattttcctgtttttttcccttaattatatacaataataatgtataaataatgatagaatggattcttaatataataaaattaataaatatgttattaatttatttacattaatatctaataataactataagaataaataagtaaaattaaggtgaattaaaaaattattttattttttatttcaaaataattaaaaaaaaattaacaaatgatcacaatttataatattttacttattcagtaaaaatattaataactatttaatacctgaatttttcaaaattaaataaaatcataaattaaattgtatatttcattgattataacaattacgcgagggacggtatgattttaaagatcgcgcaatcgcacaactaacttcatacggtacttattactttaattattatgaaacagtaaggcaaaataaatattttattatggaaatatagacatacgaatcatgacctcccttttcatcattacaatttaggatataaatttcacatttacataatttattaaaattaatcatcttaattgaatatttcatatagaaacattccacatatcactaatatttttatataaatctctcatttttcagtttgaaaaacatataatgttgtgataccctcttttacagttattgtcattccaaatttatctttggtgagatcacattctatcgacactacaaaataaaatataaaaattttcataatatagttaaattgtttcttactattaaagaaaaaaaaaagatctaaatagacttttaaataaatacatcatcaatcacaagccaattttattaaatttagaaatatttttttcatttattttattagaacagcacatgcaatttttttagctccacaatttttaatatttgtgataaaatcatcatctttctatatatcttaaaaataaaaaattatatttttaatttcaatattattactttatttgtaatacacacatcaaaatattatatttagattcaaccattgaataagtacaaaaaatatataaataaaaaagttacaaaagttggataagatgattgctcgaattgtaacttagtttcctagttattaaataaaagtaaacaaaagaaaactaatgaccactttacattacattctcaatcgtaaatagtaaacacgccattaagtttttaacatttttcaattcagacatgaaatctcactgcatgtaaaatttaggatgtgtttggaagtaattgtgtaattactcaatggtgtaatactaaggtagtaattatacatgttagtaagtatactattttaaaatataatgtgtattgagatggtaattatataagaatatttttatttaaggaaatatatttctatttaaggaaagaaataaataattgattttctgataa

SEQ ID NO: 120659 - DNA, 1442 bp, Cannabis sativa
tatttcatacaaagttccaacatctttaaactaaaattttgggatttgattgtttcagtatttttttttattgtaatgaaatctttgagtgaataaataagtgatggattttgagatttttatcgagtgaaacttttgggaatttttttgagtgaagcaagaaagataatttcagtgggttttgtgttttgaatgaaagctcaatgagagagattttttctctttttcctctttcctcctccttcgtttgtctggctctcagcaaagtctctcaggcaagaaatggagggaaatgagtgatgtagtcattgttgtttgttggataatttcaaccaagttataatctgtcaaaagaaaactctatgagagagagagaaagggagaatatctgaaaagacagaaacttttttaattttattagggacgtcaaacaaaaattattatttaatagctattgttttatccaagaaacaattatattattcaaagacttagcacaaaaatagaaataatttaaccggttactctcggtttcacgtgaaagataaatttaaaataataaaaaaaaattaataaaatattatttaattctatttattaaaagccctaggatatcaaactgagccattctaatggctataactgagatgaggaccagtcacgcagcgtgagtacatcagggtcttatatttatatatactagtaaacaaatgagagtaactaattataaaaagagacatagttttcaatagtccaacgagtctccttcccattaagagtatactgataactaccctcgagtcgctctccacaataacaaacttggcttctaaatccaacgctgcaaaaatggccaaacagcaggccgccacttccccgcgcagcacatcagaaaaacaactctagctgtttgaacccaaaccacctttccaagatggtttctggctacaaccgctgtaaattagtagtgttcagtactatgcagtatgcaacatataatattgttattggtataattaaatatcaaatcttatataacttaaagtattactactgagcattatggtacccatcactttttaatgtgtcgcattattatgattgcttagcaatatttcttaaaagttttatattacattaaattatataaaatctgatacttaattttaataacaatataattacaaaaatactaaacaccaattatactttttaacatttctctataatttaatatatatatatacatatatatacatatattaaattttatgaaatattctgaagccactcgtttcattaagattaagttctcttacattgcattgatttaccctaaagatttcatttcaattggaatttggttattcaccatgtacgaggatccccgctaagcatccatggctgaatggttaaagcgcccaactcataattggcgaatt

SEQ ID NO: 120660 - DNA, 1206 bp, Cannabis sativa
  modified_base (38)..(39): a, c, t, g, unknown or other
tattttatttttaaaaataaactattttatttttaatnnaaataaaaagtcacccataaatttttcataaaccaagaattttattatatagacacactttatatagaatagatatatatatatttcccaaataaatacttaattttaacttaaagagcaaataaatatttaactataatttttgacgatatttttattacttaattgttaaatattaagttattatccacttgttattttcttattagtataattaaattaatttttttaaaaaaataaaaatttaataacttagactaatcaaaaattatcatatgataatttacttaacactaaacaactaggtacttacaaaagttccagaatcataacttaaatattattagcgctaaaatttgaagttaggtatttatttacaactgagagttaaacttaagtatttattatgctgcaaattactcttttaataacttaccaaatatatatatatatatatataaatgtataaaatgtgtattattagaaaaatttgagattttatgcttaattttattatctaattaaaagaaatccttcatttttgcattatatgatgaaggttgttctatcaggttaagacaaaaaaaaaaaaaaattgagtttgagttagagagagtgggataaaagtaatgctaaatataaacatatttttggtagggctgaacatcgggcaaattgatcgagtttcggattcgcaggtttcgggcctaaaaaataaaacccgaacccgcacgttcaaataatttgggttcgcgggtctacgagttcagattgaccgagttggctgggtcaatgggttgacttggtcaactctcggtcaacgagagttatcacccaaattctttagagtaagaaaaacatttcaaatctaaagtagaaacgtaaatccaataatttaaaactaaataaatcattcatcaaatttatgtttattgttcataaaaatcataaatgatgaacatgataataaaaactaaaagtatcaaaataaattgtgactaaaaatttaagtttatactccatagtccaaccatacattccgtattagttattgtctgttgaccaaaagtcaatcactcacttattttgatgataaacaaatatttgattattatttgttactaatcttttcttgaccattttgcaagcaaattcacaaagtatcaa

SEQ ID NO: 120661 - DNA, 2337 bp, Cannabis sativa
tttcttgattgggaggttcaagatcaactcttagtttcctggttattatcctcaatgacagaaagcctcctcactcgcatggtgggatgcaacacaacaagacaaatctggcatgctcttgaaaagcatttcactctgcaagtgtcttcaaagatcctggagttcagaacgaaattgcagaaaattcgaaaaggatccatgtccttgaatgaatatttgttaaagatcaaacaacatgttgatctacttgctttagtaggggaggttctgagtgcaagagatcatatccctgccattttcaagggcttacctccagaatatgacaccttcgttatttcaactaatactcgaatcgaagagaattcagttgctgaaatcaaagctctattgttagcttctgagtctctaatcgagaagacagatcaagatttagaaactaaattgagtgtgaatcttgctacaactgagttggatcagttctctgaagtcaatattgcctaccagaattatccaaatcacaccagtaggttttacaatcaaagtcgaactcctcctctctcatccttcacttcatcatctcgaggaactggtcgaggattcaccactcaaagagcctataatggaggtaatcatctgtccacctcttctttccctaattctaacagtcgtggtggctttagtttcaacagcagaggtggaaaatatccaacaaactccaatcgagttcagtgccagctgtgtcataagcttggacacactgtgcttgattgcttctatcgattcaataaaagcttcacaggagtgtttcccaactccaatcctcaacaagatcaagctaatgtcgctcagacaacacaacttgaagatagctgctggtatcctgattctggtgcttcaaaccattgcactccaaatgtgtaaaatctgaacacaggtgtcgaatatgaaggggatgaacaactctttattggtgatggcttggggatctctgttcaacatataggccagtcttttagtcttttgttcacaccaattcttctcactcccttgttttgaataacctgctgcatgtaccaaaactcactaaaaatctgttaagtgtttctcgttttgctcatgataacaatgtattttttgagtttcatgctgacaaatgctttgtcaaagaacaggaaactcgagccacccttctcactgggacacaccagaatggcctctatacttttaatccctctcaattccatgtgcaaccttccaacacagccactgtcccaagagtttgactgcatctgtagctcccaactctactgtttcaagtgttctcacagcctctgtgtcaccaaataatgtaccagaaacctcttcttgtactcattgtaataagtctcaagtctctgactatgagttgtggcacaataggcttggccatccctctgaaaaagttgtcaaagctgtattgcaaacttgtaatataacaatcagcaataaaaatcctttgaatttttgttctgcctgttgcttgggtaaaatacacaagcttccattcccaaagtcttctcaaacagtttatagtgagcctttacaattaattgttgctgatttatgggggccagctaaaacaacttctgtcaatggctataagtactacattcaatttgtagatgctcactctaggttcacctggatttacatgttgaaaaacaagtttgaagccttaaagacctttttgcaattcaaaacataatctgaattacaactaggtaaaaagattaaatgtcttcaaattgattggggaggggagtttagaccatttagtgagcatctcaaacaatttggcatcactcatagacacccttaccccacaacacatgagcaaaatagattagttgaacgaaaacatagacatgtagttgaaaatggccttactcttcttgatcaagcttcaatgccattaaagtattgggatgaagcttttcgaacatctatttacttatccaatagactacccacacctgttttacaaaatatatcacctattcaaaaactttttggcatcacacccgattacaccactcttaaaacatttggttgtaaatgttttcctaacattagaccttataataaacacaagcttcaatttaggtcttccccatgtacattccttatgtatagtctaaaccacaaagcacgttctaagtcaagcacgttccagctcacgatcagcttgctgatggactcaccaaagcaatctctacatcacggtttcatcaatttcgaaccaagcttaccattgaagacatctctgttctcatagatgcttccaattgtaagcttgag

SEQ ID NO: 120662 - DNA, 643 bp, Cannabis sativa
aaaaaatctcaaacaaaaatgcctaaatataaataatgaaaatatactttcacataagatattttttccgtatttttataaaaaaattaaaattcataaaaatataaaaaaattgtagatcccagtaaatttttgctattttaagtttttttagtacacatttttcttatttttaagtatttttaactatttatgacaatattttgtatttactacgtttatttatttattttttggcagaaatttattatgtttttttttgagtgcaaatacagaaatttattatgtaaatttgattaaggatttttttttttttggaatttgggaaggatagtgcagttggctaaatttacgattacttataattatttaaatgtataattttctcataaattgttttgtcataatcaacacgggattgaggcgcgtatttctgctttatcgacatttacgactttcttttttcgtaattatttatttacttatttattcaattttgtgttcatataggattcggattcgtttgttagcgtcttattgtattataccttatatatcatatttctatataatattatattaaatttaaatttatattaaaattttatatatgtaaatattataaaaattaatactatatata

SEQ ID NO: 120663 - DNA, 1172 bp, Cannabis sativa
attgggccaggaggttagcatgggtcttgttattaggtgagagcaacagtatatcatcaacgtagattaggcttagtttaggattagaatgtatatttagtcattgccatctagaaaagggatggcatccttttgagtccgaagggcattattgtctattagaaatggtgattcaggatgcaaaacgttgtctttggcttgtcttcttctttgatgcccaattccaaaaagtcggcttttaggtcaaaatttgagaaatattttttcttttgagatgctagagaaaagtgaatttctatttggtagaagaaacttatcgtccgtcaagaaatagttaagtggttgataattaatcactaactgttattttcctctagcttgttttgtcctgttgttaatataaaatgtgtgacatgcctatggtgattcagtgtctttgattagcccttgtgattggatttggtgacattatttgcttgccatttgttgatgttcaggattcatttcgagatggctagctttagtaggattaatatcttcattttgtttaaatggaagggacatgaagaattcttcattcttccataatggatgtccacacttctttgagaattcggaatgataatttgcacatgacttttaaagtagcttttttttaccgtgaaaaacccatcttgtgccttgtgaaagtaatttggaattttctcccgtgagtgaagaactatttgtatgccactctttgttggattattcatagcctgttctttttgtgcaaagatcaaaacccactatgaggtcttttcatgggagccttaacccaatgactctgtggacaacaaaacatcttaggaagaattgtaattttattggcttagtgattaattcggtgtagagtacttagttatttgaaacttggaaatattatttctttttcttccatagttctagcagcaggatgtcgggttcataatatcaaaatatgcaactactttgattggccttgagtattttgttgggattacatgcatttttgctattgggatgggttatctagtgctgactgtatccatatttaagacttcggcatagctttcattgtctaaattggacaccggttgtaatgcacatatagtgtgtgggaatatttgttggaagttattttaccaggaact

SEQ ID NO: 120664 - DNA, 625 bp, Cannabis sativa
tcctatttattttagctcctgaacagctgatttgatttaatgtgatacatcctttctttcaaaaaaaaaaatcaaggttggtagtagtattagtgacacttttgaacgtgtgcaattttgataagaaaagtaatagtagtaaaagtaacagctaaatattatgatttaggttaactaattattaagagataattaatgataatattgagtattagtagtagtaatcaatttttaaattagagataagtgtttcttggagtggtcttatacatgtggcattaagtgagattatagtggaataagaagaatacataggcttgacacatgatttgttgagatacacttgagtaatagttagagaattaatagcataaacatttgaatctatagtcgccaaagtgaagtccaagaatattaccatttgaactgcccttagcttttctctcaacttttgactaaatccaaacaatattcaacatgaaacgtgtatgggactttcaaatggaattagacaagtattatggtgattagttaaatagttttattatagcttaactcaagggtggagtagggttacactaactagagttaagtccaatcgaagtctataaataagaggcctttt

SEQ ID NO: 120665 - DNA, 504 bp, Cannabis sativa
gtgtcccttcagaatttgattggcagaatgctcaataattatgtgataaattagagttgtttcatgaagtgacaaaattattttttggaagaaagtaccctatcgccaattttttttccaaaaatatgtgacaataagacaaatattgaatcatggatgtcatcagatgtgccttttattaaagacttggcaattcaaatgttgtctaagtttcaaaagtattggggaaggattcacaggcttatgtgtgtggcggttgttttagacccaaggtacaaatttatgttgctcgaatattatttccctgtaatctatggagatgagcaatatgtaattgaaattgtgaatgttcgtgagctttgtagcgagctactggaggagtacgggtctaaatttcctcatttgagagaaagaagggttgaaatggaaaatgtatcaacatcttctttaacacggcgattggatgccctttctaactttgacaaatttgttagagcttcctgt

SEQ ID NO: 120666 - DNA, 615 bp, Cannabis sativa
atattaaaatatataacttacggaattttcctattctctcccacaagttaagatgtgttaacttctcagaaaaaaaaaaaggttaagatgtggtaaaaggtaattatggtccttcatacattgtgttataagatgaatttttcacataaaattttaaataggaaaaaaatgacgtgtcaagaaagttagctgacaaggtatcctcatataatagaagtgtgtgtaaaagtaaaattgacacaaagtctagtcgcacactatacattagagaaagaagatagagagaagttaacacagtagcgacatatatcgaatatatacgatggatcagtgtttctccccgtgccctatgtaaagaccgcatctttatagtgattaatccaaatgatcatagtaagcaataactcttcatagacccacgagtcctatatgttgtcagtacatgaatgcccaacacttgatcgatatattcacagtcatttcataattactcagtgcgtttacaagactataaaacccggagaggttgttgggattttatgccctaaataaaattcattttaatataattttatttattataaatagaaaattagaaatcatttatgtttacat

SEQ ID NO: 120667 - DNA, 1087 bp, Cannabis sativa
  modified_base (38)..(40): a, c, t, g, unknown or other
ttaaacaaaaactcctagaacttaaaataaaactaatnnntacgtggctcgccacgtaactctcttctagtatatatatatatacacaaaaaaaatacaataacataaacacatatatacatacactatatacatatatagacatacttacccacacaaatatatgagctgattcgatcacgcctaataaagagagtaacatgttactctgccttcatcataactattcattgttatataattatatccaacggttgggaacacttataggagaagtgattatattttaaaaaaaacgtctgatatggatatgacaatttagactagctagcaataggggtactattgcacttcctcctattaccagtcatttctttgacactttcaattttttatgggtaattaacaaaaaaacaaaaaataaaaaagataaaagtagaaaagcattaaaaaaatatccccaaattatttagtaaataatttattgtaatggtctctttgcttgtttgccttaagaaatagtcacgttcacttgacatttaattgagatttttgcttcgcgtttaccttaagatgtagtcacatttacttcatcagtcttaagaaataatttattgttttatttttttatatttttttaatttattataattttaaataattaatattatgtggaccactaaaaatgttatgtctacacttgtgtacacgtggatagtccactgtgatacttaattgagatttttagatggaagtgtaaagagtaaaacataatgttagtttgataggttttgctgttaaaaaatccgtttgtgtaataagtgttaaaaaatataaaatttgaatgattttgccaccaatatcccttttgttaattgtgagtccaaaaatattcaaagaccaaagaaagaaacgtactacttcttggagaagtccataacaatatacatcatttaaataattaattaatattcaaaatatgttcagcaaaagaaaaaagggtaaataccattttggaccctctgttttacgaaagttaccaattggacccttgttttgttaaatgacaaaatggaccctgtgtttt

SEQ ID NO: 120668 - DNA, 702 bp, Cannabis sativa
ggatgtagttgcagctctccaacatagccaatccttgatctgcctgagacattcctgtgaaaatgtgcagcaaaaaaacaagtgaggagctatttcttctgaatcttcacaaagaatgcattgcgcatctgttgtgatttggaacttgactagcctctgtttggtctttaatctgtccaacattgctagccaaaggagaaagctatgtttagggatgttcatcctcgaccaaacttgtgtactccaatgacatgagtcatctgttgctgtcaagactttataaacttcagaaactttgtaattctgagcagtaaattggctgtagtcgacttgttctttccattcatctttgagttcaaccattttcctccagtaccaactactttgagttggggctttgtattcccaccaggactctttgctgatataaacattatgcacccatttcacccataggttatctttttttgaagcaattgcccaaatatttttaatgacagcagcctggttccattcatgaatactcatgaaaccgattccaccagcttttttaggcttgcacatgttcccccaagcaacacttccagagcctgccattgcactttgacctttccataagaaactcctacaaatagcttcaatatcagcaatcactcttttgggtagaatcagatcggaagagcgtcgtgtagggaaagagtg

SEQ ID NO: 120669 - DNA, 2107 bp, Cannabis sativa
ataaaatgtgatttctgatcttgggcacaaaacccaacaaaagtatacaatgaataaggagtgataggaccttcctcgagcatctcacttctaagctctacactttttaatacacacactctagctttgaacaacaacatcccattacctaacgctataaaatctttagcttgaccagccaaagcctctttttggatcttcaccaattttgaatcagttaattgagtcgctttaattttgtctaacagatcagattgtaatatcaaattattaaatttccccacaacaaactcaatacctgatcaaaccatgtcagttgctagctagggtgaaatcataatcatggtagatatttgcacgggacccttcctacttagggcatctaccaccactttggccttcccgagatggtaaaggatttcacaatataaatccttgaccagttccaaccacctcctttgtctcatattcaaatctttctgagtaaaaaaatattagaggctcttgtggtctgtgtaaatcttacacttttctccgtagagataacgctgccaaatcttgcaaaaactaccgcgtaaagttcaaaattgtgagttggctatcgttgttcatattcctttatctgatgaaagtcataagtgattactcaatcagtttgcatcaaaacacatccataccctgtctggatgcatcatagtaaatcacgaacttctctttattcgatggtagagctaacaccaaagctataatcaactgctgtttaagttcttgaaagcttgcttcacacttgtctatccacaagaaccactaattttttttagtgagttcagttaaaggtgttgagatcttagaaaatccctcaacaaatcgatgataataaccagccaaacccaggaaacttctaacttctctaattgtcttcggtctcgaccaatccctaacagattcaatcttctctagatcatccttgatcccatccttactgataatgtgtccgggaaaagacacttgagatagcaaaaatttcacaatttaaacttggcatacattttatgttctcaaaatcgctgtagaaccatctgcaggtgttgctcatgctctgcttctgatagagagtacacaaggatgtcgtcgataaatactataacacatatattgaggaaatccttgaataccctattcatcagatccataaaagttaccgaagcgttggttagtccaaaagacattaccaaaaattcatagtgctcatacctagtgcaaaaaacagtctttggaatgtcctcctctcagattctccactgatgatagcccgatcggagatcaatcttagagaagactgttttcccctgaagctagctgatcgaacaaatctttaattctaggtaaagggtattattcttgatagtcaatttattagttcccggtagttaatacacatgcgtaaggatccatctttcttcttaacaaacaacacgggagctccctagggtgatacactaggtcgtgaaatccctaggtcaagcatcccctgaacctaaatctttaattctttaagctctaccagacccattctataaggtgctttagagtatggctccgctataggtgctgaatcaataacaaaatctatttctctttgcactggtaaacctaaaagttcatctggaaatacatctaaaaatccatgaacaactttgatttcttctggccaaattgaatcaggccgcgtggtatctaataccactgccaaaaccctagacacctatcttgtaacaaatctctagctttcaacactgagatcactggaactcgggatcctcaaacagatcctacaaccacaaatagttcctcaccctagttggaagatcaccatttttcgttcatagtcaatagtagcaaaatacttggacaagaaattcattccaagtatgatgtcgaaatctactaagtcaaattctactaaatcaggactcaactctctatcctcaattctaatcagaatagacctaccattttttgaagaaaactaattctctaccaggaagtagggttccaaaccctttatcaaaactatcaaacggtctacctgttggaatttatttta

SEQ ID NO: 120670 - DNA, 805 bp, Cannabis sativa
gtgatcattccttggactgcgccaatgacagagggttttccgaaaaacacaatgtcaagaacgagccaagtgagcaaactactggcagtacaaatatgagtgttcaatacggctaatgaagcatccatgctgactacataaggatctcctccattgaatcctgtccatcctaaccataacaatccagcccccgccaacatcaaaagaatgttatttggagggaacctttctctatccttgttcagtctaggtccaacctgtaaaatcaaatggaagaattttgtaagttagttcaaagtttgtctactattttttagaggtctcttactcttgtgtcttgccacttcaaatcattcatgctaattctatgatcattgttttaaagtgtcataaatctatatatatgatattctaaataataataagaaaacaattgagctctttttgattgtttatcgacttgaatttctgtaatttaatggggttacgtttttcgtatttattaagacgtaaagctatatatttattttgaatagtactaatgctttagaagtttgaacttgaaactttttttttgtttgaaacctttaatcaactaatcacattcatgtaattaaaagtaatatagtctcacttaaaaatatcaataactaatatttattatacatcactttatgtaataagtgtgtactttaggtgtgtatttagcattgttaaaagagtctaacatccttatatatgtatcatattgttattaaaaacaataatattcaaaatttaaaaataacttaaattgcatgtcata

SEQ ID NO: 120671 - DNA, 1587 bp, Cannabis sativa
aatcttctattgataacaaatcaaattaaattgaaatggattttatttagggcataaaatcccagcagtaaccccaaatgaatataaagaaacaaactcactattaaatcagtatatcaattgaaaataatacctggctaacactcttatccgcaacaacatcaaatgtaaaagtcgactcgggaggccctgtccaagtaattctccgagcgctctcttgacgaacacactttccataacattattcgacactactaagaggccgaatcctaattattatttgcacaaccaaaaaaaacccctaaaaccaaacttgacccaacatgcgtagttgaaataaagaactgtgatataacttatttaactacctgaacatgatcctcagaaatcttgaagtacgaaggagacgatgaagataacgctgccatagcacacttcggggatttcaaaagtcggtcatgatatgctttttttgtaaccatagccccaattttcaaaagtcggtgatatggatacgaatgtgaaagcgaatcagggccaaggccccaggccccaggcctcaggccccataattttggaggcctcgaaaaaattaaaatttatattatatgtatgtatgtagaaataaaatataatatataaagtttagtttaatatattgcataaaaatgtggtagcacaagtggttagttgaagcttagaatgtatatatatatatatatgacgtttcgggtttgaatcttacaaatgacacttttaattttttaaaattcttttacataatcatatattttaataaataatcatatataattatatatatagttagtaaatgatttaaatttgtagaggttattagagttcattttatttaatattttaaaatatattttatctaaaaagatataatataatatttatatctttttatttttgtgctccatagggaggtgtttggattttttttttttcaaaaaaataaaaataaaaatgaatacctaaaaaaatattatattatatatatgttttaaatttgtagaggctattagaatttattttatataatattttaaaatatcttttatctaaaaaataatataatatttatatctttttattttttgctctatagggaagtgttgggatttttttttcaaaaaataaaaataaaaatgaattacataaaataaatattatattatatatatttgatatggagtaaatattatatttagtacaatttttttttaaattactctaatatatagtgtatagtagcatttttaggtgcaaactgataaaaaaactatcacgataataataaataaataaaatatttcaaaaaaaaaaaaaaaaactaatgggaatattataacttaaaaaattaatgacaacctcatacaatattataacttaaataaaaagtatatttattaattattatgtgtcttcttaaatttatacaattaataacatagattagaaaaaattgataaattttttgacatagtattgtttttttttttttacaaaagtgctaaaatatatagtacttcaataaagatgtttttttttttttgaagaaaa

SEQ ID NO: 120672 - DNA, 987 bp, Cannabis sativa
attcatcatacaagagagcatgaaagctcattaggaatatcattcctataaatgctacgatcagagaaaaaccgggagcgcctagcaacaaagtaagcgacgcagtttgctaattgtctaataaaacttctttattttagagcatatgatgtgagtgctttcattaaaaaatttctccttattaactatgattactatgcttttgttcttaaaataaaataaatttaataaatagatttttcttttgtttaagctatttaattaattatttacttacatagttagtatttctcttgacatttagctcctaattaattataattattatgcttttgttcttttaaaaaataaaatcaataaataagatttcatttattttatcatttcagtgattgttacaacttcatgttacaactttttagtaaaccttcatgcccaaaatcacatgcgagaatatttttttcatagcaatattcgttatagttacaatattatccttataaatttctaaaaaattccaaatactttgtagcaactgaaaactaagttccttatattcaagtttaccacgtgtgttcaaaaaacttcaaatttatttttgacaatgtaaactatttaaaattttttaaaaatttacaaaaataatgttgtaactataacgaacactgcaataaaaaataaatatttcgatatgtatttctaagtacaaaaattaatcaagaaattataataaaaaattaacttaagaatttcttttaaaattataattatctaaacatcgaaaagaaataatttaattatctttttaacttattaataattatataaaaaataaaatagcatgaagaaaagtgggggcgggaaagagagagttggcgttggtaaacagaaattaataataataataaattaaattaaatttaaaaataaaaataaaaataaaaaaacaaaaatttagaaaatctaggaaaagatcacatccatgca

SEQ ID NO: 120673 - DNA, 1445 bp, Cannabis sativa
ttttgctaattttttttttaatttttttttttaaccgatggaacaatctcattccatatgatgtaaaagtgagagatttttctaattagataaaaaaattaagcataaaaactcaattttttctaattttacctatttatgggtaatactcattaagagtgcacctaaatatagatatatacattaaaggaattttttataaaaatactgaattttaggctaaagtttacaattttactgctacacggaattttttacaaaagtactatctttttataaaacagcctaaagtaaccgtaaaataataaaatagaacaattaaaataatagtagaacaactaaaaataaccgttaaactacagtgaaaacttaataaagtacacaatataaaacttatataatatttttttaaaaaaatccgtcccacggtaaaaaaaaattaaatattttaatatgtagtataaaaacccttatatttaaaaaatattggacaggaacctactttcctattttaatataatagagatatttctagaaactatatcagtatagacaaaagtaaaattgagtattaatatatgatctaaactttgtccgtcaaaggaaagaaaaaggcaaagggcattaatagtcatcaactagaagaaagctatcaattctcaatttatcatcatgcctagctagagtactatataatggtgttcttatcacaagctaaggaggagaggtcttatcctttaatattattcaaaattactattcatagagttttatttgaattcttatcctttaatattatccaaaactactattcatagttttatttgagattaaacattatattgtactaataataatataatacataaattggatattaataggacccaatacccattaacagctgttatatacatcttcataaagattatggacatccacttttacacatttttttatttatttatatatataacaccctggcttctaatcatttatttattcatgcaaatatcatagttttgtgattgtattctaaatcactcacacagttatcaaacatttaagtcaaaaattgataattaaaatatatattttttttaagatttaagagtactaattactaattacaaattacaacttcaacttcctattataattttttagtcaatttctacatctgaaatcacatgctaaaataattctttttttaattttttttcatagtagtattcgttatagttacaatatcattcttgtaaatttttgaaaaattctgaataatttacagtaccaaaaacagaattcctggtattccagtttatcgtgcccgttcaaaaaacttcaaacgtatttttgactataaatatttgaaaatttttaaaaatttacaggaatgatgttgcaagtataacgaacacccccgtgaaaaaaaaaaattgaaa

SEQ ID NO: 120674 - DNA, 890 bp, Cannabis sativa
agataacaaaatgcaagtctcatgacataaagtagatgagatagaaactaagtgaaagtgcagtagggggctaaaaggctaagcaaatgtcctttggaatgtgttgtgtactcacctgacctctgcacccataaaataatggtgaaagagttgtgtacacaagaatcaactgtcgagaccaccaagtaccccgacaaccacacccattgtaatgaccgctttagtaatttggattagtaaaggcaattagcactaatttatgttatttttataattatttatgaatttaattatttgtggaccccattgttagaaataggcactagagttataatttctcaattccggagattttattaaactctaggggtattatttgagttatgtgtgaaatgtgctatttttataatttttgctcggcgataatagaaaaatgcgatggatggctagtttgatcacatgggtaagcttagaaccttatttcttagtgagaaatattttggagaaaataaaatatcggagttgagcggggttatggaatttgaccattttacccctaggcttgaaatagcttaagattaagcatttaagggtattttagtcttttggttaaggtgattaggtggcttattatttagttggcagctacccttattattatgctgaataatggattagtaataagcattttcttggaaattagtgaattaaggaaattaaggaaaaacataacaaatagaaaactctttctccttctctttaggctgaagcaaactagggggatttcatcttcaaatcttgtgtaatctgaatattaagcaagatatttgtgagtctaaagcaaaggtaaaaccctagaacctttatttatgtgtttttgaaactttgag

SEQ ID NO: 120675 - DNA, 519 bp, Cannabis sativa
aattgcctttactaatccacattactagagcggtcattacaataagtatcattacttgcaaatggttgttcaagtacaagaaaggtaaaactgagaaagaccttataaggtacaagactagatgttgacctcacttttagccaacaacaataagtcaattaaagtaattagaaacaattaataataattattgagcaataagaacatgaatttgttatagaagttcgacccagtgatgatggtaatagcttgctcctttttttgttgtattaatagggtttttcacaattttaatcatcaagtctaaccttgttatgccttatcgcacaactcttatcgtttacttgcatatatcattaacacatgactaatcataaaaagctttgggtattggcccaatttggatttctatccaaataaccatataacatacaaatgctattacgttatactctatgggctcgtttggaacgtcgtcttaggtcgtattgtattgtattgtattatattgaattagat

SEQ ID NO: 120676 - DNA, 1171 bp, Cannabis sativa
aaaaccgtacggtcggttttatacggttataatttctaaacggtcggttataaaattgtaaaaactgaccataaccgatcgattttcacccctagtcttgaatgttcctactaggaatgaaagtcgtttgagtggggcagatttgtctttggatgactgatatatttctatttgcaatgatttttgagataaccttgtagaccacattacaaagagaaatagatttgaattgggagaccttcgaaatgagaacagtattagttgcattgatacccttatacaagaccggccttaaaatttagtgggtcattggaaaaaaaaatggggcacttatttagagtaaaatgtagtatttttcaaaatcagcaaaaatgtataattttaaaaaggagattttttttgagcccctagactaggtgtgggccctaagcacatgcctaaccctcctatatccagggttgggcctgcccttatacatcgttcaaaactggaagaatctaccacaacttcacagaaatcaaaaccaactgtattctagtagtgtttaacgaagataattgacatttcatatggtcttgaagctttcaagctgcccatagtaaaaaacatttatctgatctctgcatgacctaggataccgaccatttcaaatttttcaagagcagagatgtaatcattgatgagattgtccaaactttccaaagggccatgggttgaatttgagaaaataccactaacaaaattcttaaattcatttccaatctcacttgtggcgtaatacaattaccattcttattcatgaaactctcgatagaattagaagaaaaaaaaatataatttttataattttttttttaaaaaaatataattattttaattttataattattaaaaagtgggtggaccaatcaaaacaaaacatgtgtacacttggggtacacatagacaattctccttagcatttaacaacaatttataaaagtgcgttttgaaaagttttaccaataaaaaaatcgatttataatgttaagtttcacaaataaattttaccgctaataataataataataataataattattattattataaaatgggtttactattacttaggggtgtacatcaaaccgctcaaaccgctcaaaccgcccgcaccgcaccacaccgcaaa

SEQ ID NO: 120677 - DNA, 1093 bp, Cannabis sativa
atataaatttgatcaataaaattttattaatataattaaaccatgtttacttatatgagacgagtttcaagttttaatttaatcatttaattacatataaatcagaacaatttactcaaattgattaattagaattaattttaaggtaccaatatatataattccaaaatacaatactaacaaccagatcaatacacatcaactacataagtattttgtcagctatatgagataaaaactttaacaaaaattatattttaatattttgaataatttggagaaagtttttaataaaaaaaaaaaaaaaattatgataataataaatattcgacataaaatactaatgaacttaaatataagaggcgaaacatgagtatttaacaaaaacccacaagacttatgaaatctatagaaatataggatatcataaatttaaaaatttgttgatatacatctcgtttgaaatatgtcaaaactttaacacagcaaaccaacatatatctatgcaaaagtccaaaacacatattaagagaggagtataacacaatttgaactaggtttcaatatattacaatatcaagaagaaaggaccactaaaaatagagaaaattacactacatacctcttttaacttaatgtttttaatttttaccatctctttcaaaatttattatgtttacctcatttttaataatcctatcaattttactcctatcacttcacgatagttttcattcttctctagttaaagttttacccaaaatttcttataaatctacacatccatctataaagaacacaaatctattatgtttgaaattatatcttaattatgtaagtgtgtgaggataatttgggcacaatactctaaaaagagatatatttgaattaaattatatttagaggtaaatttagttaatatataaaaaaaagagggtatttttcaacttctcccctaaaaatataactagttgaatataggtggagtagccagtgacaatagaacctagtaaaataacatccaacaatgatatcactgtaattgtgaataactatatgttttggatttaatagaatttatataataaacata

SEQ ID NO: 120678 - DNA, 4659 bp, Cannabis sativa
  modified_base (2532)..(2534): a, c, t, g, unknown or other
ttcttcctagtcttgtgaacaccgctcctaccgtggtgtaaacactgagggaatgactattagttctaaaggaagaggaatgaggctctacgtcgtttatctcagttagaagttgtgcacgaccacgtaggttgtgacctttaggattttcctcttctttgggtctctccaccctctaactatgatttctatttgtgttgggaatatttggacctctaacatgtataaggtcacaaattggttgatttaggtcgagtccattgtggtcattatcatatgaacattccctgtaattatgagtcatgttagaacgtttactatgatgcctagtatcattagttacttgattatcaacgcgatgtcagtttgggactcgtggtggatgtcatgcttgaacctgatctcttcctgcaatctctacttgtaatgcatgcattttttcctaaatatctgtgtactgtgaggttgtcagttagatgattacctaggaggggacgatgagcgtgactggcagaaattatccacggtagctgcaggtgccaaggattctcaaacatgctctgggaattgaggaaatcagtgtgaatactgcttattcctccatgcacctctcagaggatgtagtcgtattgatcaccatcgatgcactttaagagtggttgattaaaacttatgtgatatagtttgtcgtcatagataacatatggagctgctcgataccatgatcttttggtttctagattgttgtcagggagtttaccaatttataagataagtgatgattggggtcatccaagtgacttgaccattgacacgtttattatacacagtgcctttattacatgtctatccacatatgtgatctgaatctaaattatacacataagaagtatattgtatagcagactatacatattagttccatattaaagattctttttactttaatatactactgactagttttattcatatcatataatcttaatgctcttgcacatccttataaaatttcacattctccgtatgaattgggaatttttagatatttattaattatacttctataattaaagtattcgtttatcttataattgtatttcatatattctgtaatatattatcaattaattacttgcttttaaggaataattccattaatctctcacttgcataaaagttagtgtgatccttgaggtaaaatcctagttgacattccaccttagacatgacttagggcattcttagacgttttgtgcctttctagctaaccctttctattttaacctttagtcaccaaattttgagcttgttggcttattttctttgtcatttctattccacgtctatacacaactcattaattttcttgttaccttccccaaccacctccatttatctaggatttccacttcatagattttggtgaggggagtttgtaaacattcatagatcgcttagttctattatagaaattagtagatcattagggcttaattaagaatctagaatattaattatgatttattattttatggaaatttatttcaattcaggttgtattatttatgccatatatgaaattttacgtttttacatgttttgtgcccgacatcattagaacgcggcgtttggcctataaaatcacattctagtattttagtagcaacgaggaaatatagttagacattgaaatgttgagattatttgaggtattagatttgatcaaaatgcccctaggtggcatggttgctttttggcttaggcaagggaaaattggtcatttaccattggttgttgtttgtcctttagtggaatattattagaattatttcaggtgagtataattgaggatattactagattaatattaggtttatttgatattcacgttagaaaaaaaaaaatgataagcattatctctttctctcatttcactctctctctacctctcgaaccctcaagagaaaccagctacatttaaagcttcttcagttcaatttaggatttcctatcaagtttttagtgatttaatccgaggtaaaactctctaggttctctttttgtggtttctttagttcatagttaggttatttacttgatttgtaaattagggttctgtagttttaagagttgtttgattttgtgttcttaggatatattggggtcatttgagctgttttaagttgttcttgtttgttgttgtagtgattgagcaaggtttgagtttataaactcaagcttttctctctaatggtggatttagttttcggttgttgtggttggttttattgcatgaattctctttgttataatgtaattaggtattctagaagttattttaaggtttgggtttgaattgaggtgtgtagagggttttgtatttttcctgcactaaaccggtcaaccgattgatccccaaaaaaccccattgaaccggaactccgattggggcattttagggaaccctaatttttcccatttttgtaatatttagggtatttccatgttatccatcgatagggaaacttnnngtttcaagtttaagtccccaaaaattgatttagcgtgtcactcatcagttttgcaaatcatgtgatttaggggcctgtaaaccgtcgagcagctattcgactcaggttgacccggacacttgaattcaaaattcaagtaagattagtataatgatatgcacatatgtgtttacatgtttagcgtacatgttagttaagcctattagattatattataatagaggtatcagtatatttagtattatattggatgtcaataaatgtatgttggcttatgtactactcgacagtatcacatcggtacgacaagatcgagtacgactagcgtactaagtatatgctgatattatggttgatagtaccatactacttgacagtatcacatcgatacgactagagtatgactagcgtaccgagtataggtcgatattatggttaatagtactgtcatttgaatgttcttgactcagtaccgtgttggacacggggaagggttatggttaggggtatgggcgcctaatcttaatcatgtttacatctatattatgattatgcttttcttactgtgtctgtcgactcacagatattgtttgcatgtataggtaaaggcaaggctaaggttcagcaaccgtgagaggaagcagatgaagattatacatgtcaggacggttaagcctggagcgtacaatctttgggacagctgagcgtatttatatagtcgctaggcgacaacttttatattattcactatgagacttttgtaaatattttgtaaacggatcctggttttatataagtatgttaatttgatatttataaataattaaataaagttttaattattcacgattttcaataaactcattgattagcaacaagctgcacaattaagttaaaaatcatgttaacacgcctaaactaatagggtgtttcatgtctgttctttggtgcaagtaatctcggtttagattatggatgtagtatgacatcgaagtgaaggtgttgtatataatatagattatatatgacaagaactgatatgaataacgttgtctttatctaacatgcaatttactataaagacctaattcatataacgatgatcaatagtagattggcctaaatcctaagtaatcatgaactcctattcatgttattagtttctttgattcactcgtaaatatttctctgagaaaatgattcttaaaaattctattttgggaagctaataatgtggatggctgagaacatgatttacaattatgaaatcctgactttcctaatgaatcaaatgtttgttccctttaagagttaattctcgaactagaatgttctgcacaaatttagatgagatctaaattacactttcactagtgaataaatggtactaaaggataaagaagtaattagaagggtaaaatagtaatttaaccaaaactaattacaaaccaacacatggagggctaatcactacaattgattatatcaatggacactatagtaaaatttagtaaatataattctataattacgaagagttcaattccatatttttagtagagtaatcataaaattaataaaaaaaattatttagttgatgaggttcaataaataatctattttattggagcttagaattataggtccattgttctcgaattgacaccttaaaacactgtcaatggaaggggtaaagagtagaataacgttgttcgaaaaactctattttgaattggtaaaatagtaactatttatttttgtaataaataaataatttttcaaattaattaaatagggaaaaaaaatgttaagacaaattttgttaaaacaaaatttgtcaagacaatatttgttgaggcaaaagttgtcaagacaaaagactccatatttatcctaaatagacaagggtaggcgcctagcatgtagtctatccctatggagtttgtctatttgagttaattagtcaattgtaatcaattaattaattcaattagataaatatctaaatttaaaaaattattatagatattttaaagttgttgagagattccttcataaatatcagtaactgaatttggttatagatatttattaacttaaataattaaatatgatttagttaaag

SEQ ID NO: 120679 - DNA, 1280 bp, Cannabis sativa
tttttttttagtttttattataagctttccccctcttattttggatcttgattgtttggatccacctcaagggttagttgtgttattatgaattgaagaaggttaagaagtgtactattaagatttagtgtatgaatgactgacattttttttttttttgttaaagagctattgcatgaattgtgtttaatttaatttagtataatacaaatgagtataatcataatattgtacattaatattaattcataccatacaattaatcaaaagatacaacccttaaccatacaattaatcaaaagatacaactcttaagtttgcatcatcagatacaaagttcatcaaaagacattaacttgtttcctatagaataaatacattgaaatccttatccaaatacataacaattttagatactaagtttctgaaaagacctaatacttgtattttttaaacaaaatacataacataatttaatggcatcaaaaagatggatataaaatgacatcaagtccaccaaattgccatagaattaaatagatatataacataacatagttaatgttcatatgatgaattggcataaagttcactaaattttaacaaaatgcttgaaacatgaatccctaacttggcattagctgagaccttagcatcattatccctttgtctttgcttcatcaatatttcctttcttttcttggttgtatcaattgggttggcagatggtggtctcccccttttcttttgctgagcagactgtaaaagtaaataattaattagtaatatattaaaccaaacaccaattgactagaagtgttgatgtattacttagttttacatttctaagcataattactgtaacaccctaatctatagggacgtcacgtgtgtgattttataaactagtttaataccaatagtaattattaaaaatcgtgataatattaaaaacttaactaaaataaaatactaaaaacagacattataatggcataaaaagcgtgttccagggatccctgttataaaattttttccaagaaactatatacgatgatacctcaaaaatataaaatcaaaatacacaatagatacagcccaaaataagtcttggcaacccaacatgcaggctggcgaggtcaatatgtatattgctggagaagactgtcacttcatggttgatccaacttttctttgtcttgacatggaccacatagcatccgtgagttacaaagactcggcaagaaaagtaataataatcatatagtttattattcgaa

SEQ ID NO: 120680 - DNA, 2295 bp, Cannabis sativa
aaacacgatggtggtacaaactcgtagaggcgtggttgatccagcgaatccacaggcagtggatcctgcactgcagaatccagggaatgcaagggttccacaagccacgaatcccgaataaccatcaactgtaggtcaaggtgtgacaactcctttgagtggaattgcgcctggtgtgcaagagactggaaataccaattcggcagtcaatcagggcattcccaacattgaagttccgcccccaacaaattctccaacaaccattggagatgacaccgagatccaaaatctctgtgctgctcttggaatcatgcaaggtcataccaacaccctgcatcatgatcaggaggaactccgtgccgtggtgaatctcgcgttcgaagagcaaaggcatatgttcgctgaatggatggataaagaaatggaaacgttgagggctcagcaggcagccattgacgaccgaacaaggtaggccactgtgctgatacgaaaatcctatcagtctaccaatcagcaacctgcaactgtcattcccctgggcaagacagacgaagatccagccgtgaacacttctcaaaccctgaatggtcagccgtccaatccccgatcacaggttccgcttgtgggccaagcggtaggcggacagaccttttctagtaattcgtcaagagaagtcatacccaacaactccgcccaagttaatggttccgaccagctgatcgaccaaaccaaccagtcattgagacagcccggtgtatctatatttgatagattgggaacggctcatgatctcagaaatgatgtgaacagaaggagagggctagacgagcaacatgtcacgctagtcgctcagcccggagcccgtgctcaaaatcttgctcaaagagatgctgatgtgactctggttagccaagaggctgaacaagttaatccaaccgtgcaggcacagttggatgaactaaaaaacatgttccaaggcttggccggtcagaagaacaatgacctcgtgttggaccgagcacgtggatcccttttctccccagagatcaatatcctagagttgcctcataagtttaagatgtcaatttggaagatgtatactggaaaggaagatcccctatcccatctcaaatactttgaaatgcaaatagacttgctaggagtacaaggagatgtatgttgtagagtttttcctgccaccctctcagaagccgcccagcagtggtactttaagttaacacccggaaggttcaactcatggaaagctttctcctcagaatttcatgcacaattctcttcttcacgccaactccccttgcacttggaagatctggtcgaagtgaagcaaagaccaggagaacctctccgagcttacatcagcagattcatgacggaggcaacaaaagttgcactgttgactgaagatgggaaattgtccgcgatactgggggcatcgaagttcttggagaactttggaaggatatcagaaaaaacggaccaatagattctatgagcgacttccttgaccgtgcagatggcttcattaagcttgaagaaggcatccagcgagcaaaagtcgagcataaacctggccagccaaaggctccctccgttggaacatctgtccagctcccttagtacccaagcagttcaagctcgagtggtaaatagtccaacaataacaataggcaaggcaatgggaaaaagggaaagttcgctggcaaaaccgaacaggctcctagggaaaatcctaccaagcttactgctttttctgtcctgacggaagataaagaaactatctacatggctactcagtcattagctccatacaagaagcccgcacccataaaaaaagatgcaagcaagagagacatgacaaagttttgccgtttttatggggattacggccatgacaccaatgaatgcaacaatctgaagcgtgaaattgaatttctgataagaaagaataatccgcacgtacaaaaatatgtcaaggccgaccaaattcaaagggctgataacaatcaagatttactaccaccaccagtagatggacatttgcaagtcatcattggaggtctgcacatagctagagattcaggcaaagcccaggaaaggtattcccgaacattacagcacgagcaagaagaagtgattttggccgttgaggagaggaagccaaagataccataggtaggagagcccaccataacatttagtgatgaagatgctgtcaagattaatttccctcacaacgaccctttggttgtggaagtccagatagccaacaagatg

SEQ ID NO: 120681 - DNA, 1232 bp, Cannabis sativa
  modified_base (601)..(602): a, c, t, g, unknown or other
attttattttatattttaacccgattgattttctcattgattattctgattccaattacagtttagtaaacatgccattaaagttatattatttagcatatctgaatttttactcaatttagattttttattgataaattattaataaattctacaaaatatataactcttttttagtattattacaataaagataacgaaataaaaaacaaaaaaaaaatctcaatttttttttttttcaaaatataagacatgtggcaacttatatgtgccttttttccctttctaatattttttctctaaaattttctatcgtcattctatttttcttttctaattacatgttagcatttattcttattttttttatttccgttatttttcttattaataaaattaagttaacaacattaataacattaattaatttaaataacattaatttgttttcaaacactccctcaatatcaaaaaaattaaataaataaaattaactaatttttattaaatgcacaataatattaaataaataaattattatacttcaaacctttttttcctttttataagtgtttgtaattttttaatatatatatatatnnatatatatatatatatagtagtattagctacgttcccacgtgcaatatatgacaagtaaaataaaatagtaaatgaaaagaaataattgacagtggaaatataatttgtacattaaaaaaaatgtacataagtatatattcaaaagtgtagacatattatgaagcagccaaagttaaaattaatttgtacataatagttgttatattcaaaattgtattaaacaaaaagttagcgagtccagcttcttcaattgtagtgaaagttattttgagatgacaaacttagaagattatgcttagctatggaagtttcttacaaaagtttaatattgtctttgaatacagaaaatttttttttagatggtaaaatgtgacattcaagtgtaaattctttttgcaaagagatgggagtctgtcattggttcctgttatatttggtatttatacgaatgcgttgatagtatatttgtatttgacttcataatcttttgtggattttgaacatttgagataaattgcttattcttcactttcccccagaagttggcatgtcttcattgtctctttgggtatacaaaatatttatcaaattttaaagtaagagtggaaatttaaattaaaaacaaagac

SEQ ID NO: 120682 - DNA, 1366 bp, Cannabis sativa
tttaaggccaccgcgggtgctggagacggtgccagtgagctcatcagcttcttaggagcaaaaattttcataggaagcaagacactattaactcgatagatagcgagttggttatcggaataaacagttccagatatggttgtgttgacaacaccagtggatatgttgacagaagatccgtcagtactagtaatgtttaatgggaagtcgcgagtgttaatggctcgagtatgaacagggtttgttagggtttggaagttttgtaggggtatgaaggctgagatgatgtgaaactggaccagttgtgttttttgttggggagtgagagtgttgagtgttccagtcttaagggctgagaatgctccattggttggagcaaaaatggtgacagtgttggaagagttgagatcattttcgatgggagtgatgacatcagtgtttgttagtagacgaataaagaggctgaaatcgccggctttctccaagatttctgtaatgttggtgggatgtccttttctcctggaaatagccgctggtggagcttccaccaatggctgatccggcgattgagctggcgattgatgtgatgacggatgaatattcttcttatttggtgttgttgatggtgcttgggcaggtgatgacaactgagctaatgtcagagtatggaagagggagaggaataaaattaggcatgaaatggtgataaaaatctgactttttgccatggttattaatttttattaattgatataggttggatttcttagctagaaaaaaagtatgatgatagaaaattggtttgaaaatggttagttaaacttgaatgaatctaagctgagagatgtgagtatttatatattatttcactatatagtttacttcattatatgttggttgagagagaagtaaagttttacaataataagttaaattaaagggtgtaatgtcacattaattatatataagagttcgagtgtccatgcagtgagtagtactaataaaagaaagagatcagagggaactatcgaacaaatgtgatgctatcaataatcattttaacaatttcatgatcatattattatttattgtatatatatgatcatgaaatcactttcatatatagctagatcacaattatttgcatttgtcctaccaattatacagacgctatgttctaaatctaatccattcgtttcatataatagtgtgcatgcatataataaaaatctgtagacatatataagacatgatcattatgtgagataataattgatttaagtagaaatcatctcatatatattcggtgaaattgagtatatctttatatattaaaaaagtgcctatctaacggcaattcttggtt

SEQ ID NO: 120683 - DNA, 1002 bp, Cannabis sativa
atatatacattcaatggactctgattagtgaaccaaatttacccgtgtttcattgttcttatattgcattgttaggtttttaaatttctggctagtagagagcttttgctttcatataatgtcagaagtaagcatttggttagagaaatgaccaaaagggatcgtaaggtttattttctttatgctagtttgtgaagatttagctcaataaaaaaatgacagaactcaagacttgtgaattacacaaggttacattacaatggtagagattagagaagatttggcatgttcccatttttagactacttttccttcaatcattctaggatggaaaatttggtaactacgtacatttatcaaagcacatttatattttgctatttgaattttgtagctatgcatatataccttcatgttattggctgaccattttttcgttataagctacataagaatcatttgactaacaaaaatagttgaaaccgtgtgtcaagggcctacaaattcattcgagaatcgagatacttaattttgggttatcatatttcaatcactaaatagttgtgtaaaaatattatattatacaaaataaatttaagacttttacactgaaatttttaatttttttcctttttactgtgaggcggattttttttaaaaaatactatataagttttatagtgtatactgtgttaatttttttgttttacagttgtttttgagaaaattacattgtatactaattttattttatctattttaatttttatctttatttttatatattttaagatatagagtgaaagttaggcaacctcctaataaaagtggatattttttaatgaaatataatataaaggtattttttattcatatacaaagaagagaggtattctcaatttatgccgttgtttttaattgttttgttatgttgttttacggttgttttataaaaaataatatttttgtaaaaaatactatatatgtacaaatataaatata

SEQ ID NO: 120684 - DNA, 2935 bp, Cannabis sativa
aaaaaatactcgttcttatccaaacctctaccttatatattattttccaaattatgatgaaaggcatttggcatggaaatatgatgtgtactacctaccaatagaaggtaacacaagagtaacctactatttttgtaggagcaagggccgcaaaaattgatgacatttttagaatactagttatggctaattgtagtttgagaaggaagatttatatgaacaacttggatcttttagatgtagtaataaattaaaggtgtttttccgtttgagtgagattctgtggttgtgggagggagtcacattttttatggcgtcgtttgcacattatgtatgtattaaacgttctagagaattactgtatctagtctatgtcgtcctgtactcaaaaagagtgtgggagattcctgactgtgtgggaccatatctaatcggggcttgataactaatatcatattagttaacctagcagtagtttcatctgtcagaagttagttgtgttgttaagagagttaatttgaaattcagttttataacaaactgttgtaacaaaaagactaatgtcgtgtatcttttgaattgtttttttctcttcccatgtactttctctatataaataaagtgcttgatcactttgtttgatcaagaattaatttgctaaattttctcagtgttgttcttataaaaatctcttttttttccctgtaagtttacatggtattagagccactgaccattgtcaatggactcatcatcttcagatctccaaattgaaactttggtaggagctcctgcacctccggcaatcaatcaaaaccagtcctggaaatggaatctcatttttaactctttcacattctctctcaccatcaagctcgatcgtgtgaatttcttggcatggaatcacaagttgttcgaagtgtgattggtcatgacttagatgagattctattcagcaatgtttacccaccaaagcacctaatcaatggtgaaatcaacccggtgttcactcaatggaaaagaaaatatcaactcatgttgtcttggctctgatacttactgttagaagggattcttggatcggttgctgcctattctatctcctatgaagtctggcgtgcccttgaacaaaagtttgcaggtcaatcaaaagctcggttgctccaactaaaaagtcaacttacaaatatccagaaaggtaatttgtcgatcttaaattatgtggacaaagtcaaattaatttgtgatagtcttgttgttgatggttgcatcattagtgatcaagatttagagttgcaactattaaatggcctagggccagaatatgaccctgttgtatcaggcataacctcaagtattgaatccaagagacttgaaaaaattcaagccctattaatggcttatgagtgcagattggaaaggcatcacgcagttactgaaatctcaaacaagatggctaccaatctcactattgggggaccaagattttggattcaatccaaattcaaagaccccatacacacaagtaagaaccaactctaatgatgagtggcgtaattctaatgatggctggcgcaattacagcaaaaatcccttcaaatattcatcctccagcacctcaaaacccatctaccaaatgtgtttcaaggttggccttacatcaaccatatgtcagtataagtttgacagggcctttgttccatccacaaagaatacatctagagtggaaatggaaattctggtaattcagctcctccaaaagctttcttagctgaacaagattcaatagatcacatggattatcaagcatactccttcaatattgttctagattttggtgaggactcattatgagctaacaatcatgtgccttttggtatggagcacttggacaatgccatcccttatacaggttaagacactcttgttgtaggatatggtaagaaactaattatttctcatataggcaattcaactattacatctaatcaaaataccccaattattctaaaatctattttaaatgttccttcaattacaaaaaatcttgttagtgtctctaaactaatccatgacaatgatgtctttcttgaattttacaaacattgttattttgttaaggacaagaaattgtggaaagtgttgctaaaagggatagttaagaattgtttggtgaaacctcctccaccattcaatgtcatctagctaccattaccaagttttccccaactctaaaatgttgttgcactaatgattccactcaaaagtgttgttgcattcatgattcaaattttacttctagcaaacaccaatgtaataaaagcactgctttgcaaaatagtactccttgtaattctacttccataaaaaaaaatgatttaccctttatttttccacctcaagtctattactctactgttaataatgacataaacctttggcacataaaacttggacatccgtcacatgcttagcctcctagccctcgtcagatggataaagcccatacttaatgaaattgccctcagtaccaatagtgagatgttctaagcctctgcaaaaagttagagtatcttcttggctctattcctaagttccatggtgaaagggggtcgacaataagaaggaatatgttgaaagttggtatagttagtccccatgtccttaacaaaataataatcctccacaaagccaccaattacgtcggtgtccgtggtaccagaaaaccacttctcttcaatctgggagaagtagaaatacccagatctattttgctttgggctggactttaagtcaaacagtcaattggtattgtgggcagacggatgaccccatccttgagaagcatacaatacgaatagggttgacatgtactttatgcccttagaagtcaattgggttagacatattgttggaagttattttaccaggaact

SEQ ID NO: 120685 - DNA, 1932 bp, Cannabis sativa
  modified_base (1902)..(1906): a, c, t, g, unknown or other
atgccatatatatcaaaacttatctttattttcccatatttatttgctgaaatatgtagtcattaacaaattaattttgttttgttttaatttggttaggtttatcaaccatggttggcaaaagaaggaggaaagtgataacagaaccagcaaagaagatgtttcccctgaccccaaggataatgcttaagcttggagacatttcttgtaagttatgtaatttggagatttgcttactcatgtttcacttgtttaacatttattgtattatgtatttgattgtaatttatctccatatgtagcaatgcaaactataatgccctaagagcaactgagaaggaattgagtgaaaaggaggtttgatcttcactattattccttttttttttttttattaattgtcgttaattaattgtacttgtttaacatgctttccatgtactctagaattgatgtaattttgccccatatttcaggttactgataaattgaaaattaaagttaaaagttttagcaatgatgaaaagactgagtggagaaaatatgaccctaacccaactcccacgaagaagcaagttcaaacaagatggaggaaaccaaaggtagtggagggtaaggggaagaagatggaggtggaagaggaagaggtttccgtcaaaattgaagaagtgtcagtttacggtcgatgctccttcaaccgtttaatttttatttgcaaaaacctgaacttagagcaaaaagatgtgatcctcaatgctagatttgcatcattcattaaagaggatggcccatacattgacacctgactagcgagttggttaatcaaacatgttgacccaaccactagcatactgtatttgtatggtagaaagattgaattgtctgtcgccatgttttgagatgttatgggtgtggaggatggaggtgatcctgtaatcatcacaaagggtgatagtgacattcggtatctggaggagattttgaacgttgtggactacaccgtgtccttgacagcattggagaaatcattgttagaatgtgttgaagcagatagcctatttttgattaagttttatttggttgtgatagggacagtcccagtgcctaaaacttactgtgatgtggtttcagggtacctacattccctattaattacaagggagattcgccataagaattgaacaaccgtcggattcaggtatttgatgaactccatttttagatttcaaaataagcatactaagaatgtgtctggctgcaccatcttcttgcaggtactttgattttttttttctcttgaatttatgtaaatatgtttattaacttgatattttatttttttaatttattatttgaatctcttacggaatacattgtgtgtttgtcatagttgctttacttgcttcacgttgagtggaacattggttatgttgaccgaattgtgctccccgttgatttttggtgtaataaaaaatgtaagtctgcttacaaatagatcaaaggcaatgggagtcccaacaatgagaaggtacatcaacatttggttatattgaattcatttgattttcttatatatattatttcgacattcaatattcatttttttaaacttgttcagtttaatagataaagctgatttcaactactgtaatactgcccaactactattctgactcggaagagagaaagagtactgaacactttttcagtgcaatcattgagttgaaggagtacttttcgaaggagttaaaatctctatttagaacattttctttgaaacatttggaggaatgagaaggtgaaggacgtagtcagaaagatttggaggaggatattgtagatgaagtggggaagaagccagagtgcaactgcgcagtagatgattctgttgggttttatgcnnnnnataaaactctttacaatctgattagt

SEQ ID NO: 120686 - DNA, 782 bp, Cannabis sativa
aaagaagttatgattttaggagtgggttaaaggatttccctgtcagcaaatatcgaaaggaccatggggctcccactattaattcgctattaagaaggataaaagacccccagaagctacaaatattgtaggaggatagcaggttagtctaatttgggaaagttttgaccagatggtcttggaacctatttggttgtatcttattcggagctcgtggcaacagtgtcatatctcctgacaccaaatcagatcttgtctcttgtgccagaccttggtagtgtgtgtacatgccactaaagccccttatagtccagcagctggtctagacaacaattttgcaaggtaaaacctttgaggaacacgtgtccttattcccgcaaaatgccttggaacaattgtacacctcacgatggcaaagcctcctaccaacggacagtcaaatcatcatgttgtagtttcggcccctatggcatgttgagtaagaaaccctaggtgggtaaaagggcatgcccttatccacacgtgtgactataaatgcctttatttttcatgtgcaaaggatgaaaaattttatacatacaaaacctctgaaaaaattcctactagctttcttcttcatcaattgaaacaacaggaatacagagctagggttgatttaatgaacacttgtaatattcaaacaaacgcctacaaggctaattctacggactcgtggactagggattattaattcatgaacaacataaaaattacttgtctattatttattattatatattttt

SEQ ID NO: 120687 - DNA, 1247 bp, Cannabis sativa
ttaggatgttaatgaaacgtacatggtagtaaatctagatcttggtaaaatatttccaacaccaacaccaaagtttcttttgttgggagtgttaatctgtcaaatataatgttcgctgttgtgttgtgtgttcatgagtttgattataatctcatctatttctgtgctttatccaactctgcttaatattcctttctatttctccctcataaatgcattattcaggatatcaccaagaataaagtgattgggatgggtgagagtgttggaaacctttattacatatctgagcataaggctcctgctgtttgttccatttcagattctagtataagtgatgagaacctatggcattatagacttgatcatgcttcttgtgtaaggacacatccattgaataaaagtttacactttcaatattcttattgtcatgactttcattgttctatatgacaccttactaagcaaagaaaatttcctatcatgagcaatcataatttgtccaaatattgtttcgaccaaatacacactgatatttggggaccatacaatactcctactgttgaaggctttagctattttataactatagttgatgattgttcaagatttacttggattcatctcatcaaaaataaatctgatgctcaattcaccataccagccttcatacagctcatcaaaacccaatacaatattcaaataaagggtgttagatctgataatgctaaagaattacaattccctgcatttttctcatccttaggcatgatacactatcattcttgtgtccaaagaccacaacaaaattctattgtggaaagaaagcatcaacatttattgaatgttgctagagccattcttttccaatcacacattcctttaccttattggggaaattatataaatactgctacttatcttataaatagaactaccacacctaatctcaaacataaatccccctttgagattctgaattctaaagctcttagttatcaacatttaaagacttttggatgttcagcctatgcttcaacattaggagctgggagatctaagttctctccaagggttactgcttgcattttcttagggtatccccatggaatgaaagcatataaattgcttgatcttagcacaaacaacattttttttactctaaaaatgtaatatttcatgagcacattttccctttttttaaattaaagcaatttgccttctaatttttccaatttttttgctgt

SEQ ID NO: 120688 - DNA, 1257 bp, Cannabis sativa
  modified_base (1219)..(1219): a, c, t, g, unknown or other
tagttaccctaagtaagatcataatcttacttcattactaaaataattacatatttaataaaatatgtctatttaaatattattttattttctgggatattacaaccggatttaacgattttgagccatgtacaatgctctacatctcggttggaacaacaatagtcatatctttattgatattagtatttacaaggttacaaaaatcttcataaacttctcagagattacaagaagaagtttctctctctagtttagactctctctgtcaaccttacactatcacaatttttactcaagcaaatctagtctaattctcacacaggttacaaagatttacaactatatataaatttgcattgttgccaaaaatatctcctaaatcattgtggcgcatttataccgccttaaatgatctaggtcatcatcaccaacaataatatccacgtcagcttgagaacacactttcagtacggacaatttggaagctctataaacacataagcctttcgaatacgtacaagattttattcccgaataaaccttcaagactgacaataagctgtctaggagtgtacttcgggattaataacaagctatcctgaagagacattccatacacggtacaagcttatttggaattaccttacaagaccttctgcatagggctttttgaattcacattttccaatatcgaataacaaaacttgtaactataactaacaattatttatttatttatttgcaaaattatttgtttatttgattttgctggatctaaacctagctagaaccaaattaggtagccgaaatgataaaagggaaattataatatgattattatagttatatgattgccacataggcacgtatcactttagcgttttatgatctaagttttcatcatatttattcagcaaaagggaaaaaagtttcattttatttcttttttgattaaccagttttcattttatttatttcgttctctttttctctttggatttttccaatttattacaaattttaacattgacatgcacatgatgttttttaaacttttcaggtcctaatatttacttaaattattgaaattgttgataattaaaaaattttcatctaattatgtaatgattgttcatgtgttaaatcgtacccttaattttgatatctttatatattaaaagtgcctatctaacggaaattcttggtttaacgattnttggtttaacgattcttttttttatttagccttacacg

SEQ ID NO: 120689 - DNA, 1850 bp, Cannabis sativa
tgaaactttgtgtccgtgggccatcattgaagccatataaaaagtttcaggtctaatgttggagccctcagtaggaaaaacaaaacgacttagccataaagacaggaaggctgcaagactacctcttctgaaatgttcaatgcaatagagtgaacattaacttttggtttacctttcctttgtttgtgtcctcctacggtcttgagagtcgagttttctttcacacctttaaacatctttgtccctctatagaaaaattctatccattgctcccaaaatacatttatattatttgatttatcaaaaacgttgacactcttcaaatacttataaatttgagcatggagccttaaaagctctgcagtagtagaatgatatggagtgccaccaaccaattttttggtaggaggtatgaactcttcataaggaattcctaaaataggtagccctccaataacctttaagtcatacagagatattcccatctcaccgctgctatgatgaaatgtgttagacagaggaccccaaagttcagaaaaagctcgccatagagatctttcatacttgaatggatatcttgataaataaaaagctccataagttccagcctgattcaaaatatctcgatttgtacgtaaaataaggtttgtccattcgataatatatgtcacaaatacaaatgtccatgaaagaaaaaaattattattggcctttttctctgctaaagcacgatgacaacttggataaaagtctacatataaaagaaaatacaaaattctcaagcaagacacttgtacataaatgacacgcactagcttgatgtggcatctgttgaacgagaaaaaaaaatataataataaaattattattagttcataaattatttcttttaaaaaaattgaaaaggaataattgattttaaaataataataaatatatatatatataatcagtcaaatagagagtaaaagtaggagactccttccactctctcaacgtctcactctcctatttttactcaccctttacgttacgtgggtggagaaataaaaattttattgaaaaaaaataggctctacaaataggagtagctgagaacaaaaaaaaaagtatcgacactttgaaaaaaactgggagagaagaaaatagagaagcaaaaaatactacgtataatttttccaaggaatcaacagactttaaaggtaagtatttatgaaatgctctcattcctctttctttcttggttgatttcgatgttcgttacctttcttattttctctctattcatatatggaatgccctcgttccataaatgaaaatggatgccctcatctaaggaatgtcctcattctaccaaaaaaatagatgccctcatccaaggaatgccctcattctaccaaaaaatagatgccctcatttcaccaaaaaatagatggcttcatccaacgaatgctctcattccacacaaaaaattagatgctctcatccatgagatatatctatacacatatatatatactcttgttcatgaatttattattaaaattatttttggtaaaatatattttgaatgagaaagaacaaattcatatcgtctcgtgtgtgattacattactgctttgaatctttagattgcaattaacaaatctatatatgtatatgatgaatgaaaatatacatatatatatatgtaagtcgattatatatatgagtgtattatcaagatatatatatcatgtgagtcgatgtatttttgtatatatgagtgcattatacatatatatttatatactaggtggatgttacgtgccgagccacgtattgttagttttatttaaagttttagtttt

SEQ ID NO: 120690 - DNA, 2966 bp, Cannabis sativa
ataatatttggcattcaatatatcttgaaactttttctatctcattttggtgacgtctcgagtgagggataccaactcgtaccacacaagagcatcctcctggaactgaaaggtagtgcaagtcacccgatcattcccagtgacacctacaaagtttaggatcctctcagttactgtaagccactattcgactttcataatgtctgtactttcgagaaaaactggaggctcctgtttgcgaaacctctcatacaaaggttccagacggttgccaacaataggctgttttgctgacactgcaggaactaaagcgaccgacatttgtgatagaggcactatagggagaccctacactcttagcctctgaatttcttcatctagttggtggatttgggcttgtatttctacaaactttgctcccaatcttgaggagcttgtaatggattttcatgtccatatccttgaaacctttcattgcctctatcgagtccacaaagatttagaggatttcaacctccgcgactgtgccaagtctcgaccatgttaccatgacttctcgtgttttgctagacgttcatattataggacttagcctgtgaacccatagcttaggtaggttagacagagatcatataggttctaagtattgcacttaaggattttaaggcaatgcatttaaataaataatcataaaattattatgcttcctaatcacataacttaataaacaagtaaagccttactgaacagcgagttgagcttatttctgatgataattgtagatgtcttcacggtcttcggtagacaacatggcggctctaataccaaaattataacaccttaatgattagccatgctatagtgatttttaaattgcagtgtactcctttgcttatcaaagggtttttatcaaaaaattttgtaaatttaaacttttgaaaaccttatactttttataatcataactgtatatacttttacaaaaggatcgggatcatattttttaaaaaatatttatacagccaaaataaacttagtaaacatgttgcacaacgactataaaatgaagcccaagtcatcccaagaccaaactcttcaagttgttccattcaaacatgtacagtcatcccctaactctagactcattaatatttagccttagcttttctcttacctacacatacaagaaataatagtgagttgacaaactcagtaagtaaagcataaaaaatacaatgtattaccgacttgtatatagatactcatacacctatcaacaaggcttaacaaatgattaagaatgttcttaaaaaaggtacgacccttgtaccacatgcactacgtactactactatacaagtatttgtaggatttgaacctaattgtcctagtgttggtaacactggattgtactcttaaacatcatgtgatgtaccacatgcactcagtcgcactgccatgctagtgtttgtagcatatgaatcatataacaacatccatataacatacatgatgaatggaggccatatgtcacaatcacgtaacacttgtaaacaacattttaaaacctttccaggaatctaaactcaaagctaagagtttccctatcaccaaaaagcatggctaagtcctaaatatcgaggaaacacaagaaaataacattatcagggaaactgcctaaaaagcataaggccatttttttgggtctgcaccagtaaaatttgtaagtattattatactaatcttaccttgattctaaatttaggtcatccggtgaacctgactagaaactactacttcacgatttataggcccttaagtcacaaattcataaaacttatgagcaataggctacatcacttttaggggacttaaaatcaaaactagaagtctccttaccgattgatagcatggcagtaccctaaatattgctaaaacacaaaaaacaagggttcagaaattcgagaactagtaaactagatttcaaaaatggaaaacaagttcttagggttctgtctgggaagtggttaatcatttctacatgtatgccagaatcggttaaatggttcattgcaggaaaccctaaaaacttcaccagcatctcaaattgacgccaaataaaaccaactctccaaaccatataattatgccattacaaacatacttcaagcattaaaaatagatataagcctctcaaacaagattcaccattaaagagtaaagtttcagctctaaacctcaaactttgtctaagctcaacaataaacatcaaatccagcttaaagtagttcaaataactcattactaacatcaaaaaatagaattaaacctaaacaattcgtacaataaccctaactcaaaattatgcttggaaacctaatctcaaaacttgaaattcaaaggaataacaaagaagaagcttaccttgagctttaatctaccaaattctaagaatttccaagctaataatcccttgtaatttgctaagaaacttgaatcactttttcttttggtgtggccgaacctaggagagagaagagcttgggagtttttttctaatatttttgtttttaaactaaaggataatgtcgaataaagacttatatttattcatcttattcttttctaaagattattttaaaattaaattaagttctactcataaagtcaataatataaacctagggtaaaatgaccttcttacactttattaactaaaaagtaaacactacaccgaggggtaaaatggtcctaatccataagacatgttcgacatttcaaatgtctaactatgttgccctacaacttctaaggtactaactcatatctacgttattatacatgccatacattgcattttactgttatcgggcataaaaatataaaacatatgaaatttcacatacatcataattattacacctagaattccaatatgtaagtaataattaaaagtctaattctaa

SEQ ID NO: 120691 - DNA, 1238 bp, Cannabis sativa
gtggtaaatgtgtaataaaaataactttgtaagtagaaatgtagtaataggcatgtgagggtaattttgtaataaagtgtctaaaaaggatttttcatgtaaaaatttctttattttatttatttattaactacatggtgggctttttttttaaaaaaaaaactaagtaaaatagcacgtgtatattcatattttatttattgttattatatattttttatttaaattcacacaaattctagtaaaagaatgcatgtgttataaataataaataaataatattaaatccagtgaaagaaaaagaatgcgatatgcaaaatgaacttaagtttaaacactaatttagtaaatgtctctttttaaaaaaaaaaataaaaaaatgactaaatatattagctagtaaaaattataaaaatagatttactatatgttattttttaaaaatatatgtataataattaaattaagttatataatttttttagtattacatattattattattataaaaaaacgaataaatatattagatcattaaatatatataacagtatttgatatatcgtatcattgaaaattaatatactgtagtaataaaattatataccacaaaacaattacaataatactaaattaacactaaaaaaaattacatctatcatactaataaaattatatatactactattaaaatatatatacataccaaaaaatttatatataacaaaataaaaaagtacaaaatatatatattaatgagatatacaacaaagtccatttcatcactagctgctactatacatgtttagtaatcatggggaaggtcaaatggctatcggggaagaacaggggatgaacggagctggggagaatggggaaggtctggtggttagtcctcaaaaagctgggagatgtggcgaagtaggtgtgatgagggttaatgagcaactgaggccgacgccgatggtaggctcagggtcgggtgagaaagggggaagctccgaaccaccagacagcgtggaggagatgaggaggaaatttttggaggaatcgtcaatggaactggaagcatctttcgagatatcagaggagatggtgaagaaaggggccctagccaaatgttttggtaaagctcctatgcctagaaacagagtcaagcaaatcctctcgggtatctggagcttgaaagggaaatggtggatgaagacaatggagacagggctgtggggcatattttt

SEQ ID NO: 120692 - DNA, 2472 bp, Cannabis sativa
atttattatattttaaatgttgtttaattaaattaatttcttttggttctccggaagaatatgctttccgtggaaaaagtaatccgttggtttagactttttattatttttagttttaattattaattaatagtgttctatttttttttttaatacaaatgaactttcgtgcttcttaccttctcattaagaaaatgaattccttagagaccttggattcctacatatccattattggaataggttaacattcttttaagttaatgttctcaagttacaacgtcttattataactttttggtgacgatgatattgagttagcgacgaaaaaagactcgacattcaggcaagctacttggtggtcaacctccacgtcgaagttcatatgccagaatatttctttttcatagtagtatttattatagttacaatattattcttgtaattttttaaaaaattcgaatagtttacaagattgaaaacagagttcatgatgatattccagcttgctacacatgttcaaaaaacttcaaatatatttttgacattgtagactatttgaaatttttaaaacttacaggaataatgttgtaactataaataatacatgaaaaaaattaacatgtatttttgaatagaaaatttgactaaaaaattataataagagattaatagtagcactcattcttttgttagtacttagtataggtttcattattttatgaatgataaaaaaagttttaacttaatattaatacaacctaataatcttagatctttaaaaaaaagtggatttcaaagatgtctctcaattttaatacattaaatttttatgtttaaccaaataatataattcaataaatggtaatttaatttaatattttcatgtataatcaaacacagttataagtttttagacaattatattttctgctttaatgctttaatatttcaaaattattcgtaccgaacaagtccttattattattttgttttagtttacattcttgcttctttgaagggagaaacaaatgagatgaggccaaatgaaagttttggtggacccttatttccactagtgtccctctaactaaaccataggaagtttgattttttcttcttgctcttctaacttgtaaatgtctgtttatatgaatcagtgtgtttttgaaaagaagtttgtagtgactaaagaataataaacaccacttttctttctttctttcttaggcacatttgggttcacaagtcgtgcacaatagtggaactttattcccatttaatagtgaattagtgattggaaatttgcatgcgcagtcatatggattaattcaacttttgcactcttaattttatgatcattattattattattagcattgtcattcgacatagtgttcaacactttctaaaattgacgttctacaactgtttggtgatattttttaaaaattatcatattaaattatatgtaattcaataattaattctaccaacaataaaatatcttttagcatttatcttattatattagatcattcctattaccttagcacgataaaaaaaaaatgacgttcttataaataattagtgatattttgtaatatttattaatatcaatataaaatttattataataatttattacatatgacacctagttgtagtacttgacacactgggtaacttttatcaaattttgttttatttatttattttttataaaatcacactctttatagcatttcaattagtggtatccaacactaggagctagaccataaaataaaattgagaatgtgccattatatatttgtatattattttaagatttcaaaagtttaataaaattatggtatagaattagatataataaaatataaaataatacatgttaaagtaattttagtgtaataatattttacatttcaccttacttatagttgtttagttcaaatcccaacgataatatatatttttttaataaattatgaaattttattagtagcaattagttaaaataataatttgcaatctaattgagatatcttccatgttggagacatgactagccgaacaatattattttagttctcttacaaaaaaaaaaaaaaaaaaattaaagtaagtatgaaatgttataaacttgcaaaaatttaccattacactaaatgatattactaagtaattgtataaatgccaaattttttatttagagataagctttaaatatttatgactgatcctaatttcaggtgagccgatatccctagtatatatatagaatgagttgacgtcttatgaaagattataataataattaataattaaattaaaatgtgtgaaacacaatattaaattatattaataaataataataataatataacacatatatcgaccattacttacattatttcagtaataataaaaaaaatgttataaaataatataatataatataaagtagat

SEQ ID NO: 120693 - DNA, 3611 bp, Cannabis sativa
ctagccactttgggatcttattaattattaggtattttatcacgtgcttaccttactttctgtttgtattcataataattagtactacgtccttacaaaaaaaaaaatagtaaccacgtgatcaattttatacatattaattatttttatatgatgcagtagatatatgtaaaattattgctagcactctttgtatataagtactatatattacgtatatatgtactcatgcatacataagaaaaaataagttaattatacttttttttttattaatgattgagaaagaagaaaaataagtagaaatgtttaacgtaacgaaaaagaaaattaatataattaatatttattattgtacgttttcatatcgtgatgccatttagattaatgaaattgctagagagaacataaatttggattaatattcatgtatttgggtaaattattggaacactaaatctaattatattaaaattagtaagatatgtgtcactttttcattaaatttaaaaatattcttctcataactcacccctcctctctctcttcctttattctctctctctctcgcacacacatgaagaccctagcaacccacgcctgccaaccactgtgcctccaactgaagaccatcaacccaccgctcgacgactactaactcaagacccaggatcttagaaccacgaccaccgcaccatgaatgtaaattttctatttcattttattgtattctgtgtgatttagggttgaaatgtatgattttatttttaggtttattgacataggaataaattacatgattaatgtctagctattatctgtgagttgatgttatatttagggtcgaaaatggtcagattagagttttgggcaaaaattaatttttttgtcaggtccgatggtggcacgatcgatgtgtaacctactcagaagaacgctacgtatcgtgattacaatatactaatctcgttaaccgcgatttatataagttaagtgattaaaataaatattaaacttattgattacataaataacatgcaataatacacgctttactttaaacagaaatgtttaaagttacatatccaagatcgcataaaattattttcaaaatattacaaattatttcttacaggtcaacctaagcagcaaaatggaatatctatacaatttttcgttaaacccaactctcgtggtctagtttggtcggaacatgtacaagtcatcttcaaaatcctcgaactcatagctaacccaatattgctttactcttggctgcacaataaagcacaagtgagccaaggtacaacaagacaaaataataatacattatgaataattataataattatatttcatacattacgcctttgcatataaaattgtgtcaccgcactatatatcacattatatttcatatataataatatcactataattaatgtctatatagcatagacctatgtgttacgcctacacgtctacatataaggccttactagggttcaatttagttacagagtgtaacctagttatgtcttactcgcataattctactcatgtattacttaacatattatcgtatatttatcacagtacgtacttaaggtattagccctaatttacgatttcataatagcaattaaatgacatataactgcgccacctcgctatactccatgtgcttagtttgttgtcttatctaatttttaaagtatgaggagaaatctcaatctacaagtaattcaagtgttggtattcttatttataattttcgagtttcacatgatagggttaatcccaaaattacattctataaatattcacatacaggactttaacactcgactaggtaatagagctcgaaacaagttttctaacgatataataaacgtccaaattagagtttaaagtcaaaagttatgctcgaaacaaaacatgtaaaagttaaactgtcgccacatagtcgctgcgaccatttattgtcgtgaccagaccattggtcaccacggtgagaaaaggcagaggcaaacctctattttttgggtgtagcctcactgtggcgactatgcttaaaaacccaaaaatgcccaaaaattaaaatttttgacatttcgcaattaaccaaaaacacttaaacttaaataattatgcaaacacgatttgtaatttatctataaacactatcacttcatccattcatctaataaaacacacaatccatcacacaaaatctaataactccatacatgaaaactccaagcaaaatatgctcttgaaactcacaataatcacaatacatttatacatttatgctcaaatcaataaattcaaaaactgaattaccaagaaataaatctagattgaagctgtaaaacttaatcacatagccacttacaatcaaaacccagcttgataactaaagctctaaattaaccaaaactcatcatgcaattcaattcaaatacaagcattttcagataaaattaacaaccctaattcaaagattaaatttaagatttaaaatagtaaaaactaccttgaatatcttcctcaaagtacgttccactaccaaactccactaaaaatggctttaattcttctttaaagttaaaaaaaaatgcaagagaagtttgagagagaggcggggggacttgtggagaggtttctgtaacgccttaacaattaggcacgttacgattttccgataaacataatttaatctcgctaaatcgggattactagaaataagagttgaatttaaactttaaattattcacggaatgaaaatataacttgtaactatttaaattttacaaatcgttccaaaaatattacgcacgtttcgggatcccgtaaaaattttctcaaaacattagaagttatttttatatgccgacctaaacgacaaaattcgagaatacatacatcaattggtagacccaacctgcgtggtctagtatagcccgaacatgtacaatccaccaccaagcccttgaactcatggctgatcacaaactgatttatcctttccctgcatagtagagcatctgtgagccaagcccaacaaaacagtataaataacaataagataattataataataataattacactttatacactacgccactacgtatatactgtgccactacactttgtatcacattattctatatataatgatgccattataatgattgtctaaatagcatagatccacgtgttacgttcacacacgtctattaatgtttatatagcatagactcacttgttacgctcacacgtctattaatgtttatatatcatagatccacgtgttatgctcacacgtctattaatgtctatatagcataaaccccatgtgttatgctcacgcatctattttatatttaaggccttactagagtttgtcttagttatagttactgagtctaatctaattatgcatttttgtattagtattagatttttcttgtttattctttttgtgcatgaatatataaagggtaaattgcggtataaataatacctaatgttttcgattttatacaattagatacttaatgtttatttttggtggcaaaaatacctaatgttacaattctctt

SEQ ID NO: 120694 - DNA, 1438 bp, Cannabis sativa
  modified_base (1380)..(1388): a, c, t, g, unknown or other
tttaaggttatttatctccttttatatacttttttaacttaaataatttgtaatccattgcttgtagtgttagaattattagtctattttgttgatgttcaaattttaaggtaatgtagaaagtaaattttattacatgaccaaatacagctaatgtagtagtttataattttgttagagtttctatattctatcctgattgtacttttagtttgttgtctgtcacaaaagttgttggataagaaaatcgattttctattatttttttttcaaaaaagtttatatgttcttatttgacaacccagttagcttggattttacaaaaaaaaaaaagaaaaaaattataaggaagaaaaataatacaaaaaaagaaggaaaatgtttttaataaatttaacatgaggtgttttttaatattttctttataagtatttgtaattgatcatgtgggaaaattacgactaatagtgcagaaataagacaactaaacattaaacaattaaataattaacaatgccaagattaatatattacgaacaataattgaatgaaaatagagacaaacaaaatatggaaaaccagaaacaataaatgcagaaaataaaaaatcaacaccaagatatattactcgttcaagtccgatagatcaatgtgatctatgattgcactatttctagaaacaccactgaaatcctctttattgattgagcaaaaacatgtacattacagttgagatcgattttctgttgagtcttctcaaagtatttcaactatcacactcttttccaagaatcttcttcatctacagaaaattatttatacaaaacaaacccaatctctctcctttctcagtacctctctctctacctctcaatctcaaccgaaagcatgtattacgttcatcgtgctcaatgcttaagtgttggtggtataagatcctaaagtcagtggctgaaagaatcaaagttgttaagttagttatacagtaactaacttgaccaactttcctatgcgcgagatctccatgtcaacatttgtctaagtgcatccgagaacatatatgagcttccgagatcacggacaaaaggtactacgctgaagaagcttccgaataagatagaactagctggagttaactatccgaagctactttccagggagaacaaccttctagaaagaataactagttgtacgaaactcctttctagaggagggctagctatcttgaagaccgaacctagagtggacattatagtcatttagaactcccttccaaactcaactatctccttatggaatgaacaagttagttgtccaaaaacaacatatgggagacacctaactttctatcaggcctggccctgggcataggcgggctannnnnnnnnctagggcccacccagcccaggggcccaaatttttttttcctcttttaaaa

SEQ ID NO: 120695 - DNA, 2620 bp, Cannabis sativa
  modified_base (2424)..(2426): a, c, t, g, unknown or other
tggaaagatcataagacaaagcttacaaataacaacatttttaaatacaaagacaaagctcctgaaatgctcgacaatcctctagataattttttcggctgctagaaacctggagactggaaagcatttgatacttcaagattaactcttgaatgggagaaagcaagagcaaaagtgcaaggagttagggccaaaaatcaatataaccaccacggggggcgaggtggtgttaagaaagtagaagaagatatggaaagagagttgggccaccaacttactacatacgacagatgtgacttgtggatcaaattacacactaataagaggggcgagcttgatggctctgctcaggaagttgccaaaaggactgtaagttacatctaccatttatattgttcaaattctaatttaatatttttacattgttcaaattcttactaactattattttcaatgtaggatgagttacggaagtaagttgaagaatggacagtaatattggaaggcaaaaaagacatactcactatggctttggggacagaagagcacgaaggaaatgttaggggtatggggcgtacgtggcgtagcacacccacaatttttttaaaactatacttccaaaaataaagagatctaataataatgatcgcatgggttagatggagaagcgacttcaggagtcaaaggaaaggggtagtcggactgacaaattattaaaacaattcctccaagtagtccaaggccaacaaagcggtgttgctggcacctcacacgcatatggtttaggtgttggaagagcatccaacgagccagcttctgctaccagggtctctacactaggcgttgagttacctcatgttgatactaccactgttccaacacttgctaccaaggactattctcctccatgaccaccaatagtcgttagggcatcagcttcaccagcactgtcttcagatacttgagataaggtattttgtacttgcatttttaaaaaaattacaattctatttagtgaacttgtttaatttttatattgggatacaagtttgtgtaatgtatggtttgcaaatgaagactataaaaagtgtagtttgcatgtgattgatcctaacatggaaggagacggcttagctgcatttttgggtatgtcaaatttaaaaaaatggatgacaaaggtgaaatcacagtacatggagaaaagaagaagtactgtgacttgaaacgtgtcttcatagaaaaggttgttaacgaaaataccagtctgacatgtcctctaaagcaggaaggcttctaccaagtgggtttagttgtgcaacatttcgtcttttggccaaagaaactaattaaaatacctcccgctcgtttagtctaggtaatttatgtaactttcattaaacttaatgttgaaacttttaattttttttaattaaagttatttttgttgtaggggaaaggaaagatgaaagctacccaagattttctagctccgcctactcagccattgatacaccaaaagaggccagtgacatttcatgaatcacgttacactccgcctgaaaagacattgttgatgacgacgctttcagggattgtgcagaaatggcataagaagaaaatagtacaatatgagcttaaacctgacttgtttggacctgacgatgagtgttgaatagacaatgaagatgtcttggatgtgtgcgagttgggatggatcggaactaatgttatgactatttcgtacaggtatagtggttaatacttaagttaataattatttgtagaattattttaataaaatattgtgattcaattatttgcaggaacattcactcaatattagtgggttgaacaatacgtatgtctttttaaatcctgctccagtatcctcaatagcttgtaaagatcctaagaaacgtacaaagaatctcattgggcgattgatggaaacaaaactcgatcaatggttgatttgtccttggaatccactataagtaaagttgtaatttaatatatgtaaatatatattaattatggagttgactaaactttttaattatgtgtattgaacattggacggtgacatcattcaggctgctacttagttagtggcattccttgacccaaagaatatgccaattcagaatgaaattagaaaatgtgtcacaacgtaagttctatcattttttcattaatttaacttttgttactaatttggtcactaacttctctttggtgtagtgctttggaaacctacaatattcaaaaaaaaaaaatacgaaataaggttgaggtaaagatcaggcaatacaagtgtcgaggaaaaccggacaatgtacagtgtggatattactgtatgaagattattaaaagcttcatgactcagcacaatcctgcaatttttttgaagaatgaggtaattannnatatatgatttttatttgataattactttttattttaaataaatttaatattatctatctctggttgtacaattcaaagatgacaatccttacagcaatcaggagataaacgaaatacgggatgaatgggacaattttgtgaagtcttatatattgaaagaatgagtatgcaattttttatattttgttatgat

SEQ ID NO: 120696 - DNA, 2211 bp, Cannabis sativa
aaaacagaggatccaattaataatttttgtaaaacatagggttcaaaataatatttatcctattatataattatgtgtatatagttattaaggggaggaccgcatataatatttgatcgttagtaattatgatatgatcataaaagtgttagagcactttcataaaatgttttataatagctaaaagttgaataaaaaaataggtaagagtttaaaattgatcaccatccaatgttctaaaagtttaaatattgtaactcattttaagatttaagaaatctttctctatatttatcttaataaatagtggtgaacttaacatgttcaccaagatttttgaaaattgattatgaataataagaactcaagaaataaataattaaaagggaaaaaaagaaaaaagacacaaatagtttttttatgtagttggggaataaattagtcttagtccatgagtcagtattattcagtaattctttaacttgaaaaacttttaggagtataatgaatatatattctcaagttttcctgagcaagttttgcaagataatttaacctttaatccatagaattcgacaggtatttataatattttgagaattacatttagttttttttgttgtttattggggagcttacagtgaataatacacttgggctacttcatgaagtctagcccacgaagaagaagatttactgactaggcagatcgaatttggtcaacactgtgtacttggactgtgggcaattaactgtgaattaattgcttgatgtctattttaggaagtttccccatttatcataatatgatcctctgttgagatctggcagctattgtttccttatttgtgtgtaagaataaaaaggaaaactggatcagtcttccaggaacacgttgtttcacccttatggcttcatcgtagaggacttgcttccaggcatgtgttgtcaatggcggaaggctctatagttaaggagctggaatacgttcctggaagaacctgtccaaatgggcttggcccgctttattttctttctaggtcctactaatgtgcatttgatgtcaacatggattccacgtgttcactaccggaaatgcaaataatatttactcccatactttctgaatgatgggtatggcagaagcttgttccactacttcaatatgggcatgtggaggatgagcgataatatcatggctttttgggtgttactcgatcgcggaaggtgacttccatctttaattgtagtacatccacatgtcaatcacatgatggtggaagggcacgaccattgaggagttgtgttctagaaacggttatattttaacagttgttcacttttttggcgcaaaaattaaaaaatagcatcttcatcattgatttatgcctcaattttggggagcattaattgtggagatgtgcgcagatttttgaactccccaaccattagatgaaacttgtgtttctggaggttagatcgcggaccatccatccttttcacgtggattggtctttttaggtttaaatacatttgacgaattctagtttaatgtattcttcttcaacatagattgggccttggtgtattcttcaacatagtctcgactagccaccaagacatcaccattctcatagacaggttcttcgtcctcattgaaaccaccaaagggaaatacccagacttcctcttcttccttttctcagtctccctcagccttgggaggattagctggacgaaactgaccctggtcctccacttcctagacttcaaagtccccttcaacaatttttccttcctcaattggaggtctatcttgctccacactagctgcagcaaacagctgagcaaagtgttgatcagtttctaaactttcctcattgtttgatttgtttgcaccatcattctacatgtgggcataggctttaattcagtagtgtttcttataacagtcacaaaaactcagtaacagcagctcccttaggagacagagttgggcgggcttcgggcagagttttagcaacttcgggttgtaccctatacacccaggagccagaagatagcacttccaacttttcttcgattcccagatgaaacgcctgtacccttctccatgtattttattagggtaatggtggtgttcgaccttaggctctagagacaatgtgtgttcactactcacctcccagtctgttgagttttgtgccctaa

SEQ ID NO: 120697 - DNA, 671 bp, Cannabis sativa
ttattattcaacccacaggctgaattaggccgtggatcgaaatctggatgtgagtcaagttcacatacctaacaaggtcagaccaccctagtttgagagaggtcattcggcacagaagcaaagaatctgccaagatcaatctggataccttcaagtggtaatttgcagataggtaattgaagagtcgcttagatagcttgcggacatcgcctaacacacggaactatcctgaaacagggccctgcattattgtcagggattgtcccctacgtcagactctcggagtgtgcgcgctatcaaaagaagatcacttttttatccaacatcatattctttgacattctgggcacgagcaaggatgtgcctgaaatctggcatttcctcaaatggtcctcgcttatacgaaaaatctccacctcgtgaattgggcctcacccaagtcgctcaaagtcaatatatattgtatttttcctcatcaatggaccttgttgacacctttaaaccctactgggtccgggtatcccacccccaattctaccttataaatagaacattagcccttcatgcaaagggttgaaaattgatttcttggataaagaactaagaattagggttcttcatctagggaaaaaacacttgtaagaaatactttgaagcttttctagctcaat

SEQ ID NO: 120698 - DNA, 3342 bp, Cannabis sativa
  modified_base (262)..(272): a, c, t, g, unknown or other
  modified_base (430)..(434): a, c, t, g, unknown or other
atctcaagtttcttcttgttgtcttcaattaatttcatggcttcatcatcaagtgccttataaatcccttggtgaactagaaagaccttcattttcattctccataggctgaaatcattcgaaccattgaacttgtccacctcaaaccttgctgaagccattaaaaccaattattgattgtttgaatctggttcttgaaagttcgagtttgattcttgaatgatgaagatgagtcttgattggttgaatgtgattcttgaannnnnnnnnnngagctctgataccatttgtgatgaatcctcaccctcaaaataaattattacagcagtaacaatgtccaagaaacacaaatcaaaactaaaaccaatcacaaaatcaaaacttgaaattaattgaaataagatgaagaaaacttaactcaataatggannnnnagtggatctttattgaataggaatggtcagtagtacacaatagaatgagtccaagattacaactcaacacagtaagtaattacaaagaaatgcctcacattgatggaaattacttcaagagttatactccctttttacacccctccacacactcactatgatcttggactctctctactaaagtatgagcattggagattagagatcagaactctcaactcagacctctttttttagaatagaagaacccctatatatagttgttggtgggtcccctttaagttggtattaaagccaactgttataaattgcagcagctttcttcaaattcatctgatgagcaaatagatggacatactgacttgagaggttaagtgagtttaatcccatcataaactaattttataattaaaattttaaaaatatttaattaaattaattttatacgtacaattaaaaatctcaaaatataaaaatttgatctttaatcaagaattgtcttataagctcaatgaaattgactcgataccaaccctaaattagcgatcaattgtaaaagaattttattatggaatatttttttaaaaaaaactatgtattttacttgtatgcgctcatgcatcacatttacaataattccaaaatgatatttattattcatgcataatcattatgttactttatttatttcagtcatgtatactatgccaaatatcatccgtactttactagcactttaaaaaattaaatggtgataatttataaatagaaatcaaatctaaatttatgttggtttgtgagaatcacaaatttgtcctagctgaggagtgtcttgaggagcccgatgccagtggcttaaaaaaatatttgggacagatatgatgcttggattcaatccaataacaaggccaaaagtttcacgcttgtaagcatggacgatgttctacgtaagatgcatcaaaaaaggagaatgcatctcaaataatgaattctctacaggtcatgtttgggcaacaatctaatcaaacaagacatgttgctattcgtaactacatgaattgtaagatgaaaaaaggtgtccctgtttgatcttatgtattgcacaagattaagctaatgcatgaggcggagacacatgggactatcatttacgagaggactcaagtgactatgatccttgagtgactatctccttgcttcaaggttttcaccacactatgtgatgaacaagctagagttcaacatgactcaattgttgaacgagttaaccgtgtttgagaaccttaacaaggataagtcctagaaaggggaatcgaacatcgttgaagaaaaatccagctctctttcttcttctgataagaaaagaaagtggaacagtaaggacaacagcggtggcatgctcaaaggcaagaagtcacccaaggccaagatgaacaaagcaagccccgagtccaaggacaagaaggctaaagaaaagtatttttattgtggcataatgggacattggaagagaaattgaaacaagtatctttctgagcttaagaaagataaatattttttatttattcttgaagctaacttagtggaggatgataaatccttatggattgttgattttggagcaactaatcatatttgttcttctatgaagatacttgaatcgtcaagggagttggccgatggggaggtgactatgcgtgggggtaatggagcacaagtgtctaccaagggtgttggcaaagtctatttgaaataaaataatatttttttgttattgaacaatatttattctattcttaaatctaccaagaatattatttctttatctcttttgcatgaaaaatttttcaatactaattttattaataatgatattattatttccaagaatggtacgcctattttctgtaaaatagagtaatggactttatgtctattatcctaaattttgtccacatgacgtggcatgtccatgtaagctaaaagacagagtaaatgtggaatacaacccttccagtagcaaaacaaggtctccatgcaagatatagcaaaatcttcaagcaacaaatgaatggagtgaagcgagccctcaaggagctgtaccaacatccatggcaagccaagagaagcctacaagctggccaaggtgaacctaggccggccaatatttatgcacaagctggccgaccatgaagtgacttttggacccacgaccagctaactaatttggcacccttcactcaagtaatgtatggcctttttggccaaggcattgcactcatgagtaaatcaggttacccctcactattggaaaaaattcaactaccagaactctgatggcgcagtttgtcgtaatcgatgttccctcagctttccatgccgtgataggtcaaccagccttgtatgacctaaaggcagtgacatccatctaccacctttgcctaaaattctaaacaaggcatggagtaggatgtttcaggggagaccaatagtttgcccgtcattattacaacttggccttgtccaaagccaagaaagaaaagatgtctgccaaaagctctgaagaagagcccaacaaagggtaatgaagtccagtgcaaagcggggatgcagacatagatcctcgctttagggatcctacagatagctttggacctgtagaagagctagaggaaatggaggttgatcgcagttttccagctagaagactaaagatcgagaagggtttagcgccaaaaataaaatttgtacggataaaatttctaagggaaaatatggaccttttttgcatggtcacgtggagacatggaagagacccctctgagtgttgggctttgtgccctaaataaaactctatttcaatgtaatctttatcatttaattatcaataaagagagagagagagaga

SEQ ID NO: 120699 - DNA, 764 bp, Cannabis sativa
  modified_base (172)..(176): a, c, t, g, unknown or other
agtatataaataatttaacaattatgttgtggagtgtaattttcccttgttattatatatactatatagaaatctttatatcaaagggttaggttagaaaaagaaataacagtacatagctaggggatcacctatagtacgtaattggtcctataataataataataataannnnnataataataataataaaatacttaatttatttatcatgcactgtacatgttagtgagtgttatataattttaatattattattgtttatttttaaatttattggaataaagaaaggagaggctcctctaatttataagtggaactatgagagcaccaaacccgctcacaaaacgagccctttgaggcgggccaggttacaataaggtgcgtcacatgagccctaactgaggaggtgcatgaatacccctaagatcgataaatgtcatgggtggctcggctagtagagattgttctcatatttgaaattcccataggagccatctagattcgaactcatgacttccattttaagaaattaattcggagtaagcactttaatactagattaattagtcacttggtgacatttaatttttttttatatatatagaagaataaaaaaatatattttgaagtaaacaaaattataatttggtaacgtatgtgcaaaaaaatattttatgatgggggcacggttttaattgagctatttctatattgtcttcttttttttttctctaaattattataggctaattaagattttt

SEQ ID NO: 120700 - DNA, 905 bp, Cannabis sativa
  modified_base (310)..(310): a, c, t, g, unknown or other
taatttgtatttttggtgtaaaaatttcttttaatattgtattttatttattttaatttaataaaaattataatttttttttaatcaattataaaatgtcattggtgcagggccgaccttgagttaagacgaaggaggcggccgccttgggcccctcacctctcaggccccatttcgaaaaaaaaattaaaatatagttagtaataaaataaataataatacttttaatgctaaatatgtattgtagcctagtagtaatttaattagtttaacaattagtttaatacttttaaaagttattatattaaantatatgagactcaatacttaattggaccaataactatattgacatatagaaagttgttaggcaccactactgaattctagatgtattattattagtgtaatttaatattgaattttatttattttaatttaataaaaattataaaaaatctttaatcaattatagaatgtcattggtgttaggtacctttatgtagcaatgcttatttaattctatcaccaagtcaaccaaattttacagtatatttttacaatataccttcaaaaggagtctatttatgcactattatttatttcagaatatgaaagaatttcttagtttaatttctttatggtcgtctacattgttattatttaagatattttgtaaaattttaaaagattcaacaatatatatcataccaacaatacggttcaaataatttgtgttacgtgagactcatcttttattttatacgcgtgtgaattaaattgtttgaaccctatttttagcatattaatttttctttgaatttcttaaaattttataggatactgttgaccgaggttttcgacaactaataaaatattataaagttagtgagctgtaagaaatt

SEQ ID NO: 120701 - DNA, 1529 bp, Cannabis sativa
  modified_base (1468)..(1479): a, c, t, g, unknown or other
tattaacacaatttcttgtagtgaaaaagtgaaataataaataacagatatgagatttttatgtggttcaagcgttaactattcttagtccacgagtctattttattagtcatatcagcaggtggttaacattacaagtaaatacacaatggaccagtgctctctattcctcttgctcctcttgaagaagaagaaaaagcttcataggaattttagtagagtttttatatattataaaatgttttttaactttggagagttgtccctatcttatagaatgcaaaggtatttataggccattttttccttcacattattgttaggttgatcttactagaataaattctgaccgttgatttggtaggtggctgattcaacacatgtcatttaagggtgtcagcttgtactgtttgatcactttacatgtcacctcagggtcctcccttttgaattgcccttgtcgatgaccgttggatcacttgagcaagtacaactgggcgcgcatgctctttactaaggcataaggtggaggacaagtcttggtgaaaaagcatggttgtcccgtctacagcccgataggtacgggcggagcttccacgtgacactaaacggggttacaactcatcttgacttcttttgtgacctgtattggtgtcctctaaaaagcccttatccttcgtggggcattcagcttcactccctgggactgggagagactactgatcacgaatgctccctgcgtccttgccttgcatggagcgtatcctttgtggaggttcttttcgggagcttaagtagatccttggcaggggctaagattaaggatactaactggttgattaccatttaggcttatggaattagagtccttgtgtcaagcttataaaaatctggacaatatttacccccaagcttctagggcatcacgcaatctgggagcttatagtgttccctcgtctcctcatgattggcttctaacacgtgaagtatctacgattttctcattatgttgtgtaagtagccgtcaagtgatttgttactatgggggatattatttatgttgtcatactggcagtgctttaaatgatgacttttgccatttacgcgcgtgctaggcgcgtgtctagtgagacatcgaaatagcagcgaatcgactgaaaagactcttcacttgcttagcacctttctcatggcttgccgtaatggatgtcaaatgtttagagtcgatgcaacttcttggctccccgtccgtcagattctcagataccattttggtcaatgattaagatcgttcactcctcgtggaagccacttcccttggtatttattaagtgctcacaacattcatcacctttttaagtttcaaatttttcccgctcttcacaccagagctctaacactttgtcacgtcttctcgccttatttttcaagacttgatcaactgggccatctgttggaaattattttnnnnnnnnnnnngatctactcacaagtatgtttattaacatcctaaataagaactttctaaa

SEQ ID NO: 120702 - DNA, 854 bp, Cannabis sativa
gtaaaataaatatccaacaataatgaaattaataaacttgattattttattgaaaagttcaaaaataatcatgtgtttattagagcttcaacatataagttcatggttctcagatcacctatatacaacattgtacaagagaaggtttaattttaggaatcaattaggaaaaaattaatttctatgagaaataattcttgagggctaaataataattttgtataattatatcaattatcaattgagtaattaaagtggatttaactatttagttttatttgataaaaatatatttattagtaaaatataatattattgttagttatcctaatttttacactatgacgtggcatgtgactaagtgacacgtttctcacatttcataacatgggtggatgattatgctcctagcaagctatgaaaattgatatgaagcctaaagtcgttcatgaatgataggatgtccggacaagctcactggtggacatccaaccagctctattaggtaaatagctcgcatgcaccgacgaggaggtgtgagttgccaattttagagatggacattgttatttcctagcttgcatatcacgaagataatccctatatttatgggataaatttaaagaataaaggcaataagcctagattttccaatctctgcattgtaattatggaaataaactagtttcttattgtttatcgagatttttgaaaaactaattataaataatcataattgaagaaataaataactaaaagagaaaatgcaggaaagacacaaacagtttttacatggttggggcgttacttagccttagtccacgagtcgatattattaagtaattcattggctt

SEQ ID NO: 120703 - DNA, 1239 bp, Cannabis sativa
aaataatttccaacagtttttggggtccccgtttgcttaggctcaattactctcccgttcttgagggatccatttctttgaatggtggttccaaagcttctttctccctgtatgaaaaagattttttgtttctttgaacagtgaatcgcttgccttcctcccaggttccgtcgtctaagatcatcttcgtgctgaatttcgtcaagcaaccatgtttatcgtctatctctacaagttctcttcgttcagaaggcgaatagaagcttcctgctcttagacacgtccactgttggttgttgttgttttgaggtgtcgaggattgaagtgtggttttgtagctgggagtgtctagttcatttcgaaccgttgttggggtttttattggggatcttacgaatttcagacctggttctgtcgctataagcttcctaatccttgttgttggtcctgtgctttgttgtgttcttggattcttgatctctgattgagttcgggcagactctttgtctatggcctgtgagtatgattagttctcttagaccactaattagaagctttatgggtattgtaatgccctactagccaaagcatgttgcgatgttttcttaattattatgctaaccttagctaatcaaaggatttttacataaagcgtgtttagtaaaatttttattataattcgaactttaataaacataaacacatgtacttctaagattcatcccatttcaagaagtctcattctcgggccctaatgagtgggtcagcccactaagggagttgatctgtaactcagtgtttagtaacatattaaactcatccattataaggtcagactgtaatgccctaacaattaagcatgctacccaaggtgattaagaaatcctaatctcctaaacgggaatactagaaagataaggacgggtaatttaaactttaatcgaaaaaaaatgaaaataaaacttgtaataagcttaacaatcaaaaattacatgtttcgggattccaaaaatattacaagccttttcactagctgacctaggcagcaaaatcagagttttaaaagtacatcactggtagactccgacccgcttgctctagtgtggcccgaacatgtacatacattgcccagctctcagactcatggctgatcagagacagatttaccctttcctgcacagtagagcacccgtgagccaagcccagcaagacagtaagatatatcgttaatcatatata

SEQ ID NO: 120704 - DNA, 2158 bp, Cannabis sativa
cttgttcctcccactctcgttctcgatctcctccattctggccttctctcgctctcttctcctttcttgattttcctctgttgctctgccgagctgcaagctcctctgatgaagatggtaagaagatttatatatgtatatatatatatactaggttgaagttacgtgcaatgcacgtatacttagttatattttcgttggatgcctttgtttaatgctagagaaagaaacaaaggcgagaatttcttcaatgtacattatacatgtactctctgtaaaaataatatatatatatatatatatatatatctgaccgagtttaaataacccaccatttaagaatccaatatagtctaaaatgaaaggaagtgaaactaaccatttctgcattattggtgtttttttttttttttttttttgcttaagggagtgccgaaaaatgaagtgaattagaagaattcgtagaacataagtttgaactcagagtgcacaatagcataaattcaaagatggttgaaatataaagacttgctttctcttctttcatttttctattgtttatttaataagagcaaattaaaatttacacttgttttgatttgtgtcctttatatattgtctttcttaatgggagaaacataacagcaaataaagacaaccttctttgttcatcctgaaaattacatacaaaataattcaataattttaattatgcaaaatttggattatgtcgccattagccttaaatgaagagcatccaattaattgtaatacaaaacctacataaaaaaataatcaatgttacagttattataagctaactgcagataaaagactgatggctatttcaaatatctaatttataaataaattattaaatgataagaaaacctacctcccataatcttttggtaatgcagggtcaaatttgggaggaaggttgaagacaactcgaataacttcaaatgacaaatataggtcattgattaggttggttgccagccatgagatcaacctgcattattatgattgtttttaaatatattattcattattataaagtggaaagttttgatataagtaatattctccaattcaaattgtaaatatataatataaatattgattaaagcatctactacttaattgagacatgctgataagataaaaacatacttcactacaatatttatgttctcttgctaattttagctagaggatctttcacattatcacagaattcaacttccttgaatttttcatctgatacaaagtcaaacttacacctaaataacaagaaacatccgaaagtagtatggaaaagtgaacaattaaatgtacaaatacaatattgaaaaaatgattataccaaatcggatagcttgaagaacatataaaggatcatccataaaagtagcttggcaaatgagtcacaattcttccacatttcagatcctctcggtgcctgaatggaatcaataatttctaatggaaaaaacattgcaagcccaaacatgttatcattctactcagaccaaagaacctattgattgttagatctcttctttaggcatgatgtcatatctttgctacaaaaatataaactttaatgatcaaatgattaaaaattagcagattaacaggctaagaaaaaaatcaaaaagccattcttaaacttataaaaaatgatacacattataataaaaagaattgtaaaagattaattaatttagctaggagccaatggaatggatcttatatacaaaaaataactaaaaactgaaaagatcattattttgtatagtcaaaattgcaatgaaggatcttcataattaatatttatgaaataaaatatcaatatggaaaaacgtatgttggttttatttatagactctgaaaaaaaaaaaaaaaagagaaaacattatatgtatttacttagagctactatcctcaaacatgtgatatgacatgaactcttttcaaggtactattcaaatttcagagttagcaatagcagaataaatagaaaataaataaatgaaaaataataacaactcttatataataagaagaaaaagaaaaggaggtggaagctttggattcttacagagctacactgagatcatgaagaagcttttcagtatcatcaaagaagaga

SEQ ID NO: 120705 - DNA, 956 bp, Cannabis sativa
atttgaatatacctctcttatgaaacatttcataaccactacacaggttgatttgttgaagaacaaatttggctttgatgaggctttcaactacaaagaagagcctgactttgatgtagctttaaaaaggtcagtcaatgtacattggtggaattccaaatattatgttcttgagaagcactcataattcattgtaatccttattagtttaagaaatgttacaatgatagaatagagataataaatttttatatttttggacaggtattttccagaaggtatagatatatactttgataatgttgggggaaagctgctagatgctgttctacaaaaacatgagaagccatgctcgaatttctgtttgtggaatgatctcacagtacaaccttgaacaaactgaaggtgtacataatctgacgaatcttgtgtggaaaagtgctcgaatggttggatttttggttgctgactattaccacctatacccaaaatttctcgaatatgttatgccttacttaaaagaaggaaaaattgtgtatgttgaagatatagctgaagggctagagagtgccccaaaagctttggtagggctcttcaaaggatgcaacgtgggaaaacaggtggttctagtctctccggaatgacctctgctttgacaataattctaatggtcctctgtactttaaaataacacagaatggtctaaaatcactgtctttataaatccttctgaattgttctacttttctttcttaaaaatatataacttgtttggttttgattatccctaatctatctatatataatataaaggaaaccacacacaataagtttaggtggcatcttgaatttttttattctatttttaaaattttgtgaattttttttattttgtttagaaaacaactacaaaaacatatggaactaaatgtctcacattgtttataaattatgta

SEQ ID NO: 120706 - DNA, 1911 bp, Cannabis sativa
taagagagggttcaattttccaaacatgattattggtattactaccattattttaaaagtacgaaattgacattcttataaaactatatgaataggatatagatacaaattaatgcaaacaatagaaacataattaactcttctgctttaaaaaaagtcaaaaaagataatgtcaccatgagactttgattgctagacactcaagataattaaaaataaagcaatctctaatctttcagaataagtcaaaatcaaaggattgagaaaataaaaatagaaagattaaaaataagaaaatattattatctcatttagggcttaattggtacattgtgttgtattatattatataatattgtgttagattatattgcattgtattagtattatttattacaagactatgtttagtattaatttgtattaataggttgtttacaattatgctatttttaccataaactcgatgccaacctcaaccacgacccagtctcgaaccctgaccccaactctggacctaaacctgggttcacgcccgagtttgggtttagggctagatccatgttcgggttggggtttgggtctcggatcgagttcaagatccgaggtcaggtcagaggtctgagattaggtcatggaactcaacccaaaacttttctaaatattataatacaagttaatttgaattatttgttatgtatttaaataattcaatttgcattgtattaaaatttatagtcgtaataattaatataatacaaagttttatcaaaatatatgttacttattatttgataaataattgttatacggctcttactttattatatattatagccctatttcctaattcaaattataaaaccaactaatttgaaaataatagaaattaatacaaaatcttgttattccttaatttactttactataaaagtaagtagtcaacattaatggagctctaaatcatcaaatactaatcattaaatatggcctatatgaatatataccacatacgtacaccacatcctacaacatcaacaatttcacaagcttatattctctattaccgtctttatctataaatccatgagtaaattggatttggaagctatattttatgaacacattattttgaaaatgataagtaggtacggtaggatctttagacgtatttatattattgatataattaattttaacagcaaattccagccaaaaataaaactcctgcataggaggaaaaaagaactttaatagcaaaagatacaaacttgaatagtgaacttactagccaataagtaaagcttctgcaacgtaagccgatttctcaacgtgggtggaccacccatcaaggctggtagttaagaagtgacaccaatggccataggttaattttaacattatttttaaatttgggtaaacaaaactatttcttttctttttttacatctgagtaaattaattttacagaaaaatttatagtacatccactaaaatgtttaatatatcaaccaaagtttttttatttatgttgtagttatataaaattataaattttctaaataatttacagtataaaaataaaattcaaatagttgttagcagggatataggaaaaacaatcctataaacaataaaatattttaaccttattttaaacaaaataattgcttaaaaaatttaaaatagacaaggtaaaataaactaaaatctctcctaaatattgaaatcaagggtaatttatcttaaagcactcccttcagtgtttttataatagttaaaagcaaaaaaaaaaaaaatagctaaaaagttatattagtctttccataggtgtttataacttagcttaaaaataattaggaatttttttatttttatatttaaaagcaatttttcttttttttttctttt

SEQ ID NO: 120707 - DNA, 660 bp, Cannabis sativa
tcattcctaattataattaatcggtaaaagggatatatatctactcatctaccaataattttctcttttaataacacaagtaaaaagtgaaaatcaatcaattaattaattaaagtgagcctggtgtgtaaaaaacatactgtatatattgacaattctcaatttggagaacataatttgtattttgctttattaattatttgagagttaaggtccacaaagcacaagtgtcatcaacaataattagatgctatagacttaactttactaataagttttattaatttttgaagctttttaaaactccattagagtgggaaagtacataaccttctctctcactagtagtttttatactataattataggcaaaaccctagctatatatagctctcattataataaagctagagagacttttcaattaagagtaagactcattcaaaaaaaaaaaaaaaacattcttaaattaaataaatcacaaatggcttagctagtgtatttgataagaaaacaagtatatatatggagaaattttaatgtttacatttatttttaattatttgttaaattgttgtaattaatttaaaaattaactttaaattagctgcaacctaatgttaaccttattttattttactttatttatttatatatata

SEQ ID NO: 120708 - DNA, 742 bp, Cannabis sativa
taatatctttatcatattccgactttgatcctggacttcggaccccgaccacagaccctagccctggcttcatcgtaaccttggctcggaccccaaccccatcagccccagaccccaaccgaaccatggacccttggccccgactcagacttcgactccaaaccccaaccctgacccgatccgaccttgacctcgaacttggaccccgacttcaaatttggaccccgaccctggacttagccctagcccagactctaaatccgaaccctgaccctgaacctgaactccgacctcgaatccaaaccctaactcggcactcgactccagacccaaacccaaactcgaatcacgaccccaatcccaagcctcagacccatgccccaaactctggaccctaatccgacccggccccgaccctcggacccatgtcccagacccttgacctcgacttgacccaccctgacctcgaactcccacctcggacccgaaccctagtccaaaccctagacctagactctaacctcaaacctaaacctcgatccctaacttcggacctgaacccaaagcatgatcctaaccttgactcggaccacaatcacaatcctaattcacatttagcacaaatttcaacacattattaactatatgaaaaaaaaaatataagttatcaattactgttgtaatttcagcggaaataaccttgaggattcaatcataaaatctgcaataaactcacaacttt

SEQ ID NO: 120709 - DNA, 950 bp, Cannabis sativa
tgaagcgggaacgttacaaatggtgttaaagccttgacccagctggaaatgtggtcgacgaggacatcggatcccgtaagggagtggcatactcgtgtataagagtcatcattccgtgggtataagagtccaatgaagacttgaagtggtgacgttacaaagaatattattaataatcggtactataggagacacaatttaatagtgtaaaaaatttatgggcaaaaatactaattattctttaggttgatttgagtataattaatggcacttacaatgttataaatgttgataaactatcatgaatgatatatagtaacccttatatttaaaatatttacctaaaaattaaaatataaattaataaaataataattatgtcatgtcattcatgataaaatatcatgtgataaatttatcataatatatattattttttattgtaatttttgtatgtatttatatgtatagtatttttttattattattatatggtattgttttatgtgtggattgaaatgataagatattatgtgtcacatttgttacatgtctctctcgctatatcccatgcaaaccaaaccaataaaagctaacattacatcaagaccacatgcatgcatactagctcatttatggttttacatactcattttgaagagatcattaattaataatagaaaattattaattttaatggtggcatcaatcatacaagctttttaaaatttacttctagtcttttaaagtttataaacttatttttatgatttttctcaaattaaaaaaatatatattgttttaagatttatgtatattaatttggtatgacagattattttctccctttttacttcagattttttttttgggtcaaaattaatcatctttttacatgactctttttctcaaaaaaaatatattatttttcataaaacttatgattatta

SEQ ID NO: 120710 - DNA, 1748 bp, Cannabis sativa
acttagcaaatatttataaattatctgatccacgtgtccctgtccggttgatacacgtatattgggcgaaatcaggggcaacagttattattggccatgttagtcatcgcataattcattatattatttagaggcctttttcagtctttgataaatgttggagctcactttgaggcacacaactcttttcaatttatgtaaacgaaaaagggaaagaaaaatgtcattatagctatagtataactgcaacttttggcttagaagaaactcattttagaaaagtaaattagttgtagcaagaataaagataataataattaagattgtaatgcatgcattgtttgtgaacttatttgtcatcctttttaatgtaacttttatttcatttaagtgtgataaagacagtgatctggtttttcatgaattttgttcagaatgttgtatggtgttttagaattatagaagagaaaataaaggattacattgaagtggaagtgaattttaggagctagagcctatgaattatgtagtacacattaagtcattcttgtttggagcactgatgtacactacccatctcattaccagctcaatatggtttcgggttgagtgaattgagattgaagatgagggaataattttgtttcttcaatgtatataattattattatattattagcaaaattctaatagtaacattgatattacagtgttgcatttaaaatatgtgaccaaattaattctttgatttgatgcaggagtgttctgtacttatgtatcaaatcatttattaattattttttagatgagatcatagaataggactattatactatactatagtattttcaggtcaataatataaattagattttaactcctttttaatctcttatatgattttgattactttttaattgatcatctcaggttaattcctcatcaacatgacaacataaatcatttgaccacagctcaacatagttcgggatgaaagggcaaaatttattccgtatgaattcagtaaactaataatgcattgaagctttggaacgtttttgagtaggaaatacttatgtaattgcaattaattttagtataaatacagtactttgttataatacttattcaatttaatacaagtatacttgttatagatgttatgttcttgctatttaatttttgttgatattttatgctaatttttaaattatataatgcaggtggggaaattgataaataattgcaattttctcactgccaataacattgtgccattattagaaatcgacactaaaaattcaaaaaaaaaaaaaaaataccaatgcaaaaagaaaaaaataccataactatttggtgtcattttataattgacactaaaaagcttttaagtttcggtaataaaatgacaccaaaacttgatggtgtcggttttaaaccgatactaaaagaaaaaatataaatgtattcgttaagtgtcagttttaaaacaacaccaaaactcaatagtgtcggtttagaactgacaccaaaaatttgactttttgtgactgtagaataagtgtcggttttatgaactgacactaaaagtataagtgtcagtttaaaactgacacaaaaagtgtagttatgaaccgacacttgtactcaatctataggtatattttctttgaactttttttggtcttgattatacttttagggctcgtttggaacgtcgtattaggtcgtattaggtcgtattgtat

SEQ ID NO: 120711 - DNA, 668 bp, Cannabis sativa
  modified_base (27)..(61): a, c, t, g, unknown or other
tggattgattggtactacctatgtcannnnnnnnnnnnnnnnnnnnnnnnnnnnnnnnnnnaaagaactccacagttaagcgtgtcattttagggcataaaccagggagtcaaaaaagggaaggtttgactggataaaggccagatttgaccttgactattttttgattatttttgcggtgtgtagggacaatctaggaatataaattcctacaaattttttctttcatttcttttaataaatttttataagcttttcttcttttcatattctttgccttatctacaagtaaaaacacaaaataagatttagtatttatttgtataaaaattaattaataattatggccaaatcttattctttctcattatatttgaaaactataatttttattcatcagaataatcattactttttcattgactgaactttttggtttactctgccaaagaaaagatttaagaaggaaaaaattataacatatttaatattctcaatagcacaaataagtttcaaatataatgtaataattattataagttacaacgaaattaactagaataattttgatttaaataattaatattaattgctataagttatgtaacacaaagggaaaggagatgaaacagagagtatctgaaatcaatctcaagctagaacagagg

SEQ ID NO: 120712 - DNA, 707 bp, Cannabis sativa
agttgctactgagaattctgggtacccagatggggttttagttagttgcctgactgggatattttcgggtacctcaatttttatgttttcccgacgtttaatattgtcacattatttatcgataagaaaactttaaattgtgaatttaagtcctagatagtgttttagcgagacacttatcagtttactgttaatgtgacttagggcctctaatcgtcgagcaattttcccactcacatttactggcagacttaattttagaattgaggtaagattagtatttagatgcacatatgcacatttttagatatacatgttttatgatatcgtttacctagtatactagagatagcagtatggatgtacatatagttacatttagatactgatatttagtgatactagagtgcaataccctaattaatagaacaccatgtgtcgtgattacagtatgctaattctgttaatcgacgtctactaagccaagtgaattaaaataaaacaacttataaaatacaaacagcttgtagtaactaattttaatttaaaccaaaataatattacaaatttgggatcccgtaaaatcttttaaaaatattacatgttgtgtacatgtaagctgacctaagtagaaaaatgagatttatatagcaattattgggaatattttaccatgatctaggtttattaataaatatgttgattaa

SEQ ID NO: 120713 - DNA, 768 bp, Cannabis sativa
tatttttataatgtgtgatgcggtttgaaccgcatattaataatttaaaaccgtgaaccgcaccgcaccgcgcggtttaggaaaaattcaaacggcgatctcaccgcaaagaattccaaacagaatttttattttgcagtgcgagcgatttaagcgatttgagcggtttgatgaacactcctacataaaatacactaacttagggcccacagactgaggcccagcccgtggggttgttatgcttcatatggctagggaaccacttgaggttgacaagtgtcgtgcgtgcgcttcctttacgtattgtagtgtctgaataatggtcgtaggacaaaagggatgttcccttaggtggtacacacactcccagggtgacacaggggacaacctcctaatatagcgggattcggtgtcagatgatcaccatgtaaacctttagcttggattccgaaacgtcacttggaaagcccttccagatatatcctaatcatccttccaaagggtcttgactactttttaaatgggacgatgcactcttctggatccaaaaacatccaattccaagcataaatatcttatatctcgaatggtttagaagctcatccctctgtgtagtctgagcccattatcttgtagggtttttgagcagaccttaatcaattaagttttaattggaaatgtcacgtgcctttttttaaaaaacacgaaaaaataattttttgagacttttttatttttacacttgaaaacagtttttttttttttttt

SEQ ID NO: 120714 - DNA, 840 bp, Cannabis sativa
gtatggagtgtaatttcctccagtaaaaaagaaaaaaaagttaaaaatttcagtatgtggtgtaaaaatctcttatttaattttggccttagagacatatatagcccgtttaattttgttattaaaatggattaggtagctaactaaattggttcacattgatagaattatttaggcccaattagatttgggtttattcaatgaataacaattattcaaataaacgtcaaattcctttcttttgtgcgttgtgtgagagttatgaggctatagtattaggtacgacaaactgaacctaactctccctcacatgaacaatcccaattgtgaaggcccatttgccttgtttaaatagtcgcattaggtaattatattagtttagcctaataaaatttgattagaaacataattaattctagaatatttgaaattaatttttcaatagattattttaaattaatataaagaaatatacacttagtttaagaaataattctagataattaatttctaagtaaactagtttatatttttctaagtatttaattaaatgaaaaattaatatttaagttaattttttctttattgtataatttttaacatttaataaaatgaaaaattatatttgtgttgaaaattaattttagatcaacaaaaattaaaataatttatagaattttattatattttattttaataggtaaatttcgaagtatatatgtttatataaatggatttcgaaattaatttgatatatttgtagaaaactaaatttgagttgaaaattaatttattttaattaattttgtaccaacttaaattaagtaatttttcataata

SEQ ID NO: 120715 - DNA, 627 bp, Cannabis sativa
ttttaaaactaagaatcatgataatgcatagttgatatacgaaatttcaaagaggcgtggggacatgggcaaagggagtcgcaatcaatcgcaaaatgtaatgatagttccctaacaatattatgtatatataccacaaaatataggacatatttttcaaaaaaaaaaatatatattataaataaaaactttaaaatataataaatcagattgactaataaaattatcaaagccactaaaaggagcttagtagtgagggaggaatgggaaaagttatttattgagatttcagaaactaattaagtaagaacttcaagaaattaaatagtgattaagtaaaataaatggaggatttttatgtggttcgagtattaattatcccctgtccacgagttagtgtattggtcttttaagttttaaaatgtattacaaatgagttatacaatagggaatcctaacccatgctataagttggtttctcttatcgaagaagaaagcatataataaaaactagcaaagctttggttaaaattctattccccatgcatgaagggatagtagggtttatataggctagagttcgggtccgaatatacccgtgatccatttggattttattgtaaaagc

SEQ ID NO: 120716 - DNA, 1467 bp, Cannabis sativa
tccctaatgattaaattaactaggatgatggggtggaagaaatttttcttgaagacaattggtctactgttgaccttcgtagatgcctggatgccaagcgtgaaaaaggcaaaggagagaagggaaggcattaggggaatgatccccgaaatcacattaacaaaagaatttatggatgtgagcttccggataaaaacacgtgttggtgtattataaattagatcaaagtaatttaagtagtatttaaaaaaacgacattgtgattatatatcaaaggaattaaaacaatatttcttatgaccttatgattattttaatattatttaatattaataataagtaataagtatttatattttcaaatgtaataaataatttaaattatttgatttattggaataaaagaaacccgacccaactaggtattgaccaggccaagccgcagaaagaatgaggtttctttggaaaaagtcaaaaagatatagtatctttttgcattttatttcttaatttttatttttacattattttcttatatagtttatagttatatttttatattgaaaatattaatatataataagaataattactatgttccataagccaaaatacgacttaaaaaaaccaattttattatatatattgttatccatgttttttagtaggagaaacatggcataattagagacaaagatttgttaacctcccggattaataaagatgaccatcacgattccttgtggagatgccccgttaatccgggaggggtttaataaatgtttggtgcagagagctacctttgtcccagttagcatctccaggatgcgaaaggaccatacttgtccccaaactccatgaagttctagaacaacggtttggctacctgacatctaggtaaggactttctagattggtcacatacgacgactcctacatgaatatggatggccacatcaaatttcttcagaaattgacttatagatggttacaccttttttctaacacagaatcagatcttgtcccccgtgccaggccatggtactgtgcatacgcacctttagacatgccttttttcctgacgacttttctagagagtaatttataaaggagaaacctttgggcaacacatgtcactaatctagacggtactacgtactcaccactcctgggaaacgcacgatcaagaactttcttcaagaccggacagtcacattcaaagttgtatttacttgtccttgcaatgggctacgggataaaaccctaggtgggtaaaaggaatggccttacccacatgtaagcatataaatactcccactttttatatacaaagggtgaacaaattgatactagctgaacctcagcaaaaactttgacaacatttctttttcttcaagagaaacaaaaggagtgcagagctgttaggatatttttagtatttaatttaggttaattttagcacatttt

SEQ ID NO: 120717 - DNA, 703 bp, Cannabis sativa
atattagtatttagtggtttacaacaacttgtatagcagttcatgattagttagcgatatactcctaagaattattattctaaaatagcgtttagtcgagaggaatgaaaatataggaacatgaatgagaatgagaatagaagttggaataggaataaaaatggaatgaaataaaatttaaaatatataaaaaaattattaattttttccttttgttacactggaatggtcttttcttcttttttaaaatagaatactcattccaccaaaatagtagaaagaacattccattgaaatatcattccaatactttaaaatacaatcaaacaaaagaatggaatgaaaattgtttcttttttattccatttggcaatttcattacctccaaccaaacgtcacctaagttatatggaatcggacacttaattacaccaataataatatgacactgaggaaggttaggcaccagtggtctcttttactatttcttttattatcttaacaagattttaataaatatcataaaaagagtgttactgtcaatctcttaatataattttttagtcttctatgttcaaaaacacatggaaaaatactttttttaaaaaaaaaattatagcggtattcgttatacttacagcttcatttctgtaaatttttgaaattttttgaatattttacagtgccgaaaatatgtttaaag

SEQ ID NO: 120718 - DNA, 2744 bp, Cannabis sativa
  modified_base (2706)..(2714): a, c, t, g, unknown or other
agggcacaaaacccaacagtgtctgcatagacttcactgaccttaacaaggcttgcccaaaagactgcttcttgttgcctcgaattgatcaaatggtggatgccaccttaggatttgagttattatccttcatggatgcctactctggttacaaccagattaaaatgtatgtcgcgaatcaggaatgtactagctttaggaccgagaagagggtatattgctacctggtcatgccattcggattaaagaacgccggagaaacctatcagcgcatagttaaccggatgtttaaaggcctcccgggaagaaagatggaagtatacgtagacaacatgctagttaaatccaaaacatgcatgggccatgcagatgacctcacagagcgtttcgaagtggtccgaattatgggatgaagcttaatcccaaaaagtgcaccttcggcgtcaaatcagggaaatttttggggtttatcgttagtcaatgcggaatagaggcaaaccttgaaaaaatacaggccttgttgaatatgccttccccaaagaaacataaggatgtacaaagcttgatcgagaaggtggccgccctaagttgattcatctctcgatcgaccgacaagtgcatctctttcttgaatattttgaaaaagtgtcaaagatttgaatggactgaagagtgcgaggaggcattcagaaaattaaaagaacacatggccaaactgccaatactgtcaaaaccgattcatggagaggacatgttattgtatttggccgtctccaagaatgctgtcagtgcggccttggttcgggaagaagaaaaagttcaacacccaatatactatgttagcaaacgcatgataggggccaaaacttggtattcgttgatcaaaaagttagcttttttcctgctgatggcctcaaaaaagctaagaccatacttccaggtccatcccattaaggtacttacgaatcacccactttggcaagtcttatagaaacctgaagcctcgggaagactcgttaagtgggccatggagttaagccagtttgatatacactatgttccgtgcgtctccataaaaagttaggccctgccagacttcataatagaatgtaacgaagtagaagccatcaccagtacgccagcccagaagatgttgacgtggaaagtgtacgtcgattgggcgtcaaatgaaagtggatctggtgccggaataacaatgatatcaccagatggactccagctccaggccgccctatgcttcgcaatcctggcctccaacaatgaagctaaatatgaagctctaatcgcagggctaaggctggttagagctataggggctgcgagggtagaagtcgtcagtgattctcaattagtggtcaatcaagtatcgggagagtaccaaacacgtggagaaaaaatggttgcttatgtagcaattgtcagagaatcgctccatgagtttaaagaatacaaagtggaaagaatcccacgagagaagaacgctcaggcagactgcttggctaagctagcttcaaacaagaaaataaaaaggctgggggtagtacctattgagcacctcacggagccaagaaacaaaaccaaagaaacggtagctactaatgagcaagagccgagttggatggaccccatcataaaatacgtaacacaaggagaactacctcaagagaggactgtatccaggaggttacagtattaggctcatcgacacgtaatgatggacaatgtcctttatcagagagggctcaacatgttgtacttaaggtgtatgtccgaccctgaagctagacggatcacgtaggaggtccatgaagggttatgtggagaccacaccggaggtccaagtctgtcaaagaaaatattaagataaggatatttttggccaacaatgaagaagtattgtgtagactatgtccaaaaatgtgattcatgccaaaggtttgcaagcataccaattaccccacccaacgagattactttgatgactagccattggcccttatcggtatggggaatagatctcattggatctttactaacgggaaagggtggggtaaagtatgccatagtggccgtagattacttgacaaagtggacagaggccgagcccatgaagagcataaccgccaagaaagccttagaaattgttatcaaaaaaattgtgtgtcgatacggcttgcctcacaagatagtatcagacaatggaaaggagtctgactgcgaggaattcacaaacttctacaaccaacacggagtcatcaaaagcttctctgcggttgcaaggccgcaaacaaatggacaggcagaggccatcaacaaaatactaaaggtcaccctaaagaaaaagttgctggcctacaaaaaaattggcctgaagaactgccacgagtattatgggcctaccggaccactccaagaaccacaactggatactccccattctcaatggtgtatgaatgtgaagctatggtaccaatagaaaccttactctcatcccacagaagggcaacgtaccattcggcaacgaacaaagccttattacaagaagcgctagatcaaatagacgagctccgggatgagtctcagatatagatgacagcttaccaaagaaaggtggctaaataattcaatgccaaggttaaagatagaaaattcactattggcaaacttgtaaagcccgcttagttnnnnnnnnnattagcagttgtttatgtttaattatgaaa

SEQ ID NO: 120719 - DNA, 2835 bp, Cannabis sativa
ttcacgttttttgtcgatggagatcttttcactacttttataattttatttctagcacgtttttgtggtgaactgttttgaatttttcgtatctttaaaattttgttatgattatttattttgtttttttgattatttttattatgatatttatttcctttttaatggtgcaattttagttttggtctttttttttatttgtttttatgattaatttaagttttttgttttggtgaaaactaaaggtttttttcttgattgatgggattattatttttataccttatattaatattttaaggaaaattaatttcgtaattattttatacctatatatttaagagtaattaatgggtaattatattgataccatttataagtatttaaatgcaccttttaatttttacaatttttgttaaaagtcaatttttttgccttcctattgtgaattcatgatatgtgtatttcttttttcataaaccttttacttttgtaattcatttaaactctttatttatgaatgttgatttgttttttttactaaagagtattgttttatcactaacttggttattgaaagttttttcacaaaactttctatttcatgttttatgaaaaacattatactttgtgaggacttgatgcgccacagtttgttggtattgctgcatttcaaggcttttgtgtttatttttatggcttgtccctaattatttagggtagaatggttaaatatttcatgttttcattttttatagcttgcccttaattatttagggacttgatgctccatactctttaaaataaaaatattaccttaattaatcatggggctagagtgttgagacaaatttttcagttgtggactttttccaatctggtcttatgcataagggcgttaatgagacgaatatagctctcattcttaaggtggcaaatcgaaagaaaatatttcaattcagacttattttgctctgtaatacggtttacaaggttatttttaaaatcattgcaaatagaattaggtcggtgctccccagattgatttgtccaagtcaggcggcttttgttacgggggcggagtatcaatgataataatgtgctggtccaagaaatcatccactcttttaagctcaaaaaaggtaaagagggcttgtttgctattaagattaacctggtgaaagcttatgatatattcagctgacaattcattgaccatgttctcagcagttttaaggtccctgctaagttttgtaattggattcgccaatgtatctctactactttgtttaatattcacctcaatggtggaaaggtgagcaacttagttcctgagtgtgggttgagacagggtgatccactatcgttgtatctctttatatgggtcgctgccatcctctctcatattctagagaaggccatcgatgctggttctattcgaggtaccaagttgagtagagatggtcctaggctctctcaccttttctttgcagatgaccgtatccttgtgggaagggcgactattgcagaggacaaaggcttttgccttgagaaattttggactggtctgggcaacgtgttaataagcttaaaactttttttttttcagtaataacactagtgagggtatgaaaagtggtctcatgcaggagcttgggcttaacatggccacttccaacataaattacctggggctcccgttatttagatttaagcaaaaggatgcggattttaatttcattcttgagaaccttatcttgaagcttcatggttggaaattgagaactctctcaaaggccgatcgtgcagcattaatcaaatcagttgggcttgctatgctagtctacactatgcaaactaccaagctttcaaagaaacttgtctttaaaattgatggtatgatcagagagttctggtgcggttgcgagcaataaaaccgtggtatctacttgaaggcatgggaccgcttatgcctcccaaagtccaagggtggccttaggttccgtaaaaccctataaatgaatcaggctttcctgaccaagtgggaatgggccctcctcgatgatgaacaatcgttctgttgtaaactgtcaagagctaagtatcttaaaggaaaaccgttcttggaaggttcttatagaagttcagactcttggttttggaagaatatggtgaaatttaaggatatcctgaagaaaggtgcttgttagtttattgttgatgggaaggatactaatatctggactgatccttgggttttacatggaaagaaaatctatctgaagcctattacccccagacatgaaggggtgatgaaagtggtagagttactcctgtagaacggggtttgggacattactaaactccatgccctgtttgatttgaaaacaattagtaatatcatcaaaggaggatatcccaatggtttagggagggacaggtgggtgtggatgaaagagctgaatgttattcacaaagaagtctacatacctagtacaagctttagaaagagcctcgacctgtgttgttgctcctgccttgtggaacaaactctagaactaaaacattttagagaggcataaggtcttttggtggggcattttgtttgatgctctactagtccgcgccctactggctcagagaattagaattgaagaggtgttacgccttctttgtggggttgatgaggtatcaatggagcacctttttctctattgcaactttgcatactatctttagtgttcttccccttgaggattctttccgtttcgtgactcaggagcctgggtttgggattgggtaacttttatttggaacttgaagtcgaaaggggtg

SEQ ID NO: 120720 - DNA, 1331 bp, Cannabis sativa
ataagtgttgtcttggtttctcgaaggacagatgttaccaccactaaaaaggatgtcgtttccatgagaggattttccaataacgtaaccaacactttgtggttacactttgtgacttcttataaacgttgaaagagaagccattgaagatagaactaaaaggagaaaacaagcaccttgaaatacgatgagaggtcccaaagagaatcaaaggcatgcctaggaagggacggatcaaaaaacacgacacaacacttgcaagagacaaaatagttaacgtacaaggacgtacattgagttcaagtagtggaggcgtgcttgtgtcagtaccacctaacactggaccaacaatgtcgccatatcccattaccacctgttatcggactagtacatggtccccatagagtccacttacaactcatttgtaaacaaggtcaatagaacccaactactgtataaatattaaatacccttttactctattagaaatggagttggaaccttgtaatatggagagaatataatcagaatacaagataattcattgtttccttctcacacaatttcttttatatttcttcttgaatattacttcaccatttttttagtgcacaatacaaggtttctagctacaatatagttgacgagttctgtcaacacgttcaatttattttttatatatatttttacgttgttctatacaaaaaacacgaaaataacaagaatttttttgaaaaataacatgaaaataacatctaaataacatcaaaacaaaataaaaataatatacaaataacaaaaactaacaacaaaataataagcgtacaacataaaaaataacataaaaatatcaaaagactgtattttttgtaaataaaatcttaaaaaccgtaaaaatatttaaaattccatacaaccgtatttttatgaatttttttattgttttaatttgtgaatttttgaagtaatcttttatttcctaaactcaggtaaatctctccccgttagtgggctaattataccaaattagttcactacaataaaagagaatttttatcccactgggataaaaacttttgatcccacttttacttttggagctttaaataaaagtttggaacaagggccttgtttggaaaacggataaaaaacagtgttagaaaggctatttttatgcagttgccaaacgcaacttagcattttaagtagggctttttatcccaatttttagataataatcgggataaaaggtcctcatacatttgggctttttaattgttgggccggctacacatataaaaggaacaattaacttttagggttttattttt

SEQ ID NO: 120721 - DNA, 1842 bp, Cannabis sativa
  modified_base (1809)..(1817): a, c, t, g, unknown or other
gctattaattaaggccgttctacttgtgctgatgttcagcgggagcaagttcctacaaatttttgaggaaagcaagtttttgcaagtgtctaggaggagaacattcttgctgttgtgcagggggagtagaatcttcctaatgttcagaagggctcctcaacggctgatatccagggggagcaaattcttgatgctgatgctgatttagttcatgttccttttctgtctcttgttgcatattccagtagcgagtgattatgatcatcgagggggtgatagtgaagttttttttttttttgtaaaaatacactaactattgttcatattttgggtttggtttcatttttctttactgttgaatttaactttgtcaattgatattttgtcttgagattatcttttggaatctgttggtttgatagtatttttgtttaattcctttgtgcatctttttattgtgtttttgttgttgatcataattttccaagggggagattgtaagtgccatgtttttgtatggaaaattatgttgcttttatattggtttagttgtgttgcttttttggtttctgtcctgacctttttgagtttctcatctaagttggtcttagttgcatctattgtgtttggatttatttacctttgccaggtcagctttgttagtttgtttttctttttagtttagctagttgccaaatggcctattctgttgagttagttagttgagtcaattttaccgaagcaatattatattaagctgatctagctttttctaactatctcttcattttttatagaactctcttatagttcttgctctgctagggaaaattacttttctgtattttctcttttattgtgtattgtagatcgtaattcattggatctgtaaaggttgcaggagtgttaatctgtaatgcctgaagggagttcaggctgtttcactggagggaatttagcttggtagaagcaagtggattttgtcgtttcggatgtaagtgttctacaatctttattcttgacaacattcagtatctcttgtgtaagatcagttcattttatatttgttatcccaaattttgttcacctgacgtggcatgtccatgtaagccaagacagagtatatatggaatacagccttgccagtagcaagacggggtctccatacaagatatggcaaaaccattaagcagcaaccgaaaggagtgaagcgagctatcaaggagttataccaacatgtctggccaaccaagagaagcctataggtctaccaaggtgagcttgtatggccggccaggatttaagcacaatctggctggccaaaagatgactttcagaccaagggagctttcgtttgaccaagagaacctggcctgtacaaggataaggtgtgcaaagatggcctccacttgccaaaggctggcctccacatccaaggcctggcttcttcttggtaaagctacatgacctgccagactatggcaggagcatggttggccaaaattaacctggtaggagcatggccggccaggattgacttgacaggagcatggtttgtcaggattctcctggcaaggtggatggccggccatgattgacctggtaggattctctttactacctaatacgtggacatcaagctaccttggaattgggcccttaacagcccaacaaactagatggaaaatatctactctactttcaaggggcatttgagtcttttgtatttaatcaatttaatattgtaaagatcgcttagtctaatttggaaattagcagctaatcacgtttaattatgaaaattatttnnnnnnnnntaaataattattatactgttattat

SEQ ID NO: 120722 - DNA, 893 bp, Cannabis sativa
ctttatttaagaggcctaaaccctagattatactttaaatccctagatattttcataggttgttagataattacaaaatactaaagtgcccttaaaagtagatattatctagctgttttattgggcttgtagggcctaatttgcagcctaactagcagtccatgtgtagagttatccaaaaattcctgtcgggtcaatcttggccgaccatgctcctgccaaggtctggcaggtcatgttcctgccaagatctagcaggtcatgttcctaccaggatctggcaggtcactatagctttactaacaggaggccatccttttgatgtggaggccaaccttttgtaaggttaggacaactttgtacactgtttctttgtagaggtcagattcccttgatcgaacgaaagatccctgggtctagaagtcacttcttggccgactagcttgtgtacagatcctagtcggcctataagctcaccctggccatcctataggcttctcttggccagctaaggatgttggtacaactctttgaaggctcgcttcaccctattcggttgttgcttgatggtttggctatatcttacatggatgccctattctgctactagtagggctatactctacctgtactctatctttggcttacatggacatgccacgtcaggtggaaaaaatttaagataaaatttgcctcccaagtccatgtttgaacatctagttggatatggactttttagctctcgtcttgtttaaagtagtctctgttgagcaaccttgtctagccaggtgttggctttttgcatgccgtgttgttggatctttgatcttctctctctatgtacgtctgatcttcccttcttaggtatctcttctgtgtaactgccattaaca

SEQ ID NO: 120723 - DNA, 1293 bp, Cannabis sativa
  modified_base (54)..(65): a, c, t, g, unknown or other
taattttaataatgcaagtaaacaaatgtaagggaatgattaccttactattgnnnnnnnnnnnntattagtaaacatgccataaataaaatcattaatcgtcattatacaattatacatgcaaattaatatgatgagtcttattataataatactaattatacgggataagttgagaagtaaatctctgtatttattaattaaaaatatttttatatattatattttattaaaaaatatttatgaatttatttaatatattttatctttactaagtctagcacataatttacattaactttaaaagtataataaagacatcatttataagagtgagtatatattttaaaaaatataaaaataaataaaataaggtgaatatacaataatatatataatttcttcaattttacatgaggattggtataactttctctttcatcttcttccttttgttatgatcgaaaccaaatatatccatttagaaaaggaaaaaaagaataatatatatacatagtttattatctaatgaactttattaattaaaaagaataattaatttgtttcttactctctttctaatataaggcaagataataagtgtcattttctcttctttaataaagagaataaacccacgtagatatttttcttttttatttgcaaaacacaaaaactagggtaatttgcgatagaaccattattgtattttaattttatatacttaacttgaaacaaatatataaatgtataatttaattatatattaaactacaaattggttgttagaggtcaaaatgggaaaatcaaacagcttaacaacaattatgattaatacaagaccaatataaatgcatgagagacttattattttagttaaatactttatcatatcataatcacattaatgtgaccttaattaatgtgtagaagaagctagtaagtacaaccaaaccaattaatattatgtggtgcgtagtccttgacgtacatatatattattaactactgatcaactctcttcttcaattgatgctctagtccttgtatatatagttaatgaataaatatatatatatatatatatatatatgtgtggagataatttatgatcgaggttatccattttttttagttcaataataatgttttgcttttaggaaaagaagggggtggtggtgctatagtagtactataatgtcatatataaaaaatatatttatagatggatacatatatgaacatgcatgaaatataagaatatttttatttaaggaaatatatttctattta

SEQ ID NO: 120724 - DNA, 1108 bp, Cannabis sativa
ttgagggtaatgatcgggtcagatgtgtcatttacatgttgcataaggatgcccacatctggtggaaaattgtgttataaggtcatgatctcaataacataacctggaatgctttctggaccttgttccatgaaaaatactataatgaatctatccgagcggcaaaagtagaagaatttatatggatgacctagggcaatatgacggtgacagagtatgccaccaagtttggtcggctggcaaagtttgcctcagaataagtggccactgaggcggctagaaaggccaagtttattcggggattggaagaacatatcgttgagatgtaatactattttgaaccatgtgttttgtaaaagttattaattgaagcctctgttttataaaatgataaattatatcctgtatttttcaaattagtactaaatagtatcttggactgattttttgtcaaaataaaatttaataataacccgatatagaggtgttatgacaaaactggttatattttctatatctgttcgtgttacaaattattttcaagttggttatatcaaaaaaaattgtcaaaaattgaacacaatgtcttatttgtactattttagaaaatacaaggttttttttttatttaataaaaaagatggtccaatcggtaacttttacaacatacatggtccaaaatagcattcacctttaaaatataatacttaaatgatataaagaaaaaaaaaatagagaagttgatatatgatgtaatataaatgtgtaaggtaaaatagaataagtaaaattttggtgaggtattttaaaaaatagagtagagaagttgatgtaagtgctttaagagcgtaaaattgattttatttagtgttttaaaatcttagctattatacatcatttcaaactccaaaaaatatttctctacctatatctcaatgaatagtagagagttaaacatgtaaattgtctgattcattcctttaattattattttattctctcttacttagagcattgatataagagactctaaaatagagaagttttaaaatatttgaaaaactaaactaaaagcacattatattagatgttttaaacttatttattt

SEQ ID NO: 120725 - DNA, 3998 bp, Cannabis sativa
  modified_base (1173)..(1174): a, c, t, g, unknown or other
  modified_base (3934)..(3943): a, c, t, g, unknown or other
aaacttaatacagtatactgcagtatgaaacttatgaaaaaacacagtaaaaaagttaaaaattccgcctaacagtatttttgtaagaaaatgacaaaagttagtataccatgtaaattaactctgtaccagtggtccagtacgaatgaattttagcaaaaagaaaaaagaaaaaaaaaaaaagaaactgtgtacgtatgtagaaacacgtgctcctgtttgtacctaacaaataccaactgtaccccaactacaactgttctccactgtctttgggtcccacaaaccaacaattcagttgtcagtaatttccacttgttttacatattaataatagaatcaaatacatattaaataatttctctcaaaaaaaaatacatattaaataatttgtttcaaaaaaatacatattaaataaaatatattttaaatattttataatatatatatatatatatgaaaataaatgggtcggcccggttagattatacgggttacaaagaaatcagcctgttaccaacttaataaccacgagttcaaggcttttaaactcaattagtttaagcccaataaaaatagaactgttttggcccaaaaacagattgggttagcttggttggtcggcccaacgacctaaaatctcaaccctatataagggaaatgcccagttcacttttcacttttaggacaagtagaagatttttagaatttatgccctaaaaattatataaaaatatttttaattattaataaagagttaaatattttaatgtatacataaatattaaattattaatatttattattgaataatttatacataaatatcagaaaatttcttattcatataaggatgtaatttgtagttctacaaagaactaagatcacttacctatgaataaaacagtcagcaacatattaaagttattaaatttttaatcaatggttgctagtacggttcattaatgcaagtaattttggttatgattactgatgtagtatgacatcaaagtaaatgtgttgtatataatataaattatatatgacaatgacttatatgaatgaagttgtctttatctaacatgcagtttactataaagacttaattcatatcataacaatgatcaatagtatatcggcttaaatcctagtaatcatgaactcttgttcatnntattagtttctttgattcattcgttaaagtttttcagagaagataattcttacaacttctgtttttagaatctaataaagtggatggctgggaacatgatctacaattatcgaatcctaattttcttaacggatcgaatgttggttccctttaagtgttaattctagaactggaaagttgtgcacaaatttagatgggatctaaattatacttccactagtgaattaatggtactaaaggataaagaaataattagaagggtaaaacagtaatttgaccaagactaattacgaaccaacacatagagggctaatcactgaaattgattatattaatgaacactgcagtaaaagtaaatataattcttaaattattaagagttcaatttcatatttattgtagagtaatcatggaattgataaataggattatttggttaatgagactcaatgaatatctagtttattgaagcttagaattataggtctatgatccccgaatcaccaccttaaaatactgtcaagggaaggaataaagaatagtataatgttgttcgaaaaatttattttgaattggcaaaataataattatttatttttgtaataaataaataaattaaataggaaaagaacaaaatttgtcaagataatatttgttaagacagaaattgtcaggacaaaagacatcatccttgtattaattcagacatggtaggcgcctatccttagtgtaggatgtccctattggttttgtctttttgagttaattaattaattaattcaattagataaatacttgataaatacttgaaaaatacttgaattttttttttaaaaaaaaggttaaaaatactttaaagtaattaagatattctctcaagtagttgagggattacctcataaatattagtaattaaattcggttatagatatttgtttatttaaataataaaatgtgatttaattaatgagatttaactactataaatagaagcctgatttaagaaattagaagagaatttttaataggtatttttgaaatacagtgagaaaaagaaaatagttttttctctcaaattgttcttgctcatgtgttgagaattttaacaagaacacattgtacactttatcctaatagcccacaatattccttatgtatggtggatcgatttggaagacactggtgtgagttattttgtatcattctcatcatctgaattaaaggatacaacatacagaagttttgaggatatctcgatagccatcaagaagtatatgttcttaacttatattttattgttaagctttaatgtatacacatctggagatccattgggctatggtacaatgctaatcaaataatatgaattttttccgtgcatacctaatttagtaccataaaaactaacaagatctccatcgactcttgtcttcgcctgggctgcaggatctacgtcgtccataggagtatctccatcatggccaccagtttattttaagtgagtaccatggttgtagtatacaacctttgacggtatcattactttcttcagctcttaatgaaagtaccaaaatgtttatcaaaattttcaaaaactaataagctataaacaaaagctaaagacatagataaataacaccagagtttttacgtgattggggcattaatgaaccttaatccacgagtcaatattattatgctaagactggaaaagccttaggatttacacaagtgtttgaaccctaaaatttacctaagcaattgaggaatgagattctaaccctttgcttgtatggttgttcttatatttatattgttagggttctttttcgttcgaatttgcccattggtgggttaaatacaaataatatattaacttttgcacatcaattgaattattatatttgctaatgtttggaaagataaatgcatgtttgacttttgatttaaagtctcaaccactctagaacttgtttgataattatttgaggtgaaattgataaattacatctgattttgagatatgatatatgcattttttttttttggatcgattaagctttttaagtttaccttagttgtgaattctctagttttacccaatttgagcctaaatgttgacatcttattttttctttttaaccctatgcaataacctttgagcctaaaaattaaattcttattcatccttttcacaccgtagtatattaatgttttatatatttgtatatatgtgagagttttgttgatgagaaaatatttatggttatatataagtgataatgagaaaaaaaatattattcccttagaatgaatgtttgcaagttataagtatcataaaaaaaaacaatgaaaaataaataaaataaatgaatacttgcaacaatttaagtatgggggaatagtaagtttttttgaaaaaaaatacaagattaaattgttgaggagagtgattggggaacaaatagaaattatttgagagaatattgtatatgtatgctacggtgtgatttgagcccaatttaactttttttatctacctttcactcaagtcttacattataagcctataaagtcctattgatctttaaattgtgtgtaattacattagtggagaatggtttgataattaagcttatggagtgaattttcgttgaaaaatacatttattttgagataaacattgattgttggcatgcatgaattgatttgaatgttcgtaatatgatgagttgattaaacacacacacacacacacannnnnnnnnnaattgagtttgaaaagtaattatcttgagttgaaattctaatgattgaagagttt

SEQ ID NO: 120726 - DNA, 686 bp, Cannabis sativa
aattagccataacatttacttttttgtgcttaattttttattttctacttaattatttttttatttttttcatcttcaatttaattttcatagcatgtcaaggaggacatactttcaagatttttgatggaaagcaagaaggatccagaacaaatgaatgataagtatttgagagatataattctgaattttatgattgctggcaaagataccagtgcaaatacactctcgtggtttttctacatgctatgcaagaaccctctaatacaggaaaaaatagcacaagaagttagagattttgttggtgataaaaatatcaaatactgcgtgaatgattttatagagaacattaatgatgctgctctagaccaaatgcattatcttcatgcagcattaacagagaccttaaggctataccctgcagttcctatagtaagctctttaacaaatattattgtagttggataaaatacataaaaagaaaacaaaactaatatcaactaaattttacttcaagacatgaatattggtttttaagaatctttttactaattgtgatatacgtggcatcccttacgatcctcaagaatgggagatgtgcagatatagatgatactcttcctgatggctttaaagtaaaaaagggagatggagtttactacatttcctatgctatgggaagaatg

SEQ ID NO: 120727 - DNA, 1417 bp, Cannabis sativa
  modified_base (50)..(51): a, c, t, g, unknown or other
tctgaattccataaataacagcaataatttatttaaatagctataaatannttcataattaatcataattaaccgataatttccaaattaactaagcgggctttacatcaatgttctaaaaaataatagaatcattaagtaaataactgcgaaaatgataaatttttttaaaattgtgcgataatgagatgtgggtaatcaacattaaattttattagccataataaggatacatgcatcctccctatacttagggaattgaaaattaaaattgactaagtatatacatgcgagtattactgataataaaactttagatgcttggcattccaagctctgtcaaaaacaaaatcgttaagatcagaaagccggtaggttacagtgcaatttttttttagcaatgaggtatggacctcccaattatcgttgaaaactccatgtgttgaattgtgagtattagacataactttgcagagtactaagtcgcctactcgtagattcctctccttaaccttcgagttaaagtaatgcgctatgcattattgataggccacatttttatttgagcttgatcacattttttcctccaataaatctagttggagaagttgtcccagttcattgtccttgatgttgaaaacatcgcgatgaagggaaccatcacctacctcaatagggacccggaccatggctttaacacccatatgaaagtcaaaagggggtttcgtcggttgtttactgcggtgtggtattgtacgaccataatacccgtggtaactcttctggcaagatacctttcctttcttcgagctttcttttaatggtatgctaaattatcttgttgaatgcctcagtttttctgttactttggggatacatgaccgtagaaaaagctttatgtgtccccaagtcgtcgcacaatgatcgcatttctttatagtcgaactattttccattgtcaggaattagtgtgtagggtatgccaaacctgcatattatggctcgaaatatgaactcacagagttttgcagttgtgatggtggtgagtgcctctactttagcccacttggtaaaataatcaactgcgacaacgacatacttgactcttcccttgccttttgatagctcaccaattaaatctatgccccagactgcaaatggccatgggctggtgatggagtttaaatttcttggtggactattgacatacgtagcaatgcgctgacacttgtcgcatcttttagcaaaactgattgcgtttgcacgaagtgttggccagtaatatccttgtcgcataatctttagagccaaggaatttacacctgtgtgattaccgcatattcccccatgcacctcacggaggatgtagttgttggaaattgttttaccaggatctagttttactaacaagtatgtt

SEQ ID NO: 120728 - DNA, 1944 bp, Cannabis sativa
taaaatataaaaactcagcctttttgtatggaaattggaatgaatgaatatatgaatattggtattggattacacaccttgtttacctttgcttttgtctttgtctcactcactctcctctttctttattttttttcttttgtaaaagaaaagaaaagaaaagaagggtttttgtttatgagatgaatgggatgggacccaaatcccaatatgaattcaagaaaaaaaaaaaaaagaagaagaagaagaaggtgatggtggtaatgggaattaataggaggagataaatacaatcaatattattattaataataataattaatatatgtactggcaaatgtttaaagataggtacttatttgttaattttgtttaataaataaataatgttttttttatgatgttaaaagtggatgttgggtaaacatacacgtctttgtaattgtttgacaaaaacacatcaaagaagaaagaaaagtgtatatatttagggtaataataaagatagaggggttaccttattacttatcttaccatatataaaataataataataaatcaaattatatatttgtttaattatttatagaattagaaaatgaccctttacttactattattttatgtatttttagcgggaaaagaaagaaagatatgtaatagtaatactaatagtttgagtaatttgtgagatgaatgcttaaatttaatttttagttgtagataaataattaagtttaattttttatggcaattataattaaattataatgtatatgacctttaagtattattttttattagtatatttaaattaattattaataaaaaataaaaatttaatgacttaaatcaatcaaagaccgccacgtgattattgacttaacacttttaaatttaagtatttatttacaactagacttaaaatttttatggaacattattattggacataagtaatgcccaagattttttatagatgacgttttatgattgactattgatattttttaaaagttattttcttaaattatatgagttttaatacttaattatactaataaatatattataccaagaaagatactacataccaatacttagtactttgtaacaattttcttaaagataaatatttataccataaaatatattattgtaatttatttgaaaaaaagtagaaaaaaacaaatatgtatttatttaattattaaagagaaaaatagcgcggggcgcgggacataggaaagaccatagagaaagagagcgtggcataaataattacctattttaaatataaatataaataattaatgttatgttatgttttttgtctttttctcttttgtttgtattaataataataataataataataataggtgatgatgatgagacatattaattaatttgttgtcaatatcctaaaatgctttgcacacgagtgtgtgtatgtgtgtgatgtgtattgtgcaagtgtgttgttctaacttactagatttgcactttttcacttttttattttatgcaattaaatccaaaattaaaatcttattattattattatcattcatcacatgtgtatgtatgtatgttatgttatgatatgatatataatcaatcaataggaggaaaccaattgattgatttgatttgattttgttgagaataattatagtatagagtaattaagtaactaatatataagtatagattattagatagcggaatagttgcatggaaatggggctgattttggttgggactgttccctccctaactctattctctatgctatgctacactactactactactaattcattattatttattatttatttaaaaataatatatatttgagaaatgctaaagggcaccattggtgcctagcaccctcctacgtgtcaatatcactattggtgcaattaagtatcgggtccc

SEQ ID NO: 120729 - DNA, 1740 bp, Cannabis sativa
atatgtattttttttatatttataaatttaagtccctaacttaatattttacagcacaatttttaattagatttgtggtaaaaaaatttattttcttacaaaaattaaacttatatcagtcataaatatttttttaatttaatattaattatgtttaaaattaaattttcaatatattttaaaatattataataatataacaaattttttttaaaataataaaacattaaattcttaatcttttttttaatcaaatcacgacaaaaatcatttactcatttaatttaaaacatataaaaaactaaatcgaaacttaaaatgaaaaagagaaaacaaattatcaatcaacatgagcattacactaattccttacaagcaaaaaaatattggacaaattaaaatattatttagtcaaaagtaaatttacatagttacactgtgtattgcaaaaatactaaataaatattaaaacacgtcaatcaatatgaacattaaaaaattccaatcttaaactaaataattatatagaagaagatgaatgtacgtttaaaatctacagtttcaaaagtacaacgacatatagatttatgccaaaataaaataactttaaaaatctaaaaatataatagtaaattaatttatctcgttgagtagtgggttgggcgcacattcctccgtcgactcgcctgtcaaccatataatccaatttgcccatttgtttgtcgcgctaaagtgtactaaaataataactatatactagtttattcaagctcgtgaacattgggagccatcttgagagttgggtctggaaattgaggagaaagatcttaagggttggatctaatcagcaatgtccaaatcgattcttgcctcagttgccacgttcaacttgtactatgttatttagcatgttttggagcagtgattatccagccaaaccaagggtcatctactacaattgaaaggccagttctcttaccttcagaagggctacctatttcatatctgaatatgtcgataaaactcaatcaattgctaaagctctgtcaatcattggctcccttatgaacgctcaagatctggtgttggaactattaaatggtcttggccctgaatttgactctggcgtcaaatctttgtgatctcctctcgtttgaggaagtttaggcattgcttatctctcatgaaacacgtgtgatcaacaccataaagtcgtggctgacttatctttcaaaatgcaagccaatcttatgtttggttcatcaaaaaatggtattttgtgtgtcacatgaagctggtcgagggaattcagctgacaataatcatggtcagtcttatggtcgtggaaatggcttttgtttgctttaccaagagtgtctttgaactggccatattgtagttgcctgtcataccgatttgacaaaagctaggctactcccaagtatggtagttcctcttctcataaatttttgtctgaaattgttatcccttatgacatgcatgccttggctaccataattctccttaaatttggtgatgatgaatcttggtatgtggacgttggtgccacaaatcatgtttctttggcactaacaacttggacacaaccactccttactttggcaccaagactctccctgttggaaatggtaagaaattttttattgctaacgcactacaagaattatactcaatagcggcgggcacattagcggcggagctcctccgccgctaataatg

SEQ ID NO: 120730 - DNA, 703 bp, Cannabis sativa
aagaattgtcaatccgcttattattgataactttggagacaatctaactccattataatatattattaaatgtgatattatatttcacatattttaatatgaatgaaaataagatttatctaatcttttggcctagcaacatggaagattggagaaatttctgttcgaagggtatttcatctttgaaagaggtttctttgaatgcaattttctcagctattatataaatatatatgtgtgtatatatatgcagtttagtgcaatagaaataactatttattcaatttagcttatagaatggtaagagcttgagtctaaatgtaaagatagctattaaagctagagtgatccacttggtggtagcttagcttgtttctgtaattagctttgaatatgtataaataaatttttcctcccattctaaagaaaaaagtaagtaagattttgttagagagtctcatattactaatgtgtagaaagatgatagaatatataagatgaatgagttactcttcccatagttaattagttttgactgaaacttcattcatcttatctctaaattctaacagattcacataatattattaagggtaaatagtgatataagtaaccaaaattttgggtttgtaagcggcataaaccccgtaattttcttccatttcatcagtacagattctgttattgtctttaacaggacaca

SEQ ID NO: 120731 - DNA, 803 bp, Cannabis sativa
  modified_base (105)..(116): a, c, t, g, unknown or other
  modified_base (739)..(744): a, c, t, g, unknown or other
ggaggatcaaacctactaacatcgttaaatttaatagaatattcttttatttttaaagtatattctgttaaaccaaaaaatatcgttagataggcacttttaatnnnnnnnnnnnnatatatatatatatattttgtgttatcttgtctcttctatagttctgttcatattgcttgttcatgtgtatttgttaatgtactttgttatccttttttcacattgaatgaattacgcgaatctttccaaatcacatatgcaaaatcattgagagagtataataatttattttatgaaaataatgctctcattgaaaattattaagccttataataaacaagaataaaattctataataacaacctcaataaaggtctaataaggcacaaattatcaaacatgtatgtaaagagtgtataattgttaggtttccaaaccaaataattatatttgttataagataattatatttgttatatggaattgggtcagattaatcaacacataaatttgtatctaaatactatatgctttagttaaaaataaatttttgttgtgattaaaagtcacaattaattataaaaaatttatactgtaactaataagttgttactaaatgtaacttcttattttagcgagtgtgcgaatatattttcttttatacataagtcaattatattcaatatctattcacacactacaaaaaatcttattttttgtcacaataaaatttgtgactaannnnnnaaaagttgtgactaatcataaatttttattcctacgttgtgattaaaaaatgtggctaa

SEQ ID NO: 120732 - DNA, 1958 bp, Cannabis sativa
tttttcataattgtgtacagtataattatataaggtcacttataaatttttacttacagtaacgaaaataaaattcaatcaattgcttaccccacattttaaaaaaaataatcacttgtacagcaaaatattttaaccatatttttggcagtgtaaaatatttgaaattttttggaaaaaaaaaaaacatatttttacacaaatcatataaaaactcatactgaaactatactgaaacatatttccactttttttttttccataaccatactgaaactatgtacctttttcttgtttataaagtccttatttcgttaattaaactatattttgtgatatctttcaataaaatatggtaaatacaagtataagagagaaacacctaaggccgttcagattgcaaattgctggttcaaggcccattaaagttaaatcctatgatgggcctctctctgctcagcaatcactatcttgtgaatagaataataaattaagattttaaaagttgtttagcacttttaaatttgactaatttatatgatatttttttgtttataagtatttttatggtatttgatatgtcatatatataaattaggtttttaaagcccatatttaatatttttatttgtttaggcagttttatttgtcactggtgccggaaaatcgtcagaatttgcagttggcgctgaaaaagacatgattagctgtcggtgccgaaaagttcgtcagagttgctgtcagcgccggaaaattcgttggaattggcattgtcgccgaaaaaattattgaaaaaatcaccaagaaattgattaagaaaccggtttcttgatgaaaaaacctgtttcttgatgaagaaactactttctgggtgattttgctggcgacaatgccaattctgatgacttttttagcgccagcagcaactccgacaacttttccgacactggtagctacttcggcgacttttctggcaccgacagcaaactctagaaaagtcgtcggaattagcattatcgccgagaaaattatcgaaaaaatcaccaagaaactaatttcttgatgaagaaaccagtttcttgatgaaaaaaccaatttcttggtaatttttcggtaacagtgccaatttcgatgactttttcactgctgacatcaactgtagtggcttctctggcgccgacagctactccgacgacttttccggcaccagcagcaaattctgacgatttttccagcaccaatgacaactccggcgattactgtagtttcatttattttatttttttctaagaaaaatatgaaagaaattttaatattttttatggtaattcaaagttgcatatcccatacatgttaaatttttattgtaaataccatattttttcctattaagtttccttattatatttatgtaaattagctttattttcttaaatatgtaagtaccccttatacttctcataataattacaagttcattttaattacaataataccttttttttcgagaaatttttatttttatggttgttaaggtataaattttaaaaaatatgatttttcttttaaaaaaatatattttatgaattttttatttctttgaaaaataaaaaaatatggaaaaagcaagttacccttacttgtcggttaattagttacccatacatcttttttctatatatataacagattgatgttacgtccaatgcaggtataattatatttttctaattaggtttaattaagtaatgttaagtgcaattcatgtacgttaatttttttttttttaattaggtgatgttttttaattttttaatttttgaaatagaatttgagattttaattttgagaattttttttagctatcgcggctacattagtgtgctctttagatataattatatatatattatatagggaaatttttatatatatatatacattatatacattaatat

SEQ ID NO: 120733 - DNA, 3083 bp, Cannabis sativa
cagctgtacataatgtgtttcatgtttcaatgcttcggaaatatatctcagactcatcccatgttctgagttatgaagcattaagacttcagccggacttgtcatacgaggaacaaccagtgcagatacttgattagaccgtacaaccaaccttttaccgatcagaccgtacaacctagtttagaagccctaaccgtctaggatgacatgttgttcaagattcagttgatttgaacctgcctacacctctcattattcccgaggatgtctaaagacttatattcatttcatgcttttatttatttttatgattttactttgcatactttattttttattcttgtatgacctttaggccctttacttttgaacaaataatatttttgtccttgcatggctttggggccctttactattgaacaatgtttatgtatggccttagggccttttacttttatacaaatgaccagccaagtggtctttaatcctaattttatcttcttttgtcagacatgtagctgactggacaacttttaatcccaaaattatgctttttatgtctaatttgacgtattccatttgcacttacttagctttcaattttttgcttaataaagcttttatattttgcttaagtttagcagttcttgttcgatgctatacggtgtgggtgccctccaagtgattgagcagacttatggtctcttggtcaattgtaatttaccaaatactatagacctttgcctgtgtattttcttggagggacctatttgtacacatattgaactaaataataaagattgaatttaaaatgttatcttgttagcaagtttttgacataattttgaactgaaaaaatatttttattcattaattggtctaacatatgtgttgttgttgtgcagcgtatattttttgattctaaaagcttacaaatctaaagtctacttctaaaactcatttttttaatacccttgcatgacataccgagtcggggcctcaggctgtatatacacctaggacatgattaacgaccaactaagagtcattgtatatgtctaggtaatctgcttgcactttgtttgctaacttgatgccagcaattagagctacatattcagcctcattgttggaggctttgaaactaaactttattgccccgtgcaactattgcctttaggtgtaataaggacaatgcctataccgaacaggtggtcagtacaacttccgtcaacatgcaacttcgaggatgaattttcttgttcttgcttcttctctagctcttgcttttctcctaaatctttagagattttaggagatatgcatgtgcatttacccttgaattcagcgagagcttggccttttatagccattcttggctggtaagtgatctcatattggccgagttcaatgacctactttagaagtcagccagatgcttcaagtttctgtaatacttttcgcaatggctggtcagtgtacacccttatcaggtgagcttgaaagtaaggtcgtacctttcttgaagctaagagcagataatatttttatttttccatgagtgggtatcaactctcaacgtcaataagtctcttgctgacatagtacactgggtgttgaatgccatcttctcctctaattaaaactgcacttataacatattttataataaccaagtatatgcccaaatcctcattgtctaaaggcttgataggatatgaggttgagctagttgtttctttagctcttaaaatgctatctcacactcctttgtctattcaaatttcttgttacctctaagtatgttgaagaaagggacacatttgtccgtggactttgacacaaatctgcttagtgttgcaatatgtccagtcaagctctatccttcttttatctttgtgggtgacttcatgtataaaagggcttggatcttctcagggtttgctttgattcccctggtattcataatgaaaccaaggaacttatctgagccaactccaaaaaaacatttgagggggttgagcttcatgttttaatctcaaaggatcttgaagcatttgtttagatcctctatgtgtccccaacctttttggacttgaccagcatgttgtccacatagacttccatgttacgaccaataagatctttgaacaccttgtttacaagtctatgataagtggcccttgcattttcagtccaaaaggcatgattttttagcagtacatgcccatgccgtcaagaaacttgtatgttcttggtatggtggatacatttagatatgattgtaacctgaataggtgtccatgaagcttaggatcttatgaccagctgtagcatctaccagttggtcgatcgttggaagtgggaagcagtcctttggacacaccttattcaagttaaaaaaaatctatgcatactctccacttattgtttggtttgggtaccaagacaagattggatacccagagcgggtagaaagcttcaatgatgaattgttggcactcagccttttgacttcatcttttagagcttgtgctcgctctttatctagttaacctccttttttattctacatgtcgattgtttggatctacgttcaaggtatgaaaaattatggatggatctattcccaccatgtgtccatgcgaccaagcgtagacgtccaggtttgtccttagaaattttatcaattttgattttatttcttgtgctaaaccctttctgatcttcaatcttttggtcgaaagagtagtgttaatctctacttcttctaactcctctatcaatccaaagctatctgcatgatccccaaagtgaagatctaagtcttcctccttactttgggctgaacttcattgccctttgtcggactcttggttagagctcttgacaggcatcttttctttcttggctttggacaagccaagttgtagcattgtcgggcaaattgatgatctccccttaggcaccctacctcatgccttgctgggaacattaggcatagatggttgttgcccctaaattcgcccaaaatacgtggaccagtcgaaatgggacacgtggatcagataacttgtaaatat

SEQ ID NO: 120734 - DNA, 2106 bp, Cannabis sativa
ataactaaaattataaagtaaacatatacttttataattgtaaagaaaatatgaatttaaatcgggatatgaaaaatagacttacctatttaagaaatacgggttggcacagcacaaaaatattagatttacgggccgtgctagacctaccctttaaaaatgttggtatgacccatatcttctatggtacgacacaatacggcctatttttttaaaggtacatattaatatgagttggattaacacaacacgcacaaacttacaacactaataagaaccacacttacaaatacataagccctgtcccatcatttagcattgcaaatcattgattaattcaaacactagtgtgttttttttttagttagtttactaattccacacacaaaaataacctgactccactttaggcagccaccgagccaggacagttgagttgagtatacaaacaaatcttagattggcaaaacaacaaatgaaaatgagtttataggaatagtcaataggttaatcttttaagataaaatcggagaatgagacatattattccctacactaatctctaacaatccaagaccataacacctccaatgaaatcaaacccaaatacaagttctttgtactaactttaagatcaattacaattctcaccttcttttctacatgatgattgattacttaaacaaacagattcccaataaaaaaagttctaaataagattaaattatcacaaaagctctcagcattttatgttttaaatagaatagataatattctatagatataactttttgtacaacacaagacttgaaaatgtaattaatttattattataaaagtaattatataaaaacttaatactttatttttaaaaaaacaacaagacatgtaacaaagaaaaaaaaacaaacaacacaggttacaaggcctaaggaaagaatggaacacaattgttccaaagacactctttatcagttcctaatgcagcttgggccaaattatgtgctaacttattcttttcccttggaataaagtgaactgaggtattaggaaagtgggacaaagagcctatgatcttccacaccaaatccgtcaaggctaatcgatctctagctttcttgtttattttttatgcgaggacttgacagttggtaactaccagcctgataggaaaacgaactgcctggcaccaaataagagcacggtgaagtgccacagcttcagcaaaaataggtggcagtcctgagattgctaaatagtggaaaccagctataactctatcagcagaatcttgaataatagatccataaccatgaagaatatcatcacttcttactgtaacattcacacttagtttgtaaaaaatcggttgtgaaagaaggccttcttcaatcagcttgcttgcagtctgaacttgagggttgttgtgaggttagagcataaactttgattgagtttccttataatcctgcaagtaagaaacagtaacaggctctatctccttatagtcaggcttttcattttgaaaaatagacttatttcgatgattccaaatagcccatcaaataccaaataatattgccaactgttctttgttgaaagtttcataactacgtaagaggaattctttattatcacagtatttattagtagaatagaaggaggagaaagtagtgtgcttccaatatttaccagctctgaaacactcgaagaggaagtgggaattggaatcgactcgactgaaacaaaaagggcagtggggggtcctggagaatctttctagtgaagaggttaagcttagaggggagacgatggtgaaaaacttttcagatgaagtgtttaattttgggaggaatatttgaggacgaaacctatttccaccacttcttaaaagtgtctaccttagacgagctagggttggagtgagaagtgttggcaaggtggtaagcatagttgacagtgagagaacccgaaggatcatgcccccaaatagacagtccttagaattggaattggtaggtattgttaggctatttttagcctatgttttcgggtcacattttatagttgtttttcttctttattattatttttggaatagaacta

SEQ ID NO: 120735 - DNA, 784 bp, Cannabis sativa
aataatgggatccacaaataattaaattcataaataattataaaaataacagatattaatgctaattatctttactaattcaaattactaaagcgatcattacaatttcaattctcaaagtattgtgaacatatagagtaagtgagttgagcgtgatgaacgtcacatatagggtaaaacttaacattttattaataaaataagtaagtgggttgtcggataaatttactactagtaagggcttacttagacatcctctttaatttactacaatatattaaagggaagaagatagattttctaccgccacatgaagtcaactagagtaagataagcaagtgagtacttggatacatttactacaagtagaggcctacttagacgtcctctttaatttactacaatatattaacaggaaggagatagatttgttattgccacatgaagtcaactagaatatcctctttgattggtgttgacgctgaaaagtggacaacaccaacttactagattgacgagatgtataatgaatgtaagcaaataatttagagagacacacaatttatagtagttcactccctatgttgcgatggtaatggaactacatggactttgagtttttatttctcacaagattactagaaaattagctaagtgcgaaagctctagtttgtagagagagatgcgctgaccttatgtgtacttttttgaatgtgaaatatgatgtgacagtcagtagtcccgtgatccgtaaggagaaataccgggtaagctgtgcaatccc

SEQ ID NO: 120736 - DNA, 647 bp, Cannabis sativa
  modified_base (82)..(93): a, c, t, g, unknown or other
gaaccaccaccatccaccggaccaccaccatctcaccggaccaccaccacttcctgcaaaaaaaaatcaaagagagagagannnnnnnnnnnngagagagagagagagagaactagaacgaggatggatgaagagagcgagagagggaggaagctagaggaatatttagttctgtggcataggagtggagagagagtgagtgaggtacttataaaaggctcgacatggaagaatatgggcccggctcaccagactgttttattaattaattaatttcttttttattgcttttggtttgttgtggatgacatgactgtatttatttattactcactggtttatgttttcatctatatcctttatttttttttaatgatatatgctttatcattttagtttttataatattatccttttcctttcttcttcttctttttgttaaataatttgtgttatgatgtgctttatcattggtagactgattgaaattgttagatttggctttttgtttggacatttgtgtgggctgggctgcattattaataagaagaaattacattctatatcctttttatattgttcttttttatttttaccttcttttttaaaatctattattgttacctctttttttaaacattgtacca

SEQ ID NO: 120737 - DNA, 1341 bp, Cannabis sativa
  modified_base (27)..(32): a, c, t, g, unknown or other
aaaatagattacattgaaatggagttnnnnnnagggcataaaacctaacactttaacttggagaggaatcatttggggcaaggaattacttgttaaaggtattcgatggaaagtgggtaatggtgaaaatatacaatgtgcctcagattcttggctgcctggaatcacttcctttaaacctctgattttcaaagggcaggacattaatatgaaggttgcagcacttatttcagatgggagacaatggaatcaagagaagctctcttcgctgttcatagaatcggatgtggctaaaatcttaagcttgcctttaactcttgttgatcaacaagaccagcttatatggcatcatgactctcatggtttttacacagttaaaacaagctacaaacttgcaactgacttagaggatcaataaccgaatgacagcagcatccaatctctacaatggtggaagaaattttgggcgatgaaagtgccgtcaaagatccgtatcttcttatggcgtgccattcatgattgtcttcctgtagcagacattttacaccatagacacatctcagattcagattgttgttccttgtgtaacagagcaaaagaaactattccccacgccctctttttctgcaaacgtgctagaaaagtgtggcaattctcagccttcaacatccctgaactattggctccaaacacgagtttaaaggaacttttgcttcatgtctcaaccttatggtcctccttagagcttgaacaatttgcaactatattatggagcgtttggacagaacgaaacaaggagagacatgaatcgaaaccgaaaccacatggtgttctcctgtattttgctctctcatatttggatgaatttcactctgctaatcataaatcagctgtgagggaatcaaatacagctactgcctcatcttcagcaagtaattctgctgtctcttggctgaatcctccttcggggcacctcaaactcaatacagacgcaacagtcaatgtaaggaatcaaatgtccgggtttagtgctgttttaagaaacagttcatgtgacattgttgttgcaatgtcattgcctttcaaaggctgtttcaagccagacattatggaagcattagctctaatgcatagtctacagtggatcaaagaccttcgactaccagtgcacttaattgagacggactcccttgccgtagttaaaggactgctttcttcgcatgagctagtttctgattttcattatttgcttcgcaacatctctcttttagtttccaatctccctggagcccaaatctcacatgtatatagatctgctaataatgccgctcacttgttggc

SEQ ID NO: 120738 - DNA, 1127 bp, Cannabis sativa
aatgtaattgtaaatggtttttttaaaaaaaaaaaaaaaaaaaaacaaacattatatgcaaattaaaaaaaaaaaaaaaaaacagttaaaatactagggcaactgattacctccttagagttactaatattttttaattttcttctcataaatattttttgaaagaggccctatttttgcacaaattgtataaaaatccataaaatatgtattttttcacacacaaaaaaaatacactgaactacaaattcttttgaaaaatatgtcattgttttttttccttaggtttcttataattttttgagtttttaccccacatactaaaattttcaacttttttacttttttatagtgggacagaattttttttacaaaatactttgtaagttttatactattatttcactgttgttttttagttgttccattgttgttttaattgttcagttttgttgttttatgaaaagagtatttttataaaaaaaatcccttgtggtagtaaaattgtaaacttttgcctaaagtctagtatttttgtaaaaatattctttttttggagtgttttcttcctatatatttgtataccattttttattaaacaaaaatgtagtaaatagtagtgatatttttgcaaaggtagttttattgtatgtatatatttttaattatttaaatttaatattttatacgtatatagttaaaaaaaaaaaaattatttttttttggtcatgcaagggtacaaaaatacctaactctagtgactattaatctagttttatgtatcagggaatttaattgattactattataaaaatttatattttttggtagtttccattttctagttttttaagtgtagcaatggtaaccaattagtactatgaactttagtttttatgatttagtaatataggtaaccagttaccattatcaaaaaatatatttctttttaatgatgtgagggtaactaactaccactatcataataacaaaacttaaaaaaaatttaaaacttaaactcattgggatggtaactaattacttgataaaatttggaaatatatttaaggggaattacttcatatactgtttttttaacttttttttttttttgtcaaatttacggt

SEQ ID NO: 120739 - DNA, 676 bp, Cannabis sativa
  modified_base (34)..(38): a, c, t, g, unknown or other
tttttttttttttttgttggtttttttttttttnnnnnttttttttttttttttatattatcacggtttttaatacttaattaatttattattattaaattagtttagaaaatcacacacgtggcatttctatgggatagggcgttacaccacagaatcattttgttaccttcaagccctagttaatagagtccagggtcaggtccattggcccttatgttggggatgttctgagattgtgtagcattaggaacaaaaaaggatgttgcatttgatcaatggcccagggagaatttagttgtttccctcctgaaagtctagttcaagatgaaggttgcagcatcgatgagccctctagaattggtgcatggattgttgaacatataagggctagagcagttcttcccctaagggattatttcaaggaattctgcaactacctcggtattgcttcattttagcttgcccaaaattcttaccagatccttgcatgtttaaaacctatctaccacatcttgacgtgggagtgtccaacaccccaggaaatcttatactttttctctatcctctatcaagaccttgttgggttttgtgccctaaataaaatacatttcaatataatcagatttactaattaataaagatcataaataattctatgttgcatggttcacat

SEQ ID NO: 120740 - DNA, 812 bp, Cannabis sativa
ataatatatgttaaaaattagtcaaagaacaaccataaacataaaaatacataaacaaagatttattacaaaaaaattgacaaatatgagtagaaatatataagacagtaaacaactgtttataagaaaaataaaaaataacctaaatataacaaatattccaaaacaataataatatatctaatcaaacattaaaacaactaagaaatataaaccctagaaaaaaaagattcgaatgaaaaaacacaacctagaagaaatataatatttccgagttaattaaggcaaaatgaaactttagaaatttcatctgatttgcttcttcaacttattagtcgactcagggaaaaaactcttttcagcatcattattctttatttttcttctgaagagggcgacgatcatgtttcgttataggtggagcaaaattagaatcatcgttttttgttaatggagcgttttcttttagctttgttggcgagagatttaatacctattttttcaaattttttcaataattgagaaatggaatatgaaggctgagtcacacatctataacagtggatagaagaaaaaagaaaggaaaaaaaacgtgggcagtttctaaaatagaagttggagatgatggatggaagcagttcttttggaacgaaaatgagattttgattgtggggaggaacgttcttagcaaacgaaaatgaaaaataattaaaatagaaaccgaaaataaaaaaagaaaagggtaaataccattttggaccctctgttttgcaaaagttatcaattggaccctgtgttttgttaaatgacaa

SEQ ID NO: 120741 - DNA, 2042 bp, Cannabis sativa
aatatcgctattggttcaactaagtatcgggtcctatatagtttaatataatagcttttagggagtatcgctagtcaatcacaacgcgacatgtcaaaaaggtaatagacacgactgatgcctaatagtaatgctctatttttatatataatcgaatagtacatatcataggtgtcctagccaagaatcttttattgatgataagaaaattagtggaggtgttgcattaatggaaaattatgtttcttgtggatcgagctattggtatatttggaagattacacttaagcaatttaattaatgggactgtcaacatcttgaataatatctagctcgaaaatttctaaaggtgctatgacagcaatcaaggatcaaatggaattgcattagctagtaagatacagcatatcaacaatcttgagctttgacacaaacgaatggaatggggcatgtactgaagatggtctaaggaactcaaagtaatataatcattggagcaaaatgtcttattgtgaaattaacttaagttcaattataaagagagtttgagtttgataaatttagaggctatagtattgtatgacacatcacaaaatcatttctagtttaagtgaaagtttttggatggatgataattcaaaaaaaaaatggtttttggataaggtaattcttttagcctcacccaatataggattatattgattgtaaatataaacaccttatatgaaaaatggatggtaaattattatttgaagcatttaacagtttttggttgcagcatatgcacataatagaaatgataaattagagccaattagtaaaatgtgttttttaattaggatatcctatatattacaataaaactaaaggctatagattgtgaaattttgaaaacatcaaatatatataaagtgattatatatttagagatgttatttttagtgaagaagaatttcctcacttgatcaaatggaaggtagtggattagttgatataggttaatttgtagaagaaagatgttgatatgattgagtttgaggtggaactactcaaggattcaaattagcagtttctaattcttgagaatcatcatatagatgcctttaaatggatttaagagttagtactcaataagttccaatagattagaaggtgatatcttgtaaatgggtaaacaagataaatgatggtagaatagaacatcgatgaattgcgataggtttcatacaagttgaaggaattgactatatagatgtgttctctccaattgtgaagtataagataattaaacttatgttatctataataattccatatgaccttgaggtggttcaattagaagcaaatataacttttttaaatgattttttcgatgaattcatttacatgaaataaccacttgaatttcccatgcatatagaacaagccaacaagaaattggtttgcaagctaaaaagatcactctatggactaaaatagtttttgaggcaatataccaagaggttcaacttacatttcaaagagatataggaatcttaagatcaaatatgacccatgcatgcttgtaatagggttatcaactatattttaccggtatatgttgatgatatgttcattattgactttgtaaggagtttaattagatgaaggatctccattcaataaagaagatacttggaattgaaggctattaaaaaaagaaggatgggaagatgtacatgaagcaatattcaatttacataaacaaaatattatacaagttcaacatgcaagactcaaatggtatctctgtttcttttgggaggtcatttatataaaactttgatatccttttgttattgatggcgattatctttttttattaagcttgagttgtatggtgtttttgcaacacactaatcttattaattaaacttgtttcatcatccaagataaattatttaatattttgagacattctttgtttctcattcatataggtgtctaaaaccaatccccccctccccccccccttttttttttttttgaacaagaggcaacat

SEQ ID NO: 120742 - DNA, 1688 bp, Cannabis sativa
aatatctatcacgtgggactcacatccgtgtttccattcggacaaataccaaaagtcctcatccaaacagatgtttgcacaggcacctggggtgcaaatgttaccccgattttgttccacctgacgtggcaattacatgtagtttcatttagctgacacttggcataacgtgggacatctgggaaagagcatgctagacagttttcacataaggctggtatcaacattttattgtatattacgttccaggaagcatctggccgggttaccgatatgacggctaggaagaaagaagatcaacatgccttacaagattgaatcccgtcaaaaagacaagtgtcaaggagagcctagtctggctgtcaataggccagccaggatcgcagaaagatcagataggacttagcaggccttgatgacttcttcaacaaactctgggaatatctccaacaacattctacaaagacaaattcaactcttcagtctgaaaggacaggagtttcagatagattataactcccctaaaaaagagtgattattatgtatatgtcatatttcaaatgtttaaatgtgctttcctacttcctataaatagtgaaaatattcaaaaggaagggggacctaaattattatctcgattgtaagagtacttttgtgaatgatattctctgtaagcgtctcgagagctatagctagaattcattttatattccttagtgatctacacaaaattttataaatatcaatacagctaaaaaaggagtaggtcattaccaatatctacggggccgaacctctataatttctagtgttctttttattttcttattactatttctaacttttcattgatgattaattagcatttattagactccaagtcagttggtaaatttttcagctaacaataatataaaattattgcattcacttgagggaatggcgttaaacacgttgaacatgattataactttcttagaaacatgttaattgtttaataaaaatataaaaaattatttagtaattttttttacaatatttcaaaaaatatataaatataattttttgcataatctttaagaagtatataatatttgatgttaaataatatatattcaatatgtcattctacaataaatattattatgaatatactacaataaagggaataagtttcggaagaaggtaatcaaggagagtattgcaacaatggttttacaatttgtggcaagctagaaatgacctgctgtggaacacaattgctcctaatttgcaacagaacacaattgctcctaatttgcaacagataatgcagcaaacaaaatggcaagtcaagaatagaatctcctttgttatgtcaaaaaaatgtaaagcaaatagatgttgaatggtttaaaaattgtaattatctgttttacaatagattacttgtatagagttcatgtgacatcacttttgatggtcaataggtgtaaagttgagatttgtggaatgaattaatttctcattcataaagaaaaaaaaacaaaaaaaatagaaaagaagagagcaagataagtgaaattgttaagtttgttagaatcagtttttggttagttattagttagttgtaggattaagtgttagttatgacagctgtaactaaacatcagctactataagtagcttcaatgtatctgtattcttta

SEQ ID NO: 120743 - DNA, 1511 bp, Cannabis sativa
gtttattttatatcgttttagaagaccatgtatacgatattaaaaacatacttcttagtaaatctaagtcctggtaaaatatattctaacattatatacgttaaatattaagataacaagagattgagaataagataggaaagtattaaatcaaaagttaaaaattaggaggtgtgccttcgatttattcagcccttctcccgctttagcgacttctgagacagctttggtcgcgaatttcaccacttttctagtagtgtgggcgaaaatagccctaagaagtggaaaaaaaaaagaggataagttttgattgaatgtatatataaatgtatcgtgtaaaacaacaactaaatatatgacgctttttattagaaattgttaatataattataatacatatatatatatgtgtgtgactattcaatggttatatttttattgtaaccacgatagttgcattattttttacttataatagcaggttatcaataggtaaaaattctctttatagaattaaattaattataattaattattttcttaaaaaattaatttttaatttgaatattcaataagattctttttagcaattaatatttacaaataattttatttttatatacaagttcctattatatttttttaacaattaaattatttaattataatattgagtaatttgcggcataaatacttaagtttaactcctagttacaaacaaatacctaagtttagtttttggcggccagtaataatacctaagttatatttttggatctccgtaagtacctgaacgttaaatgtcaaattattatctacatgccattttcttattagtatattaaactatttctttttaaaaaaaaaaaaaaaaaaatcatgacgtggaccaattaggaattgccacgtggcaatttacataatatttaacagtcaggtacctacagaagttctagaaatgtaacttaggtattattatcgccaaaaattaaacttaactatttatttactggaagttaaacttaggtatttatgccacaaattactctataatatttacaataaaactttttttttttacaaaaattagacttcatcatatatcttaattcagaagcaagcaatagtgaagatgaataacatataataatttttatctaaattaaattcacatatatcttaatcgagatgagcggaagtaagaacactcagagaaactcatttctcatttaaccttttttttttttatttatttttgagtaaatacattcaacccattttatattttatcacatgattctaaatgaatttttattttaaaaattttaaataaaataaacaaaataaatgagtgtaataatttttagttaaagttacatgtgtaacaaaattttaaattatgaggtcaggttttataagttaaaattataagaggtttcgccataaatatttcccacatatactatgtttttgtttttttttttcaaatttacggtttgggttgctgcggt

SEQ ID NO: 120744 - DNA, 683 bp, Cannabis sativa
gataatatatattattatataaataatatacattaagtatatagtaaataaattgtgtaatatgatatgtatttaacttatactttgtaacttatgtattgtagtagttacaatttattatcacttgtaattttaccctaacaataaaagtatagtttccattttaagaaatttaacatgttttcctcatatatttttgtcaacacaaatatgcactggcaaaaatctccccctacacatttttttacgcgaaaaaattatttctaaattgtttcaaacctttatctagtgcataattgcgccaacaaaaagttcatgaatcattggaaatgattcatgccttaaggcgatttatttcaacacttttgccggcgcgattcatgaattgtgctggtataggtaatttttacccggtataattgtgtgctggcaaaactgcccactaaaaattgttggcattggttgagccacttaatgccgacaaattttgccagcacattcggccaaatatattggcaaaagttacatttcttgtagtgagatttctctctaatttcttcaatctcgtccagagacttagccaacaattggtgattgattggcttgttgatcatagttgagtctccggtgtgacggaggtgtgagctttacgggtaccacatgactgttgggttttatgccct

SEQ ID NO: 120745 - DNA, 936 bp, Cannabis sativa
  modified_base (41)..(54): a, c, t, g, unknown or other
  modified_base (773)..(778): a, c, t, g, unknown or other
gtgaaccatgcaatataaaatgtgatttttgatctttattnnnnnnnnnnnnnnattatattgaaatgggttttaattagagcacaaaatccaacatttgcatctttgggtctccctcaagacccacaaactgtagattcagatactcaggttccaatgacaaccagaatctcgatgaacactgctgatgtggtgaatcctatcaccacaataggtgccacgagtctagtctcctctaaatagagctatagtgaccttctatgtgttgcagcccttgacctaccaagtcctgcaacccttgtcctaccagatcctataggccttgtccggctaaaccctacacaccttggcagaccaaacctcccatgtagctttatgggtggctgagactacctggtaggactctatagttgctagactgatacatgcaccttggtagatccaagtggtaggcccatgcctccaagagtagacccaccattggcgcctccgactgaaggaagaatccttgggggtcacctcccaagaacaatcgggtttcactccctatactatgcacgagagacgagacgagactaggcttgggagaagaccttaagttgaccaaactcagggaagctgtaggccatgcatgcctatttgaagaaccacgtgctgctgaataacctgaaaaaattacaaaccgcccaatctattaatttggtggggtaaaaaaaaggtccaacctgcccaattaaactgaccaatccgattttggattttaattttttttnnnnnntttttagtttttattatatataaaataaattattaatcatataataatataaagttatagacttaattgttagttttaaagtcatatatattgtgttgtactttggtggaatgtgatatttttaatttatcttttttatttttattgattttgacttt

SEQ ID NO: 120746 - DNA, 2431 bp, Cannabis sativa
ttttacaccaaatactgaaatttctcactttttctactgtgaggtggaatttttttcaaaaatactgtgtatgttttataccgtgtaatgtgttaagttttcacggttgttccacggttgttttttattagttcaactgttgttttaattgttctgttttgttgttttatattttacaaaaagacagtatttttataaaaattctgtgtgatagtaaaattgtaaacttttgtacaaaatccaatacttttataaaaaacctaaagaatatttacaaaaaagaattatttttcttttgtttaaaattaattaatatttttatttaataaaatatatgacataatcaataacacggggcgtacaaattattttttcttttattcaacaaaagtagaaataagtaaaatataacatttgatgtttaattattaagaaaataattaatatataagtatataaaatattaagtatttatacaacctttttatattaattagattagtgttacgtgcacatatacatatcattagttacataattgttattgtgatacatgatatttaatttaaagttctaaaaaatataataataatttaaaaaaaattaaataaaaaatactatttaaaattttaagaaaaataaataaaacaacatgttaggaaaatatattaagagcaataataataaagttttgaaaattaaagtttttgaaaattaaatgaaaatatttttttaaagttttaaaaatttatgaaaacaagtacctaaaatttttagaaaagtaaatttaaggaaaatataatatgtatctctgtttataattaaaaattgatatagataatctttataatcttttatcgtgaaagcaatagataataattaaatatctatatttaacattctattctttttgaaacttcataataattgacccaaatcatttcttgtatagaacttgaaatataaatcaatattattgtaaaagtaaatacaaatacaataaatatatagtatggttagaggattgggagtaataagtatggtaatcactcattttcatttgtttactttatttaagggtaggaatactctagaagaaaagaatgggagaagttctcttcatgatgacgtataagaatatgatttttgttttctctttgaatatagtttattgtactagtatgtgctattagaaatattgttcttatttttaaagtagtgaggaggaaacgaatacaacatgatagattacgagtagttagatcttgttcattgtgtgagcttttctagactcttcgaggacttctcttctctctcaaacatgcaacagatgaacaaggcttcttcaccctcattttcgtgttctcaccttcgtccagattgtttccacacggtgaaaccattgctaagccccaaatcccacggtcatggtggctccgactcttcttctaacgagacccaaggcagctccactaatccaagccgctccagccgaatcacgctgaaacgatccaaccacccaagtcgcatcaccattaacaccggccacctccccagagctccgatccgtacatatattaatgaagctcttacaggtattgaattcctttttcaattttctcagttcactgtcaaatctattatgagaaataggctttaatcaagttgtttaggtacaaatttgggtatcccattaaattaccacctgaccaaactcttttccaaagattttggagtaataggaacttgttcaaatcaacatgcagtcgggatagtatcccttttgtcactatggttttgaatccttcattaattgctctctgtataagatgtgttttgcctagtattattcttcaagttattgtgcagcatttcagttccctcataaatgctatggatttgattgctacggacttgttctgtctcagtcattttggggttttcctatttaagagcagtatcgctctttgcccaagatccatagacttaactatttttagttctttttttctgaaaaggaaaaaactatcccttttcctggcgttttcaatattcccatttataggcaatacttctctctgtttcttctttcacttagttcatctctgcacacacacggtctgttgtaattttcacgtggttttcatggatgatttaaccgattccctatatgttgctctcaacctcacagaaactgaatgcaccattcaaaccctccatgaacccaacccatcaaataccactgactctgaaaacccctctgctcctatttatttggtgaccaaagtccacacggttaaatcctttaaccgtaagaatttcatggacacgatgaccaaaaactggaatcatatttctcggtgtccagttgttataacagaccgttccaatggtctgtttcttgttgagtttggttgtgatggagataggc

SEQ ID NO: 120747 - DNA, 1828 bp, Cannabis sativa
attattattattactagttacaaaatgttatgtggaattaataattaattgtgttattgttcaaattcaacttttcattattattagagaagagagttgagtatatattaatttaatgttgaaaaatcttaaatatataattaagaattaaatacaaaaaaaaaaaaaaagttggttctttgtatatagaaccctcttgtttagctaggttcatgactttacaagattctaaccaccaaataattaaaaggggtagtttggatatgcaataaatttcttttttctttttattagtaatactatatatacttttcatgaaataatacatgaaaaaaaatcactctttcccatccattattatataaatttctgattgaaacccactctagcttcttgaaaaagctcaagatgattaactttttgcccccacacgcaattatatatataatcttgaaaaaaatcaagaattgatcaagagtgtgcattattgaagctatagacatatatgtatttatttatataatatatcgctttacgatttgttgacagatcattaactgtttttgagtaatgtttgaaatagtttgctgacaaaccaagctataaatatatcttttgagaggaacactattcattatagtgactggtatcccttaataaaaaaaatgtaataataataatcactaattgtattattattattattattgagctgaattatggagatatggacacatagtatatatagtacgttgtgggttgtaatatcactataccagtcttattagtagtagtagtaatagtaataataatagggaaaagttaagaggttgaatacaagtgaatacagctatatatataatatatatgtgtgtgagtgtatatatgtcgtgttccccaagtgaattacttgctttttgttctgattcatttgcctttctatccacatcaaaggttccaaacttgactctctcatatgcactttgcgtcaggtttgactattaacccaccatcatcactatatacttactagctagtactctctcctatgctctacttacatatatgactttcaaacttgtatatataacttttctgaaacatatattgaataattctatagtagcaactccattctagtatatatagatctttatttgtttccctatataggaaaacgttttagtttattcttttttatgattgtggatatatgttgttagtctaaaatagataagatatacatgattatatatatataaaaaaatatacttaaaaaactataattgaaatagatagagatgtacaatggtggagtgtactataaattcttttcaaattatataatatatagagaaaaattaattatttttctaatattttgggtacatgtgtaagtttcaatctaatttatttcattttagaggattatgtataaatgtagtatagtgatctataattttctaaaaaatttaatatatataatttcacattgaacgggttgagtaaatattgttatatagtgagatgagggggcttccatctttgcttgttacaagggatcttttcatggtgttcatgttgttggagcatgtatatgttgttaggatttatgtaataaacattttgattataaataaaattaagttgagcaactaaaatataatgttgaataatttatatataaatataaaaaaaaattcttcgtacatgatattataatcttatattaaattataaaattatttatcaaaaaaaaaattataaattttttaattaatagttgcttgtaacgtactcgcttcaagcctctattgggtccttacac

SEQ ID NO: 120748 - DNA, 734 bp, Cannabis sativa
ccctgtgttgtataatggtacttcttatttttgaaacaaagcttttatatattagataaaaggatttcacattcattacaaaagatagcatttggaatagtagaaatctttaccataccagaaatatcattggcaaaagtctattttgtcaggttatgagccgcaaaattacaatttttagaaatgaaagaataatgacaattagtcaaaaatgtagagagatacttgcattaagtttttgatcacaatctcataatcactctccaccacaacaaaaggatgatgcattgagatcgccgtctccaaggctaacatgcaagtcgtcgcttccccgataagaggatcagagaagtaaagcttgtttgtcgccacccacaaaatcgactctgtatggtctctcgcaatcgccatagtgcacataattttccctccgactctgacatcgctgaactatcacaaattttattttgtgtaatgtggccaacaaatttcatattttgtaatgtggccatttatcttataatgtagcatgaccaaaatagtgtctgaagtatatttttggaagaaaataaaattaaaataaattttttcatttactttttttcatataacttacaactctaatttctatcttttcttctttttcttttgctgtttcattattgtagacgttaaaatctacaatgatcggaatgagcgttagtgggcaacgacaacctgcggaacaaagacaa

SEQ ID NO: 120749 - DNA, 2263 bp, Cannabis sativa
  modified_base (758)..(765): a, c, t, g, unknown or other
  modified_base (2151)..(2158): a, c, t, g, unknown or other
aactcaaagcttgctcaaacaataaaccagccattaaaacaagcaaaactcaacatttctaaccatatttaaactccagaaacacaattcaaacaacagcaataactacagtagcaaaaactcacaaggcatgcataaatccaaaacttaaaagctaagaaatgaaagaggaaagcattagaaacttacctagagcttggaatcactacaatattgcaagaaaccacagaattgaagaagcaaaacaagaaccctagctgccctagggatttcgagagagagagagagagttgagaaagagagagagagtttccttctttttttttaaaaaaaaaatcttgatttttaataaaatatgagtaaaatctatgatttttatctcatatattcagcatatattaacccattaaaaattagattatttaattaatctaaatccacaaaaagacaaaatcaatatagggtaaaaaaaaataaaaatgcccttgcccacactaaaaatcataaaaatcacttagggttattttgacacttgtaaaaatctcaactattcccgacattcccaatgtctaactatattgtccactatactaaaaattctaagatgtgattctaatagccaaacaccgcgttccaatgttgtcgggcactgaaaatgtaaaattatgaaattttatatatgacatataaaatgcattctgaattcaaataaatcatcataaacaattaattcaatattaataaataattttcataannnnnnnntaattatctgctaattctaaattaaagctaagcggtctttacacaaacccatttatatgggtacggagcgacacaaactggatgcagtgtggctcatggacaattgaaagcaggggcaccataacaagacttgagtaactcttagaacaatagagggggagaagtccggggtgaggagaagctttgaagaaatcaaagaaagagtacaacccaatgtacactgagtactctagtcttgtggatactccataaaatgtgtacaaggcaacatacaacatggttcattataggaagcctccgagaatgcctcaggggggaaaatttcagagagactaaagaagcattgtgaataccacatagatgtggagcatacaaaaaatgaatgtgacttcatgaaggatgagattgaaatgttaataagagcaggtgatttgggaaaaatgggtctggattcccatcatatatcctagatggagggtcattcatggatagatgattgttttcgaataacagggtattgtaaaccctccgcatggattaggtcaccctcaagctcccaaaacatatcctttgacactccttgcttcgccagctccaactgtagtggctttcatggctccaagaccaggggacctatatcccctagggctagtaccaccaccgtttgacggacacgtagcaacgatctcgggttgaccgcacctcgtaggaagcactagaattctcagaagagatatctaagagaattaggcaaagaagggaggacatgtgtggtggtgcaatcaccagcccaacgtccttagacattgaatctaccaatcactttcacaaaggaggatgccagacatgcacattttccctgtcatgaccccttggtcattgaagctcggatagccaatgatagaatttctagaatcctagtggattatggaagttctatgaacatattatccaaattttcctttctagagattggactcactgaagcagacttgtcaccttttcctatctagttatatggctttaacggggatgccatgacaccaatgggaaagatctcgttacttgtcacccttagaggagaaaaccatgccagcaccttcaagccattgcacatttttagtggtggattgccccacgacaaacaatgcaatactaggacgccttgtgttagtggatttcagagcaacaacttcaatgcgtcatttgtgtatgaaatttccctacaacaatggatgtgttgggatagttagaggtgaccaaaagaacgcaagggattgttacaatgtctctggccggacattattcatggtttatgagagggcacttattgctcatgggataggaactcaggaggaagctaaaattgttggaacttattttacnnnnnnnnagatttactaacatgtatgttttataaacaccctaaatatgaattctctaatacgatgaaattaaacacataagagtttaaagaaccttacattgatggcagcgg

SEQ ID NO: 120750 - DNA, 1710 bp, Cannabis sativa
gtgttggtgagcgagtccaggtttgatccaaacccaaacatgtgcaaaaactaaactcgaacccgcctgatgaaagtgttcgggttggactcgacccgcccacaagaaacgagttttccaacatagtcgggttctgcgagttaggtgaaacccgaccaaaatgttgagtcctaattcctactgtgtgtcatgatcataacctatataatttatgaagatcccactccccaatctccaaatcacatagacagtggccattgcctatataccactatataatttagtacgtacgtatacttttctctttacatgtttaatcacattatagtgatatatatgacagtactacactactactattagcttgtagagttaagaccttatttattatagctttttcaacgtttttaatttattaccatatatagttaaaccacagtagtactagaacaacataaagctggagctttaaaaaatcttttagcatgtccttatgaaaaccctaaatccattacagcttaaaatcaccaaaatctcatatgataagaaagattggtatttaataagctttgggtatgtgttggcatatcatattatcatgtgtgagatacttgagacatactcctcatttaataatataaatttatatttgattaataatttgttgccttataagtaattttttcattaatctgataagatgtgagtattgtcccattgagtcccatcatgctcatatatatgttaactaattatatccttttaagactccaaaagaccgtttaacaatccgccaaacaaaaaccatcatttgatattttaccaaatgatcagtccaattaacaaagtgggccaattactatacccaaacattatttgattcaatagggtatgatctcatttgattatatacataaaaatatttaaatatatgtttgatataaaagtagggccattattggcattgtttactattttccaaaggcaagtgcagtggacaaaattgttgttccttatagacaaaggcatcttgtttctgctatatatgttatttagacagaaaaaaagggcactcatggaatcttttcctttaacagtgaatatttttatcttatttttaagtagtatagctggtatgatcttaatgacttagtaaccaacttgcacatatatagaatattcttccatatataacttagagttataatgatatatattaatcatagtaccaaaattacagttattagttacgagtggaagcaatatatatatatggtttacttttttttattattattgttaattatacattgcattcacctatgagactattctatctctgttcatattattaatgatttatatagttttttttttttttaataaaaacccccaaaatacaccacctattctagaacactataagctctaatgggattggggactgaaatttatttattaagaactcagccaaaatcaaatctctaatacataaaaggtaatcaaaccaccatagcaatacaacaaaatagggtatttagctaaggtgtgagctacctccttaacagatctaaatagtttatagattttggaatttttataataatgtctaataatgataatagtgtaaactgtataaactgtatcacattgtatttttgtatttttttttttttatgaaaagactgctgattcataaaaaaaaaaaaa

SEQ ID NO: 120751 - DNA, 1494 bp, Cannabis sativa
  modified_base (1015)..(1016): a, c, t, g, unknown or other
  modified_base (1439)..(1440): a, c, t, g, unknown or other
gattggacaaattagcctgtctaatccaatccagtcctgcgtaccaaacgggccccttatttattcgctattctccatttaaaacattataatatgaagggattatttcacaaatacacacaaataatacaaaaattacaaaaatattgtgttacagaattttaaatatttttataattttttcattttatttatagaaaagacagtctttttatggtgtactttttttttaataaaatatcaacttcatttaattaagggcattcagaaaacaagatatcccttaaatcgggctagatatcttgctctaagatgcaaccacctggaataaatcgagagtaccttgcaacaacatggtatacttttattaatttgctgttgattttttgttatctgtatgttattttttattgttgttttaatgttatttttatgtaattttcttgctgttttcttgttgtttttattaaaactgtaaaaatatgaagaaaaaaaattctttaaatgtaaaaatataattttcttataaaaattggtgccttatataattatccctattaaaaatgtgaaatagaaatgattatgaagtagaattaaatttaaaatgaataaaataaaaaatatatatatattttttttatcttatattgtaattttattctttgcattttaaaataaaatattcattttaccgaaaggaaaatcatcacattctaatattttaatattttagatagaaaaatatttcctcaaaaaaaaaaaaaaaatagaaaaatatcatctaaaatgtacaaactttacactatttctcaaattttttggatttttaccatatttagtgtaattttctctagtatgatttctaattttcttttcaagaatactactttttgggagatgtcgtgtgcaatcaagagctgttttcaagttttaaaattgggatatcaaagacattgtattttatgctgaatatatatatatataaaattttgttaaatgtattagtcacaaaaannataatttgttgtgattaaatatattttttgtcacaatacttgttgtgactataactaaattagtgacaatttgtattcaaatacttgtgataactttttgttataattaaaagttatatctagtcacacaaaatttttattgtgactatttttttgagtgagattataacataaaaataaaataaaaacatcaaaaaattatattttctgtaaataaaatcttaaaaatcataaaagtatataaaaaataaaaacaaacacacacagtcttaaagcattatttatttatgccataaaaatgttaattctcaaaatattcctgtgtaatttttacaaataaataaataaattgccatacttctcaagaaaaaatccttaaaaatgttttaaacggtattgtaaaagaggaaattacactctatnncttttttatattgtcctcttttttttaaagtctattatttttacctctttcttt

SEQ ID NO: 120752 - DNA, 1054 bp, Cannabis sativa
tagtctatacccttatataaaagttaaaaagagtttattcataagtgtttacagtagttgtgcaaaatacgcatctttgagtgaaatttaaattagctgaaccttgataatagtcttttttgtaaatttctctttggtctgtaaactattatcctcttggagtgctgaatccaatacatcattgatataggtttaaaccctcatttctcctggatttgtatgtatagttgcatgtgagcatttctataagtatgttatactttgtttttcaacaagaatatgtatctacatcttaacctgtgttggtactgatttccgagtcctgtcagattcaagatctgtttctaaatactttactggccactgtcattgtactattcagtgttctgttttcctcaaaatgctttaacgaggttctctttgtgatattattttgaatttgaattaaactgttactttgcagcatttgttacaacactgataattggtcattgatgaccaaatattcaaaaaagtttatcaaggcaggagtcaagctacgacaaacctcttttgatgtgttgatggagtttgcttctaaaataggtcaccctgaacccccttttgctatgttatttctgatatatctacttaccatttctttagctatcttattttttttgttttgaagtttttcaactgtttccgtttgtaggagatgttgaatcactacggataattgagaaatcgagatctgagtctatgaagaatcatactctttcaaccgggttttcatgcgctaaggtaacttgcatgttcatagtgacatttaataattaactgttttgaattgtgaaatggagtgaaaggcacttccgaagaagtagtaaattatacataaaatagttgctttaaaagtttatacactcaaaaaaacagtttatacagtctatcaagtttaaagattatacaaagaaatagtgaaataataattctgatgtctgcccatgtgatatttgtgttttcaggggtgtcttttagaacacaagccggaggctgctgctaccatcattca

SEQ ID NO: 120753 - DNA, 1288 bp, Cannabis sativa
agaagtcagtttcgaggaagatataatgaggacaaagatgatgatgggaaagaagatgatgatggcaatgatgattgcggggatgatggatgatgacgatgatgatggcgctggagatgatcgtggataggatgtgtctgatgttgaaaaggttaaaactaatgaggcatgtgttgttgttgatgtttgtacaaaggttgatgaacgtgcgaaagatgcatctactgctcaagaaggcaccaaaaataatgataaaatgattgttgttttaggaattcttgcagatctcaatgaggttaaattttttagttgttttaacgttattttactgatattttgccatgctttgtgttttataaattgattatttttaagttgtttttgctttttttgtgcattgaagcaggatttaattttgaaaaatgatgatgattttgttgatgttggtgctagtatggattgtggtgttcaagttgttgagaagatggtatttgttttcaatagctatcttattgttgtttttgatttgttttaagattttatctttgttgttttgatattctttatatataatcagtttgacattagttattttattctagatggagtattcttccattgttgctggtgagactaccatgtcttttggtgttcaaggtgtggaggagaaggtatgttttttgatatagtgttttattgttgttttggcttttttttaaataaattttcattcatgttttttgtttccttgtacgtgtatcttgacattacttattttattatagcctcaatcttctggcaaaattactggtgactcttgccgcaatgatttgggtcaaaataatgtttgtgatattgttgttttcgaggagactccgatcatagttcctggaaagagggatagaaataaatgagctgtttcaaagtctctatttatggaactaggatttggtgatgctaatttagattcaagatctgaatctcctaataaatctgagtacaaaattatgaaatatgtttcgggattatgtccgttggatgataagattggtgaacctgttgacccatctttggaggctgaattcaatgtttggctatggcaggatctgagatctaagaaatcaacgtaattgtttaatttgtcgattagtttcttatcagtttttattatttttagatttattgtatctaattatattgtaaacccttattaaaatatctttttttttttaattttttttaattattaaaacataattacagttgtgtataataacatcgggttatt

SEQ ID NO: 120754 - DNA, 732 bp, Cannabis sativa
gcccgatttgggtgcctttagtttgtaaatattgtttgtgcaatacaatgtcctgatttatcaaaaaaaaaaaaaaaactaaattaatttgttaatttctagtatatatgtgctttgcaaacctgccaccagttttatgttcaaaggcttctttaaaaatgatgaaatttactaatggacaactttatatggagttttgtagctgttttaggtagttggttctattttgatctagggtttctggagtttccatggccgcatcttcagcttgaagatgcaccttcgattctcaggtcccttcaagaagtggttagagacttctggtgccggtaagctctctccgccttaaaacttgtcggagaagggaagctacgagcactatgccgaatcggcccaccacgatcgcctcttttgtggttggaagctctccgctatcgatgcatcacttgccttctccgtagagaactcaatctttcggctcagcaatttgggattttatgtttcttatcttttagtttttgttccattttttttttcaggttcttcaaattaggtttttattttttgaaatattttttagagattaatgtagtctgtaatggcattatacgatggtctagttaggtactcaaggaatgatatttagggtaaatagtggcataagtatccaaagttttgagtttgtaagcggcataaacccaatgattttctttagtggcataagtacccaat

SEQ ID NO: 120755 - DNA, 1312 bp, Cannabis sativa
ttccaagtcattggaatacatcaacaaatgttactatatatacacttcaacacttgtaatcttgtatagtatactaataatataatatgctatctgagtataataataatcacacttttaaaaaagctatatagaagttttcacaaatttatacatataattgtaattaaaactgttaatttgtgataagttctccctacattaattactagtatacatgttgttaaatgagatagtttctaacaagacattgcatgaatcactcgcatggcatagagagacgccccttgggtgggatgccttcttatggggagaaggattctcgagggcgagaaaagtagatatttggtatcataactaaaaaataattttttacttttaaaatataaaactattttttaagaacaaatatgtgtatttggctatgcgtagaaaataattttttaaaaaagaaagttagaaaaataatttgtggtccgggtctaggtcgagttcgagtcaaagggttggggtcggggttcgagtatgagttgggtttggggttgggaccaggtccaaatctggggcttgaggttgagttagatttagggttggagctgggaccgagactagggatcagatctaaggttgggtctcgactcgggttggggctgaggacggggtcaagttcatattggtgtctcaaaggattgacgtgttttttatacacagaaaaatagaaataaaatttgttttttgaaagcattaaccaaacgtgttgtgttttctacatgatcacgcttaccacactcatacaaaatcacaatgaaaaatattaagagacatcttaggtgtcaagcactacaaacttattataacatgcatccaaaataggaaatctaaaaagctcaaaattacaaggaaaatgaggaatcagaagtggggatgctacttgtagggtggctagggcactatagctcacggtgattattgaaatggtgaagtcttaggattaaatcgttgcaaccccgattgaagttttagggagcaaacaagatcccatcaataattgggggtgggcttctagaaatagtgttatgtgaacctcgaaagtaattggtcgaataaaaggaaggaatcgatggtctatttatactaaaaccctcgattttcacctattcaatctaacaattctgataatctattgaaaagagagaaatgcactaataatttaacgaactgggaatacaaaggaatgttagacttttatttgggcttacattaaattttattggttttattaaaacttgggttgattggatagttctttgct

SEQ ID NO: 120756 - DNA, 2387 bp, Cannabis sativa
gagccatgcctccggccactccacaaatgagcggtctacaattctctactactccaagatatactcagagcctagccttggctcccacgtcatcacactttagaacacccatgggtaatccctcatggatgaatggccaagttttgtctcaattcgcgcctgccaccagcctaacaggacctcctcagagctctcacagcaagaggtcctcaaagggtagcaaccggactgaggataagcaacaactgaggggatacacctctcagtatactcaatacacagagcttacagacacgcaggagcgggtatacttcgccacaaggaaaaatactcattatcggaagcctcctcccctgtataaggatagttcccaaagggatcccagcaagaggcgtgagtatcacaacgatattgaccacagtaccaatgaatgcaagaacttgaaagacgaaattgagaacctaatccgagtaggccatttatatgagtggattaagaatcgactaccccatctcaacccagatccagtaggaggcccgttacttcaaggagctctagggggtatacccagagaactagcaccctgtgtacccccggaggagcactccctcaaaaagtccatatatttccaccaagaccaaatgggagagtggccatgatctctggtgggccccatatcggaggaaccactagaaacgagctaaagcgttatgttggggccatgaaacacgatgaagtgtgggaagtcacccaactcaaagcgcaaaggccccggctcatggacctacccaataccttcacagaagaagacaccaaactggtgtgtttccctcaccatgaccctctggttatagagatttccattgccaataaaattatggcgagaatattagtagataatgggagctccagaaattgttgttcaaagaagccttcacggaaataggcctgacggacagggatctatcgcccagctgctcccagctcacatggttcaatgggacaacacttgtcccaatgggaaaagtaagactccatgtcaccctgtgcctggataccccacatagcactttcaaatattgcaccttcgtggtggtggattgcccaacagtgtacaacgccatccttggccggtcggccttggtcaatttcagagcaatcactttcattcggcacttatgcctcaaattccctactgaggtagtcggagtggggacagtacggggaaactagggagaggcaaggcaatgatacaatgtcgcaatgaacttgtcaatactggtagtgcgtggggtcgaaaacaactgtagaacctatggaggacactgaggaagtacaagtgtgcgacctcgttttcaccaagatcctccgtctaggaaaaaacctggagtcggaggaaagaagcaagattatcgaagcattaaaggcagccatagatgtttttgtgtggtgccaaggggatatgaccagcataagcccccacgtgattacccatgtcttaaatgttaatccagacatggcgccgatacagcaaaagaggcgtccacttgatctggtaaaagctgacaccttagaaaaaagaggtagataagctactgaccaatgacctgatctaggatgtgtactacccagaatggctagctaattcggtactggtacccaaaccaaatgggacatggcaggtgtgtatatacttcactgatcttaacaaggcctgtccgaaagattgcttccctttacctcggattggccagatggtggacgccacctcaagattcaagctactgtccttcatgggtgcctactccggatacaaccaaatgaagatgcatgttgcagatgaagagtacattagcttcaggactaacaagggggtatacagttacttggttatgcccttcagattaaaaaacgctggtgcaacttatcagagaatggtgaaccatatttttaaaggcctcttgggaacaaatatggacatttacatggacgacatgctagtcaaatccaagacatgcatggattatgaagacgaccttacggaatgctttgaagtggtctgaaggtatggagtgaagcttaatccgaagaagtgcacttttggcatcaagtcaagaaaatttatgggatttatcgtcagccaaagaggaatagaggcaaaccccaaaaaaattcaagctttactaaagatgccttgccccaagaagaacaaggatgtaacgccctaaataattaggcacgctacccaagttatttacaaaaccctaatcccctaaacgggatcgctaataaaaaaggtgcagaatttaaacttttgtattaaacgtaatgaaaataaaacttgtaataatttaaactttacaactgttgggatcccaaaaatattt

SEQ ID NO: 120757 - DNA, 2056 bp, Cannabis sativa
ctctctccctctctctctctctccgatttctgagtttcactgtttctctggttgatctgttgatgatgtgtttcatgttgtcatttcagcataggatgtgttgtgttatacactggccaagagaagtttcatcacagtacaactagtacattggagtatgttggaaatcaggctgattttacagttgggaaactaaggaatgtgtctgattattttgctgcagctaagcaactaggagtggatcaagtttttctgccttctaatgtacaatccgacattgaccaaatcgaaacaaagatcaattcttcggcgaccaaccttgcagacatcacaagaaaaaaatcagaagacataaaggatctcttagattctgtgtatgtgaaaacagattatgaagcttctatcagtacttatttctttttgcaaagttttacctcgtgttgacaactaaaccgatatgtttgtttactcattcaggagattggcgctcattgttgtcgctgcaatcatgctaatcttgacatttttaggactctgtaagaaccttttgatttgatatcattgagtttcatcttactattaacattatgacactattttctcatttatagtatttttgtgtttttgttttttcctccagtgttttcaatttttgggatgcaacttctggtgtacatgtgcgattcccattactcttacattcctttctatattcacctccattctcatggtattgattgattcacactaccatatattgcagccttgtgattactgggtggatactagttactggaaccttcattctgtgtggaacattcctagtcctccacaagtaagtttttttttttggaaaatttaacataagaaattttgatttaattatcatattttatctcctttcatgacaaataacataataaatatggttgcttgcaatgcatactagtgtggctgcagatacatgtgttgctatgaatgaatgggcagtgaaccccacagctcacactgccttagatgaaatcttgccctgtgtggacaaggcaacagctcaagaaacatcactgaaaagcaaagaagtcacttgtcaactcgtcgatttgatcaacgaggtcctcaccaatgtgtcgaacataaacttcgcgccaaactttgttcccctttacttcaaccagtctggtccattggtgccactcctctgcaaccccttccatcatgacctctctgatcgaacttgtaccgctggtgaagtggacttgaataacgctactcaggtaaaacctaaaaccaagcacaacttaatgagttgtctgtttggtagggaggaatgaagccattggaataggaatgggaatgaaatttaaaacgagtcttaactaacataaataatcatgaatataaggctaaactagtacagctaacataacaattttccttttttaaggtgtgggggagctatgtttgccaagtttcagggagcgggacatgcacaacgacaggtcgtttgaccccaacgttctacgatcaaatgagtagtggaataagcatgagtattgccttgaacagttacggtcctttccttactgatctacaagattgcacctttgtgagagagactttcaacgacatatattctgatcactgcccatctctacgacgatacaccaaatggatatacatcggtttggtcatggtttctactgcagttatgttgtccctagtcttctgggtcatctacggtagagaacgccgtcagcgtctttatgccaccaccacacatgatcattcaatgcctcaccctcatgtggaaatagaaaaggattgattgattattcaccctcttttttcttaatttctggactcattctttgcgctcatgttttaattatataattaaggaattaatctgtgttttctcacgttaatatttatgtatcataaaatgtcatctttaatttgtactattgtttagattgtattagttgaatcattgatatatatatctattttatataaagtgtgcctatataactaaaattcttggtttatgagaaat

SEQ ID NO: 120758 - DNA, 1303 bp, Cannabis sativa
  modified_base (992)..(998): a, c, t, g, unknown or other
attaacaattcaaaaccgcaaatcccaccacaccacgtagtttaggtttagaaaaaattcaaaacgcgaccgcaccgtaaaaattttcaaactacattttttgtgtggtgcaggcggtttgatgaacacccctaatttgaacttttcgattaaatttttttaaaatttttctaaattttacaggatgtcctaagtaattataaaacagacaacaataaaaaaattggactaatttttttcgcaaataccgaaacaaatagggatacatctatggactcacattgtaaatttttttaaaattgatttatcatttatttgttttttcaaaatatttaattgttaaaatatataaattagtatttttacaatgcacgcctatttagaagaattttttagtctattctttttatagtcgtgtacattaaagttatttaagaaagttaaagctatttaagacatcctataaaattttgagaaattcaaaataatttacaatataagttcaaatagtctatttcatacgtgtataaaataaaagagatatatgcaataaattgtttgaaatctatttctgatgtgttaaattttcctaaatttcaaaattttttataggttattttaaatttctacaacttaaaagattataaaaaaaagttagattgaaaaattgttgtaaatgccaaaactgcatcaaaaaaaaggtgcattataaattttttaaaaaattgaagaattaattgtgaaaattgaaaagagaaaagaaaaaaaaaagtacttttatgtacgaaaggcaatatccatcgttaatttaagtggcatttggtaatacttttattttaaaaatttttaatcacaaaaattaaagaaaaatatttgttttgaaaagtttgtttttgaaaaataaaaaagtgttctataactacttttatttttcatttttaaaaacaaaaaataaaagtatgttctgtaaattttattttaatttttatttnnnnnnnttatttaagtcgggtctagatccgaagctgaaatcaaggccgaatttgggatcggggctaggatctggattctaatatcttagttgagtttatagtctaaaatattaattaaaaaaaaataaagctatttaaaataaatttgaaagtgattaattatttttttgttttttttattaaattttcatcaaaattttgattcttaattaaaaaatacggtatatagcataactttagaaaatatttttacttttttaattttaaaaacaaaaaccttttttttttaaaaaaaaggaattattacatga

SEQ ID NO: 120759 - DNA, 700 bp, Cannabis sativa
gccacacatcggggaaatcactccttgcacagtaccgttaagaagaagccccattctcttgacttcaatacatttcttcacccaacttatatatcttttgtcaaactttaggcttccaaggacttccccaataaatttccacctcattttatcatacgctttctccatgtctaatttaatcatcatgtatccatttcccccccgtttctttcccattgaatggactatctcctttgcaacaacagtattttctgctattagtcgtcccttaacgaaggctgtttgggctggggagatgatacagggtaagatgttccttaacctaactgctaagacttttgagatgcagttataggcgacattgcacagagcaattggcctatagtcattaactccgcttgggcactctttctttggtattagcacgatgttggtgttgtttatacactggggaagttcagtactgctgaagaagtggttgaccatatctaaaacatctcttttgactgttgcccaatgttgcatatagaaccccgtggacattccatcaggtccagaggctctttcttgtcccatagagcggatacacctttcaatttccaattctgttgggaaagctttcagatgctcattgtctagagtcgaaatactgcatgttaggttttatgccctaaataaaactctttacaatctgattagt

SEQ ID NO: 120760 - DNA, 1207 bp, Cannabis sativa
agagagagagagagagctgagattggggagttgtattgagcaacattgtcaattatgttggcttgggttagtgagttaatgagtattgaaggattacaccatgaatgacttattgtgattattttcttgtagctcctgagactgatatttttaattctcattatcaataaagattggtggcaatactttcaaactgaagtatgaccaagttcacattgaacataggatcggaactagtataattctcatgtgttgttgtgtctggaagctatctagatttatttgtgtttatctttctggtttataatatgtgtttgttggtttttaattcttgatttgtttgttttaatttaacttttatttgtttaagtgtgatcttgaacttagaattacagagattaattcctatatattaaagctaaatttcctacaaagtgatttatttttatctctaatctaattaaattgaaccattttttttcttttttctaggaatggaaaaaatatgtatgcgaagtttcagtaattgaaggtatttgcactagtgtgggtcgtttgaccccaatttactatgatcagttaatggcaattgtaaatgtgagctctgtgttatacaattatgggcctttccttgtggagttgggagactgtacttttgtacggaaaaccttcatgaatattagtttaaaccattgttccggactgagagacaacagtagattgattgttattgggctagttttggcttctgctgcagttatgctttgtttgttcttatgggttttcttcaccaaagaaagcaaacatggaggttatgataaacagactcaacaagatagtttctctgtagacagaaaaatataacctagctagtattgatcgtgtataactttttaatagttaatcatgttattgtagtaaaagtaattatgtactcatactgatactagtacatgaacatcgatccttttactaaaaagttgatcaaacaattattgattgtttatttatttatttatttattttgagaacacgtgaaaaactagtgaactccaatagacactttgacaggaccaagactaggacaaaatgattttattaagaggaaattacgcagaatatggcattttttccttaaatttcataaatatggaaaaattagagatttacttaacttatggcttttttacaatttaagttagttgta

SEQ ID NO: 120761 - DNA, 821 bp, Cannabis sativa
cgggacaaaattccggtccctatatatatatatatttttgaaagaaattagtcatgctatatgaaacacaattggtaagtgtaaacagaaaataacgttgaatgaatgatataaaagactaggttaggtccaactccaataaatgagctctgagtcagccaactatcattttatgtgtaaatagccttcacaactatcattttttttttttctatttcaaatcttaattgtgctgttatcgtggatagctctacttttctttttacaaagaaactatgtgaaatttgaagttatcaaatacgtgagaaaaattttcttacttaaccaagtgaaaaggatgatatttgagtaagaatcataaatcaatcttttattttattatttatgccacgaattttcgctaagcataaatattgcaccttctataaaattcaaatttcaaaatccagctctcggcagaatagaacattggcaggaaacaatttgatttgagagttctccttaccaaaaaaaatatatccataaaaaaaaaacctcacatgttcatatacatattgagtatgcctctggaacaaataaaattaaaaataaaaaatgcatttcatataagtgacaaaaccagtactcaaaactattactaagagaaatactgaataggtaagtgttagaatttgaggataaaatgaatgaggttctattcctggagtagctctttcatcttataaatcacaatttatttccacacattagcaatgtgggactaaatatcgagaaacttataggtgtacgggaaatttgtggattttaaaacaggtcaaaga

SEQ ID NO: 120762 - DNA, 1506 bp, Cannabis sativa
tacccataacataattggtcacttaattttgtatcacactttataatagcatatacattatacatatgtgcccacataggatttttaatccaacattattcaatcatcaataatggagaaacacattggagaatacaaagtttacaactcatcaacaatggtattttacaccttacaaatcaactcacttgagagagatatgtgatcacacagattatctataacaatcatcttcactcattacaaacgtaattgtcaactaaatttctctctatatcgtcacgtaaagaagtagtgcacaaagcctttattaacctcaaaaattagctccactaactctcgagattagttgtctaatgaccaaaagattaatgagggggcattcgattagcctactcgctcgacacaattacaaaaaccagttttttcgtcgattttaacgtcattaaaattacaaaattgacgcaaaaaattaatgggcaaaatttgcgtcgattgagaatagatgttgagtttgtgtcaattttgccactaacttgtgtcggttttgtagtgacgctaacttgtgtcagtgcacaaccgacgcaaaaaatgaatttatgaaaaaaaaaaataaaaaaataaaaccaattataggcttcagcccaatacaatgaggtctgggttttgatttgtgtttatttttgtttttgattgtgcttaaatttggtttgtatgggcttagatttaaaattttttagtgtgtctatttagtgtgtttgttataaatcgatgggataagtgtaaatatcaatttttataattgtttgcgagtgttgaaaactgacaaaaaaaatttgaaacagaaattgataactgacacaaatacagacattttttgcgactacagtatacacgtcgattggggaaaccgatgacaaaatttttaatgtcaattaaaaactgacgggaaatgtgctttttgtagtagtgcgacatgaattttctcaatgttaccatcaatttttataggctcgagatacgtccaagcaaatcctaggccaaccccataagttgtgtttatatattgcgagtcaggggcttgcatgcgagcccatgtgggggctagcacatgggcttgcatacgagccatgagtgaatgtgtgtgtgtgttcgtgtgtccatgtgcgtatgtaagaattgggggctcgcatgtaagcccatgtgagggcttgcatgcgagtcgtgtgtgagttgtgtgtgtgtgtcttggtgtatgtttatgcgtggatgtgtgcgagttgggggattgcatgcgaatcatctgcgcgttgagtgtgtgcgctcatgtgtgtttgtgcctgggtgtgtgcttgtcaagggctcgcatacgagcccatgtggggcctcgcatgcgagtcatgagtgctttgagtttgtgcattcgtgtaggaatgtcaatggggcgggtcggatctgatctgactatgatccgacctgatccagatcatgtacggatctgccccg

SEQ ID NO: 120763 - DNA, 1195 bp, Cannabis sativa
gttttagataaaattgtcacatattttcaattttcatatgtattcaattagggaaaaaattatcctccaattaatgcatagatattcaaatttccctttatatatttaatcagttgtataataaaagcttttatatttacaaaacatgtacacgatgaacatatagaagattaaatatcattatataatatataataagatcgataaataagggaagtattgttagatactgttagattaactgtggtgcaagttactaacggatgaaaattctgtctcatatccctatcccaactactgtctcaaccatttatattttgacataactcaattaaaatgacacatgtgcatttaacaaactgtacaaattcacaccaccttagtaccaatgttagtaaaatttgtttctatatattgctgtgtatctatattatattatattatattatatatattaacctttaattttagtctctatttggttatgtagaaacagagcctgtgaacacttctcaatttgtttctatattttgctgtctctatattatattatattatattatattatattatatattatttgttttaggttaattgaatttatattaatttttagattaatttaaaatatataaatattaatatattttttatattattattattattttttcattgttatgtttaatgttgtgattcaattttaatatttttaaattttatatttgtttttgctgaaattttatattcatttcctcaaatttttaaaactttcattattgttttttttaaaaaaaaaataaaattaaaaaattaataaggggtttcttttaatttataaaattttcaaaacacacctaacaaaaataaaaactaaaaatataaaaagaaaatataaattttgtaaagataaaaataaaaaatataacttttataaggacaattaataaacaaaaatgtaaatcttataaggaaaaacatgtaacaacataaataaaaaaatattatttgtatggagtcaaaaatagttaaaatttacaaaaaattatattatcaaaagttgaggtgatagttggttttcaatgatattagtttttgcttttaaaaaataataataataagactaattaggatttttgttccttgaattttgacatgtattaaattatgccccctaaacttttaaggtcgttaa

SEQ ID NO: 120764 - DNA, 564 bp, Cannabis sativa
gggcagatggggcaggatgactgaccgggatttgattattcaccaccactgtacacgtgtggtaaagtccatgaaccaacgatgcacctttgattgtgagttaacgccacgtggtgcagtaacggacaaaaaagttaacgctctctgacacagctgattatactgtttagcttcttctgaaactttcttttaaatcataacgtgacgttacgtctgttagatggtatgacttcttcagtctacccataattggtatcaatagcttgggcggcaactttaaccctttctctttttattttactttactaaattagtaataaaaatggttctatttttttacatcaatttttaccgctacaaacaatatctcaaattcaagtaaatataaatatatattttttttttacccaaactaagacatcgtagtgatttgactattttgggtaaaaaatgatgttataaatatttggctaattagtatttttgtctcctgaactttgacatatactaaattatgattctgaacttttaaggccattgaaaatgcccctgaactattgagat

SEQ ID NO: 120765 - DNA, 603 bp, Cannabis sativa
caaagattcctaatgcaacaaagggaacaaagaaccaaagcaaggcatgagctcttctcccatggaaaatatgcaagaaggttcaatgatgatttctcacaaagggatgttctaaatgttaagaaatgtgatctcaaagcccttgagtatgtcaatttcaattatctttttgaatgtatgggatgggaaaccttgttaaaaaatcaaaccaatatttatccaaggctagttagagtttttgatgcttgcattaaggttaattacaatccatattgtgttaagggaatcctcataggggtagcatttgagttaaccatagactcgcttaatgatctccttaatgcacccaaagaaggcctcttgcttcaccataaactttgccttaaaaatgataccaccttcaactataacattttcaacaatcatgtgtgtaggtgacaactttaggttaaaaccaaaaacaaacctacctcacccttcaagacaaaatactccatgcttttatatgctttaaccttgttcctaggaaaggccatcaagatgaaataaggtggcgtttggttggaggtaatgaaatggaatagaatgaaaaggaaacaattt

SEQ ID NO: 120766 - DNA, 3765 bp, Cannabis sativa
  modified_base (3683)..(3694): a, c, t, g, unknown or other
agtaatttgaccaacaataattgcgaaccaacacatagagggctaatcactagaattaattatataaataggcaccgcagttaaactcattaaatataattctataattactaagcattcaattctatatttatagtagagtaatcatggaattaataaagaattaataaacaatgaataaacaatgattaaacaatgattatttggttgatgagattcaataaataatcaagtttattggaccttagaattataaatttatggtccccgaattgccatcttaaaatactatcaagggtaaggataaagagttgtataaagttgatcagaaaaatatattttaaattagaaaaatattaattatttattttataataagtaaataatttttttaaattaattaaatagggaaaagataaaaattatcaagacaaaatttgtggagataagattttttaagacaaaagttgtctggacaaaagaaaccaacattgtcataaataacaagttacgcgcttagcctatgtcctatccatatagagtttgtatttttgagttaattaatttaattcggtaaatatctaatttgaaaaagtggttatagatatttcaaggttattgagatattctctcaagtagtttagagattccctcataaatatcagtaacaaaattcagttatagatatttatttattcaaacaattaaatatgatttatttaaatagacttaactactataaaaataaacttgaattgagaaattagaacattactcttcttgaacataaatttttgaaattgtagagagaaaaaggaaattgatctgttttccccgactttccgatctggtttctaaacatcttgttcactaacctttaataggtagccccaacattcttcatattgaacaacattactttatagcagtgtagaccaaaatttattgggaagctcgtatgttcttggtcaggtggaggcattctgatttggttgtaccctgaataggcatccataaagcttaggatttcatgcccggctgttgcatccactaattgatcaattattggaagtggaaaacagtccttagggcaggccttattaaggttggtaaagtcgatacatactcaccattttttatttggcttgggtactagtatgggtacggggttagccacccaagccggtagaaagcttcaatgatgaacttgtttgcgtgcaacctttctacctctttttttagtgcttgtgtacattctttttctagcagtcttctcttttgctagatgggatggaagtctagatcaatgttcacggcgtgagacatcacagtagggtcaataccgaccatattctcatgtgaccagacaaaaatgtcaaggtttgctcttaaaatttttattaaggctaattttattttgagcataaaacctttactgattttgagcttcttggtcgggatagctggatcgatttccactttttctaattcttctattgccatacatttgtatttgttttcccaagtaggggatccatgatttcgtcctcgccttgggcagattcctattgggcaatgctcttccccttgtctaaactctggttggaggtattttcctttttgaccttagataaatcaaggttttagcattctcgtgtgatcctttgatttctccttaaatagcctactccacttattgttttgttgggaacttaacgtatagatggaacactgatgtgatagcttttaagtcatatagggctggtcggcctaacatgacattaaaagttgacgagacatcaatcaccaagaattgtgccacgcagttatgctcctcggagcctgtccaactgtaagtggtaggcgaatttgtccaagtggttctacactctggccgaagaacccgtagacaagttgagtatttaacttggagccccatcttctcataggttgtcttgaatagaatattttaggaagctccattgtccaccatagtccgttttaccatcttgttcgcaatatgtacctcaacgatcaaaggatcattaattggtaagataacattgctagcatatgcttcaatgaatgttattgttggttcccctacaagtggtattctttcctttcttccatggccagatttgtgtaattttgttcatgctgcaaggcttgagcatacttttttctatctttccccgagtctccagcgaggtgcgggcccccaatgattacctgtagatgcacgtccagtggtggaggcatcaattggttattatctgcctgggtggcccttttttcttggtcagccttgacatatttttgtaagtgcgggttgttttatctaattaaaaatttaatctctcgctttaagttgttacattcattcgtgtcatggtcgtagtctacatgaaaacgacagaacttagctgtatctcttttacccatgtcatttttcatgggcaagggtttcttgtgcggaaccatagactcaatggttgcatagattgtttctatatcatctgttaggactataaatgtaataaatttagaatcattctctctagaatgctgtttggtgttgccagtgaacttgcctttctttcctttaccgtgtctattgctgttgttagacctctttccatttggattcatactgctaagacactgtgaattttgggtggatgcaccgaccgtagtggtgtgttttttattcttcttttgtcctactgtatccacacattgtactgctccgggcttaatgaatccatttactcgatccaaaaatttagccatctatcccatagttaatcttttgatatctttctataattctcctagaggctcaatgcccccagtatggctgctaatcttctctcttgagttagccctttaacttttgttgcttcagtcatgaacctcctaatattggcccttaaaggttctccgggcatttgcttcacttttactaggttttctaagtgcgagggaagctgacaggaggaagaaaatagtgtatggaatttagaggagaaagaaatccacgaattaaattttcctggaggtaatttgaaataccaattaatgggcagcctctacgagtggctggacaaattttgcaccgtacattgcctcttaccccctaaaggtcatctacatttcaaagtacttcaaatgggataaacgatcttcttttcctgtgtacattttcaatgtaggtattttgaacttttgaggtaggtcaaaagcatcaattttaggtgagaagggtgatcctcgtgcccggtcgtgtttgagatctgtgtgttttgggccggtcaggcctagtaccatgcttttaagttgatctatttgtgcttgcgaaagtggatgaatttggctagcatggtgaccgactggtgtcacattgagatctctttgaactagatcttaggcgtagtaatttggctgaaaagttggttgaatatttttcccatccaatccccttttacaatttagattatttctaaggtcatgcacaatgcctaattgatcgaacaccgacgtgccaagtggtcttggtgttggactttcttggccaagaggttggcctgatgcctctatatgagtatagttgtcggaatgactacctcctctcaaggggcattcaggaaagatctgaccatcttgttggatattattttacnnnnnnnnnnnntctactcacaagtatgtttattagcatcctaaatatgaactttctaaaacgatgaaattaaacacatataa

SEQ ID NO: 120767 - DNA, 1208 bp, Cannabis sativa
tagagtgcaaataagtgttaccagtttgggagattggtaaggcagctccattgccaacaaacaattgatctggcccttcttgttcagtcggtgtcatgatgttattgctgtgaggagtgcaatgattggtagctcctgaatcgggataccagttatcatcttgatcctgagttgtatgagcaatattagcctgcggatgagaagaatcagtagctggaaaaacaccagtgaaacttttatcaaatctatagaaacaatcaatgacagtgtgtcccattcgatgacacagttggcattgaagtttgtttgatgaggcagggaatcgaaggcctcttccacgagtcatagcaggggcctgagtattggcagtagtcccacgagagaaatgaccacgaaaattgcctctgttgtgagaaaaattttgattgttggagctgctaggccaatattgacccctagagtaggtaggagacctgtagttgcgactggtttgtgcaaaataagcttccatgtaaggatcttggtctgcagtagccaaatttgcactaggttcaacttcttgatcctccttctcaattcgagattcggatgcaagaaggagagcttcaatttccccaactgtatagccttcgatccgagtattggttgagatgataaaagtatcatattcatttggtaagcccttgaagatggctgctatatggtcacgatcagacaaaatttccccaaccgaagctaaaagatcaacatgctgcttcactttgaggaggtaatcgttgagattcagagttcctttctttagcttttgaagtttggttctgaactcaaggattttagaggagaccttcaaggtgaagtgctgttcgagagctttccagatctgttttgcagagttgcagcccaccattcgagttaatagactctcggacatagatgatagaagccaagacacaagaagctgatcttgaacttcccaatttaggtattcaggattgaagttcgaagtcgcccgatcagattcgctcagaaattgcatcggaggaggatcttcaatgaatttctgcagtctgtttccacgaattgcagcaagaatctgctgtttccacagcagatagttgtgatcgttgagcttgatcgaaatcgtgtggttgaagtgaactgtagtgtcttcttgatccctggtgcgatttcgatgattcgaagtggga

SEQ ID NO: 120768 - DNA, 1494 bp, Cannabis sativa
acgaaattacttttaggtagagtccaatacccaatttctatgtgaaaatataattttaaataattagggagtagtcatagtatttttaattatataaaattatatatcaattaaaaatttaccttactagacataacttataattatttatataggtataataactttacctcacacgaattttattatatttatataattaattagaataatatattaaattaaattatcttaattcatttcacaaggaattatggggatttattttaatagtgttatcacaaatttaattaagatagattacaaaccatctatttcctaaattaaatgtttgattaaatcaatcataaagttcatataattttattagatttaaaatttatcccacatgcaattttagatttagtaaaatttttatcttcatcatgtttttacattggtaaaatatgaattcattaaagtctcattttttttaacatctaaatttgtaattctattcttacagcgatttcataaagtgggagcaatctaatcatctatgcatcatgtttagaattcctatgagaatgcgtggttcagtgaagccacttgaaaaggtgaaagattttatcaaagtgatggatgagcagttcgatacctttgataaatctttattcaacaacctcatctaagagttctcatccaccaaactcactgggtgtcagaggagttcgagaatacatctcaaagatgagggatatcactgctcatttgaagaagctcaatgttatcactcctgatactttcttggtttattacattaatctttacaattttcctccataatatgggcctttcaaaattttctacaatacacataaaaaaaaattagagtatcaatggattgatgaccatgtgtgctcaagaggaagcaaggctcttacaagagtaaggagaaagtgctcacatggtcactcaaggaaagaaacgaaaaccattcaagaagaataaaaaaaaaaggcaatgactccacaagctatcataaagaaggattctatcaaatgtttcctttgtaaacatgtaaacaaaggggatatgcaaaaaagaaatgcagccagttcaagaacgacttggacgagttaactcgatcaaatcgataaaataattgaatgggttgaactgctttaatttttaattaaacggattataattaaatatttgtaacctaatagtcaaaagattgataaaaataaactataactcgactaaattaacctgcaataccaccttacaaaaaagaaaaatgcaatacctatgaccattactaaaaaccattatgagacacattattatagatatcttaatttcttattcttattaatttaaagaaattaaccaccacaacacaacaaaataaatgaaaattcctttctaaaagaaagaataaatgaaaaaagaaatgttaaaaaatattattagtgtctagtattcttttacgtgttaatattactatta

SEQ ID NO: 120769 - DNA, 2485 bp, Cannabis sativa
  modified_base (2427)..(2438): a, c, t, g, unknown or other
taaaaaagaaaagtctacctattagtaacctgctattacaggttaaaaaaaatataaccatatggttacaataaaaatgtaaccattaccctaaaatatatatatatatataaatatacttgttaataaaatatatgtactaaaacattaacaatattaaaaaaaatatgacacacattcacaaaagagcataagggtaaaaagaaaaaaaattaaagtgcaacatttttgtgttaatagcattactaaatgatatttattaactctcaacattatcatattttgattggtacatagtataattaagtagtgagtttcatatagcatcatatgacaataccatagccgagcacaatgacggaactagaggatcagagagtggcatcaaacttgtctcaagccaattagaggtcttggacagataaaatataattaaactttttttatatgaaaaaaaattattttatatatactggtaaaaattttaaatatagtattttaaaaattatcatacctgaaattcgactatgcatcagaaattgacatgtgtcctactgaaggaatgtgactcaaatctgataatataatcatggcatatcattaaattcgatctaaataactcgtcccaattcgatataagtttgatagataatgttcaaacttgttggatgcttagtcttatgcgagacaagaataataactattaaattggtattgacgagatgtatatttgcctttggataaactcagttagaagaggataccctcctgcacgagcagagtaaatgtagcaacacttaatcacctcgcgatacacatagtatggagattacctcgcattattaataccaataaaggaatatgacgagatgaattactcttcaacacttagcgttttttcctgacaagaagaaaaactcacatctgacgagatacaacattccaagtcagcaataaccgtctagaggatgaaaataaagagtgattgggtagttgtcagatattatcccatgtgtcattaattgaaacgtggagattattcacattttatgaatagttataattgaagcaatcccaaagagaataattgtcaacttatgtgcctataaataggggcagaatctatgagaaaagggacgataaatttgagagagaaaatatccttatttaaatactgatattgtattttgtactcgaaaaatatccctaataataaggactcgtggagtaagtagattttagctacaaaaccacgtaaaatatctagtttttattaattatatatttatttttgtagtatatttattgcaaaagggctattaatttggttagcgaaaatctacgttaacaatttgatgctttcattgagagccttggtgataaaaactctgaaaaaaccttccttataaacaaaaccaactcatattaaatggttgataacaatcaacacgacggtaatcgtcttgaagaaataactcatcgtcctggcaaagaacctatgggatctcataaaaccaacacatctgaaataccacattcagggagaaacgatggtaacttcaatgttgatggtgatcaaatcccagaaagaagaaatgaagatgcctatgaccctaccagatacgtaccactggtagaattagagaacatgaaacttcgacaacgtttggctgagtcgaaccaacaaaatgctaagttggaatgagaaactgctgttgccaaaactgcacaaggaacagttcttcaaaacaaacctgatcatactataaggagaccacgaggaagacctcgaggatccaggaccaggaggcaggaaacaaaccaagggaatctcccaaatacccaggaggaataacctgggaatacaagggatgtcccaatggacataacaaatcaaccaaatcctaataatgcaaggaatcaagaacatcgacgagatgttccacaaacttcccatggatttgctaactaagggaataaacgaactgacatgccagaagcatctcgcatgaatgaagaggtgaggcaacctcgactagggaaccagagaattcctcacaataatgaaagaagccctagaaatcaaccaaggtcaagtggacttcatccaagacatcttcaacgtccttctcgcgcatatagagaaaatatacacatgtacttaagtagaggacgtgtatttaatctcttccaaagaagaaggctggtgcaacatgaagcaagctcaagcacgggacaatcacgatctcgtgggcatagtcggtcgagtagacaaacgcgagatgggagtagatctcagcgttactatgatgatcaggaaagcatgagcaatttgcgaagttatcaatctaaaagttactcagatacaagatctgtaagtaattatgagcaaagtgttggaatttattttttaccaggatcttagannnnnnnnnnnntatgtttattaacaccctaaataagaactttctaaaacgataaatta

SEQ ID NO: 120770 - DNA, 1167 bp, Cannabis sativa
gcttaggtaaaggtcgataaaaatatcatttaggctcaactataccataaatttttttattccaatcaagtcactccattgaactcaaatatcaccccattccccttttcttttacaaataaataagagaatttttatgattaacactacaacaacaaaatttttgtatttatttatttgaaaaactaaaatttagaaactttgcctttttcactcttccaccccacccccttttttgtgtgtagttgcaactcaataaacttttctttaatatctctcatagatttttctctttatttctcacatatcacaacccaaatttctcaattacaatttctcccaaatttattctaagcttacatcatagctaaggataattgaagataataataggattgtttctagctcaaaatatttgtaaaaacaagaataacaagtcaatgcgcaataaatggaaactaggaataattatgaaaaggtgagcttgaaagacacaaacattttaaatattgcttaaataatttttcaaagcacatgtcatcaagaattttgcctcaaagatcaaataatataagttctatccaattaaacttatcatacctctaaccctagtcaagcatgtagaacaaattccaattattcacatgtacatgtcatatcatgctctgtttgagtgcaaaagagcaaaaaaggcttggcgatcttctagaattcatataactcacctcattggcaataatgattcttgtaagtcctttttattctacatatcagatattttaacaaagaaagaattagagaaagttgcttgtatcatatgaagtatttagactgaacgaaacaatgaatatcatggtaagcaaccaaagccaactgatgtgttgtttcaatatgctctgaattatgttattaaatatcataatgcacattacaaaatcgatattggaggccaaaaaaacattgtagataactctactccatgttctactacactacaatggttgaatctaccttctggccgactgaagcttcacactgatgcatcagtgaatacaatggaatgtaaatctggttttggagctattcttcgcaatttaaatagtgaacttgttgggttttgtaccctaaataaaactcatttcaatataatcagattaactaattaat

SEQ ID NO: 120771 - DNA, 637 bp, Cannabis sativa
  modified_base (607)..(611): a, c, t, g, unknown or other
tgcccagccatgaaggagcagtgggctgccaggccctgcccaatgtagttctgcccagtgaaggacagcaaccgagtgtatgccttgttggtcaaggccaacacctataccagggaatggccagccagggtctacaaatcaacacacgtctagccgatcttcaccatactctcatagggtatggctggccagcacttatctcttcaaaacatatccttatatgcagacacaattggactgactcaggaacatgattcaaggcatagttggtccaaagccttcagaccatgaacttgatcagtcaagggggtcaccattctcggcatacattaatgccctaccctttcctaagttcaaaaagccggtatggaaaatgtatattgggcgagaaggcccattggctcacatcaaatactttgagatgcaacttgatctccagaaggttactagtgatgtatgatatcgcttttttttagtcactttgtcggaaatggctcaacaatggtacttcaaactcaccctacggagattcaactcttgggtctagttatcacaagaattctacacccaatattcatcctcaaaactgttaggttttatgccctannnnnaactccatttcaatgtaatctatttt

SEQ ID NO: 120772 - DNA, 1107 bp, Cannabis sativa
atcttaatcctcatcatcaattacgatttccatcacttaaaagaaaaaaaatgacctatttccattctcaatattttttggaatttttacttgaattttcatatagttatttttcactaaaaaaactacatttttgttggtattataattacttataatttttttttacttttatttcaatttttattgtaaataaaaataatatttttggtagtgtatattacaaaactgtgtaaatagttgaggaatataatttttaacgatataaaaataaattcaagagagaatataagcataattcggtggcgaagttgttaaatagaaataaattatattagttttctttcttttgagaaaatattagttttctttctaaagcaaattaaataggctttgaactatttcaacaaccttaaaaagaaaaagaaaaagaaaaataataagtattttaaggtggcagatggataatattatatttatatccaaacataggactgactgacaagatcccatgtaacagtccctagaccaaacaagccctttatgtattaaatctataaatatacatttttaaaattaaataaataagaagaagaagaaggaaatgaaagcgcagaattaaaacacaagatagtgttacataattggtatattttaataggtatggggttctatatatttttatatatttgaataaattatgcaatatttctctcatcagaactaaatgataagtggcttaattcttagattatttgatataaaattaaaatataattaaatgaagaaaatggtagcatcacagttaagtttaagaacacttatattttgttccatttatcgtttagaagacatagctgtaaaaattattgcagtaggttcaatctcgtagctcgagcacaaaaaacttattattctcaactactaacaacaatgtattgatgagtcattgaagaacaaagaaaaaccaacaacgaaacaaaacaaaacaaaacaaaatcatataacatagtcaatactaaaatactcaaaattatgtcacacagacaagactaaaatactcaaaatcatatcatagaggcaagactaaaacactcaaaattatgt

SEQ ID NO: 120773 - DNA, 1105 bp, Cannabis sativa
tgggcagtaactagtatgattaagatttcacctcagctaacaaatgacatggtcagatatggtattgagtttgttgtaggcaaacttcataattagatattgcaatctaatttgttagacataattgaagctgctcagttaactgatccagaatcagtgaagattcgagaagaggttttttctggtcaagctataaattatacggtgtcaaataacgggatgttgctgtataagaccagggtttgtgtccaagtagtgcgaaacttagaaatgagattctcaaggaagctcataccactccatattcactgcatcctgacactacaaagatgaaccaagatctaagatcctactattggtgatccaggatgaagaaagatgtggtggaatttgtatcctagtgcttaattggtcagcagatcaaggctgaacatcaaagactggcaggattactgcagccactgacacttcttgagtggaagtgggaggatatcacgatgattttgtggttcgattacctagaaccacgggaatgtacgatttgatttgggttgcggtagatcgctttacgatgtctgcacattttctatcggtaaaaaacaacctttacagtggatcagtttgcaaagctttatgtgaaagagatagtgagattacatggggttccaaagtccgttatgtcagatagagatccaaagtttacctcaaaattttggtagagtcttcaacgggctatgggtaccaaactaaagttcagtacaactttccatcctcaaactgatggacaatctgaaaggaaaatttagatattggaagatatgttacgagcctgtgagatggatttcgaaggctcttggagcaagtacctgccattgatagagttttcttacaacaacagttattagagtactatagggatggctccctatgagatgttggcaggaaatgcagatctccaattcattgggattaaactggagaaaataaatacctaggtccaaaattagtgcaacggactaataaagtcatagaaagaattaaggccaaaatgattgcctttcagaataggcaaaatagttatgcagattcgaagcgtagagatgta

SEQ ID NO: 120774 - DNA, 2505 bp, Cannabis sativa
cttaataaaatctaaataaacttaaggattattactagaaagatcatttattctccattaataaaataaatccaaaagataattttaccctttgctttactaggaagataccttactttctaggggtaaaatggtccaaaaccataaccccgataaccgacattctaaatgtctaactaaccccgctaattctaagacactcaaccatatctaagtaactctattggccaaatcatcacattctactgttatcaagcacaaaacatgaaaatcgtaaaattcataaatagtatatataatacatttaacattcaaatatgtctccgtaattaaaaaaaaatactttcctaagacatatttctaacaataagccctaatttctactaagaggcatataatcatacattaatattaaaatccttaaatatctactaattcctatttttaactatgcggtcattacatttttctttgaagttgccaatttcagacacaaatctcagaaacagcaactgtcaatctcaaacattgtatacattcgattcttatcttcctcattgaaagattttgagcactcaatccccaagtaacctaggtgacatttttcaactgggcatgtttttaaattacttttagttcacatctttggattgcacatttcaaataagcatgatggcactgcatttcctaatccaattgtcttctgttttcactttagctcagataagatatgaccacaactcaatgactaagaattataaatttatatcatactataaaaagtagttgatattatgaaatcatatacaaacaaggaaaaataaagaaaagatttacatagttataagtaatttttctcaaagacatgcagatgtgcaatccaaaaatagtgtgttatccgcgtttttgcaaagtacaaaatgcggcatttaatgagaaagatcaatttaacccttccctaatcaagattctttgatgcaactttgtcacgggaaagcctgtggaactgggaattatctgggatagaaagacacacaaaagcctacttatttctaccttggcgtcccagatgtagtagacgaatggtttctcctggacctgggtgggtcttatagagaaactcactaaggtggtgcccaaatgagtacgtaaaaggtctaaggtggatatcgaccattatggagtgtcgcaaatgttaactttttatgcacaccaggtcacccaagtaatggttatactttttatgacaaagattagatcttctctcctacatccaagcatggtaggtgcataccaccaccaccttttttctaggaaaatattacagacccctactcataaaggagccagctttaagctacacgaggcctctacttttaaagattgaacatttgcatgctacatggccatatggtacaaaatgatccccattatccagctgtagcacacatgggcatattgtttcccatgggatcatttggttagctctaatattgcatgtaatttactccaatagtgggattttagcggatacctaaggcgggtcatgggattgtccatacccgccacttagcctatacataccccttgattctcatacgaagggggcatcacaattcacgtagctaaaactcttccaagattgctccaagtattctccttcttcaagagaatcttagagtacaaagtaagggttttctataaaaatactataaacacatcaaacttgccctaagaggctaatagactgactcgtggactaaggtttattaacacttgaaccatgtaaaaaaccttcatctctttatttctacaataggtaatctctttagttcttaaatatttggtttccgaaaatctcagtaaatattttggtgttttcattgagagttgaagaaagacataaaccactgttacggtcatggtgttcacatgaaagacagttcctaggaagactcttcaaggtggcctcgagatggtcatggaggaagtaaaccccctcttgcccgagcccgcccaaccgaacgatgcgagaggtagggatacgtccaatgtgaacgatcgaaaagatgatccagagaaccaactgctgggattttatgccctaaataaaactcatttcaatataatcttatttgctatcaatagaagattaaaagtcatttaattttacatattatttttataattatggtttaatttacaatttctaataaattcagaacatatagttattcataattacagtgatgtcttcatagtgaagagtaattgtgattatatactttaaagttttagtcacatgatttatcagtgcactggatttacattgacgtaataatcagtgacaaagtttacttacacttggataagtggtatgtcatttccaaggagttggtaaagtatgctagtatcatatatatggagtatacatcggactgaaccaatattgaacttggataagatatcataaacttattattatatctttgtaagtcaatatca

SEQ ID NO: 120775 - DNA, 1139 bp, Cannabis sativa
ttcagggggaatttttaacggctaaaaaagttcaaggtgcatgatttagtagatgtcaaagttcggggggtaaaaatcctaattatccaaaaaaaaaaaaatgggaaaaacttattacatagtgggcattataaataagttatttttacaggataaatactattttaaattttgtattgtgtaaaagttattatttggactgtttattttgtcaaatgacaagttggactctatattttttaaaatagtatcatgaattatttttttgtcaaaataaaactcaataataatctgatgtagatgtgttataataaaactggttacatttttagcatctgttcgtgttaggaattgtttttaagttgttttttatataaaaaaaattgtcgaaaattgagctcaaggctctatttataccattttaaaaaatacataatttatttttttatttaacaaaataaaaaatccaatcaataatttttataaaatacaaagtccaaaataatatcaaacctatttttataatttgaactagagataaatgagatcaagtgttttgggagcacaacattctttggagcatgtggaattagtgctcttgttttggataagcaattattggacattactcattagtgtatggtgaagattggtgatttgttttgatattggttggggtacccaaatttttcattctacttttttatttggttctcaatattattctactttgttgatgtacctttcaaaaatggaaaaggaataattggttggaaggtggtcgaaaatggtggcgactactcctatcgttgctaatttaatgtttgaaacgaagatgttagctaactcatgaacctgtgactgtttacaagctattcgacagttatttagtaatcattctcttattgcttggccatcaaaggatattatctttagtattttaaactttcagaaggtaatctctttgtgatcatcaatttgttgattgacttataattttaattaaattttctttcaaccaacatagataattttttttccttaaaaaaattgaggaaacaccattcttatacaatatatatttttcatagttaaaattatgggtaaatactattttggaccctgtattttgtaaaagt

SEQ ID NO: 120776 - DNA, 1047 bp, Cannabis sativa
tggcacaagaatcacaagtttatagagcgtaatcacatctatggaaacaattattcgtcttctagctaagtatcaacagagcctaatcaacataaatgactcttgttctattcatcagattaaaatgccaagactttatttgatttagggggaaaacgcctcagaagaagaattgctacacgaataatctgagcatttctattcacttcattaagaaaaaactatatacatatgaaacactttctactttccttccaaataatccaaaaaaccttcgaattcctccttaggtactcgtacatgaaatgatagaaatgacatattttaatctatacaaatttctgaaagaagcaaaattaaagattaaataaagaaaataacatatagattagaacctggtcagagaactcgctgtgaggaacagcgtaagagtttctaatatccactgttccatctggcaagatcgagccgagtagggttccaataacacgctcggcctgatcgggtcgcctcacataacaatcggatatgttgaagatgactagagggtgaaccttcgctgacaagcttgaagaggaagaagatgagaactgcaacactgtgtgctcgttcgccattatctctctttgaactcgatggatctgactcgctgagaccaagagagatagacaaagaacacggtgatggcgcaagagctagggtttttgggggcagccgattggagtcgagaacatagtgaaagaagttgggtttgttcaatatgctgtaattgggcttcttgtggcaagctcactataataatgggcttaattggagcccaaagataatgaccaatccctagttggactatctcgtacaagcactgagctacaataggcccaaaggtgcgagtcctgagtagctgacccatttttttgttgattttttagcaaaaaaatacagggtaagttgaaatatacccttttttttttcatcagttaaccaaaaatagttttattttaaattcaattgaaatgtacctcttttataaatctattaccgattata

SEQ ID NO: 120777 - DNA, 1329 bp, Cannabis sativa
gaattatctctggttgtagtatttttgagcaggatgttgaggttgatttgaaggtttttatgtattcagaatgcttttaattcaatgaaattgagatttcatcaaaataataataataataataataataataatgtattttaatcacacattttaatgtatgtattgagtaattacgtatatattataaagtttcaaataactaaatatgtatatattgagtaaattatacaagtacgtaaactaagtaatctatggagagaaagagcagcgattttaatcacacattttaatgtattttaagatttgtttttcctatttgtattgaaataaatataaatagacaaatatagtaggtaaaaacagatgcgtaatcatttgcttagttttatttacaattttgactatgttatatacgttatttaattatgggattttttcattaatactgttatagttaaaaaaatattgtgtatgttataatttaaaaaatgactattattttattgtatagtaaataaaatatatattttatatatgaaattatcatgtttagatatattattacttttcaaagatataaatatattaatttcatagtcattattacttttttttaaaaaaaattccaaaaacaactcaaataaagtaaatattaaaaagtggattatattgaaagagactccttgctgttagccaacgcactccaccaacaaacatcaaactcttttcttttaatgatttagtgaatgatgttaaacctcaatcatccgagatgctaactaagtctttcatagcatggccaaataagttttaattttagataataattgtatttggttagagaaaattccttagactattttttttctgttattgtaaacgaattattttaattaataataacagaatttctctcaagaaaaaaaggtaaatattaaaaagattaaattaaataactaccaattatctcattttaaaataattatgtattatttttgtgaaatgttataattaaccgtaaaatattatttcacaccaagttataatacttttggtaactaaccttttcacattttctaattgaataaaattgaaatcctcgattgaaagctatggctaaagtagcacaacaaatttgtgaaaaataaaccaaattcataatcaatatgaaaaataatagtccacattgaattctaaatcatctttgcaactatatctaatttgttcaaattgaactcttaccaagctactttagctccaaagggagccatggcccctgccaaaatgttggacaaaaaaaatttataaaacaattttatgttaaaa

SEQ ID NO: 120778 - DNA, 1005 bp, Cannabis sativa
atttacttctttatattgtaaagaaataaaagatctaggcctatgaaaacagaaccgacaactctatgagttataatggtctgttgaggctttgtaaacggtcttatttatttttttttgtttgtaacttattttatgtgacagatagtatgggaatttatccaatagattgctgtgttaaagaacattatttttattttatttttgatgtggttcatgatagatgaacagctagcatgcaattgaaatcatatacaaatttaatatatttatagtaaaaatttcaaaagtttaatgagtaaatattattttggactctctgttgttaaatgataaaacagatcttatattttctaaaatactaaaaataggacactgagcttaattttcagcaattttactttttaatataacaaattttaagataatttctaacatgaacaaatatttttttgtaaccagttttgttataacatctctagattggattattattaagttttattttaataaaaaatcaatttagagtcttatttttacaattttagaaaatacagagtatattttgtcactaacaaaatagaaggtccaattagtaatttttgcagaactcaggttccaaaatactatttatctcattttaatttataactagtagccattcaataattctgactgaagaaacgagtgtctaattatgattcatttatctcacaaattttttttatttatatatatgaaaaattattcaatagtgatttatatctaatctctactccaatgtaaaagtatatttaaagaaaaaataattgttttatttaaaaaaataaaaataagaattaagatgacttattattgtaggtaattattattttttttttgaaaaaaataaaaaacaggaatcaaaattagtttattagaataattatttaattttttcaaaatttttataatgacccaaatttttgaagtattactaatagacaatactgttgggttttatgc

SEQ ID NO: 120779 - DNA, 1004 bp, Cannabis sativa
aactgaaaattaaatcaaataattaaaatatttgataattaaatttaattatccattcaaataaatctaattataattaaaaatattttattaattattaaatactgaaaatatatatttatataaataaatgccattgccggctatacataaaaaaagaattgtttggaagacataattcatagttcggcatatataataattaagttgacttctctaatattaattcttcttcaactgtgttttgatcaagatttggccacagtatatataatttggttgatccattaataagagaagcaacatttattatacatgataaatatataatgtaaccctaaagaatgtatatatatttatagaaagagaaacatatggtcgggttttcaagctagcaacaaataataagtattcatgtaatctaatctgttttgtttacagggtattcaatttgtaataattaccgattttatatttcgatttaattttatatacacaataacttaaattcaatccctaaaactttgaattgaatcattatattttttttaatattaattaattacttgataataatttgttaattattatcataacagcaggcacatgatctgacagatcaaaatcatttgctatgattagccatggattttaaatgtggaaaatgcttagattcctcgaattaaaaaattatattagtcaaagactttttttaaatagccccctattaaatttaaaaagtatggaaatgaaaaacaaaacaaaaatatgacccacattattgaaaactcgacaagagtaatactttgtactaggggtgaacatcgagctggtttatcgagttttaagtttgtgaattttgggttcaaaaaaataaaaccgaacccgaacgcgaattgggcacggttggcgggtcacgtgttggcaggattcggttggtcgggttgaccggattggcgggttgacccgatcaactcggccaactctttaaaaaaaatttatcc

SEQ ID NO: 120780 - DNA, 1697 bp, Cannabis sativa
atgaaaaaaattagactaaattttttttctggatgccgaaacaagtagagggtgcatcaatacatccattttaacggggtgtattgtagaatcacccaaacttatatattgtaaaaataattattttaagttatatgatgactaaagttctcaaaaaatttaacaatatagagaaattacataaaatacctaaaatcatacatttttattattttttttcttacacttttacagactaatgttttataaatgaaaatattatcttttttatattatagcaaccttatattatactttcactgaatccatagaaaaacaacaacagtcttttttattacaacctaaaaacaacagtttgaaaagaaaagaaaaaaaaaaaatccatagaaaagtgaaaagaacagtattttgtaaaaatataattttttttgaagtttttacaaaaatattagattttaggcaaaagtttataattttattgtcacgtggaattttttataaaaatactatctttttataaaataattgtaaaataacaaaatagaacaattaaaataacagtagaatacttaaaaacaaccgtagtacaacagtgaatacttaacacagtacacagtattttttttaaaaaaaaaaattcgcgtcacagtaaaaagtaaaaaagttaaaaaaattcagtgaaaccccattttttttttgctgttttgggtatttctgaaatactcccaaaaagtaaaaaattatgagcccaagaaactggcccaagcccaagcccaagtccagcccaataacttctcttctccaccctcatagatccctctctctctctctctctgttctctctcggcaacggtgagtcacccaccacagtacgccgacggcagtggagctcagctcatctcagtcttaagcatcatattcaggtcagtattattttcaactttggacgaatcagatttctcttctattgttttgatttgatttcatatttagatcaaacattcataatcatatgaaatgaaatgcataacaataagtaatacatgttatgttaatgagtgagtcttatttggaaattttaatattgtacctcaatttgttcactactttctattcctttaacccattcataaattaaagagagaaaaaaatcatcttttaacttttttccagttgatttcttctgtctgttggagagtcacaccttgatataatatataatatgtagaaactatatacatagataagattaagatgtatctgctactcttttcattgccaattaattaattaattttgagataaatcttacacgtctaacattcattataagaacacccacctaagagagccttgagccatagtctccagaattgtcatgtgttgtgttttatagtggttgcaatttataacatccctcgttttatgtctggctgcttcctagattgacaactgaccctacaaactaagataagtattttcagcatgctttgtcctcactcgcacgttttttgggaaaacttcccaggaggtcatccatcttgaaattatcccaagtcaaacacgcttaactatagaatttttttgtgatgagctacaagaaaataagatgtactttgttgatatatgtagtaccaatcaattcatttaaacctttttcaactgtgtagtctcatacctacacagtcttagaatca

SEQ ID NO: 120781 - DNA, 2686 bp, Cannabis sativa
  modified_base (2661)..(2661): a, c, t, g, unknown or other
aactaacactaacatactcctatcatttggatttggagccatttactataatttccctatatctttttacatagatatatttttatttagtatattatgtaaacaaataaaaaaattaatataattaaaaatatatataaaaattaaatttgtgatatcaatcgtgttgatcaataagtattgtaacattagtcaacacacgaatatgataggtcgtcatgagaacatgacaagtcgagttagaattgagattttttgacagaaaatatatatgggtcgggtcaaggttgaccaattaaatatgtcaacttacataatacgaacacgaatatcacagaacaacgcaaattgccacccttaattttttgacatgggactaaattactacgattttgggagggacgaccaccacacgacatcatactgtaaatgggtttaaacacaacaatttgaagacgtaactacaaatagactaaccttaaaacacaacatgataaaaaattatataattcaacaaatagtaataataataatatactttttctggtaggggtaacaattagaaaaatttacataatagactaaaaattacaaaaaaattataaaaaaatgtcaacacgattttttttttttattatttttactctttgaatttttttatttgcaataatacatcttcattaaaaataataaaccgttttttagttattttataatttatttataatttattatggttgtcatgaggttatttttctagttgtttttcgctattttatagcttatttatagttgatttatagtcgtagtgaggttgatttctcattattattttagttatttttttacttttgccgatcaaagtgtatttttgtaatttaaaactttataaacgtatttttataattaaaaattataggtcataaaattataaataaaacataaaataagagtatttttgaaaattgcccaaacaataataataataaatatttatttattaattacatataaattaaaataataatacaactcaaatataataatgtataataattttattattaaaaaatgttaaattaaactgtgaattaatttatttcaagagctttgagctaaaaatacgagtatttattagtaaatatttaaattataataacattttttattaattttattgtgggtaattattatcgaaaaaatatataaaaataattctgctatctcaaaattcgcacagggtgatgtggcgtccatctgagtgacacgtgaagaacatttcatcacatggacgggcagtatgcttcatgatataccgtataatgtgatttatcattcgtaaacaactgactagaaaaaaaagctagaaatacccgaacaaggtacatttcgtcactgtcttagacaaaataacagtggcattctgagcatcttcgtcagttttctcgaatggcatggtccaagattcgtcagggaagctagtatcaagatacattctctagcatgacatgatcagccccaccttctgaaggttttcagtactaaagagagttcgcctgtctctctcccatgcatcaatatcaagcaacatggcatcgactctcctcttcatgtcaataagaggagtgagtcttttgaaagagccaactttttggaaggtaatttgtcttgacggaagaacaggagtatagaagtactcttggtactaaaggtcatagttactcttggttatattttctatgaatggtccaaattgatggaagctgtaaaagccttgttctttgcgggttggacttctttttaagtcacaaaaaaagttattctcatgagaatttggaataggcaagttcctaaggtggtagaatatgaagaatgtggccagaatcctatatctatttggatttatctggtaagggcaggcaccgaagaaatcaactatggatatgaaccatggatgcaagggcaagtaagcacccacattcatgtggaatctcgactaggcattacaacaagtattttgagagcccttgggagcaccaagtcaaggctttcggacaacagtttcagggggacagtaatcatctcaaattgtatgagcttgaagctcagtgagggtgctagacacaagaggcctaagtttaaaggcttgatctctcaaatcgtcactctcaatgacagctttgagaagctcaattgccatcacttttctaccacgcgccttgtctaagttcttagacttagagcttagctctaatgaactaagccacatggggatcatactcatcaggtaatcttctgcttatcttcatcatggccatctcaagctcaataactcaagttgcttacaactcaagaaaagttaaaattgggttgaaaaaagtcaaagtaacttggagaaatttttcaaggcacaaggagagtgttttaaatttttggagggtttagaaaaattatttcaagagtttttgggttttagaatctttagagtaagactagcaaaggaggagaagaagaaaaaataaaaaaaaaaaatcagcatgtagaagaaaaaaatatatttctctaccttggagtgaggaagacttgaaggcttgatgaagatgaaattccaaaaatgttctctaagtgctatatgatggatttattttaccaggatcttanatttactaacaagtatgttatttaa

SEQ ID NO: 120782 - DNA, 1066 bp, Cannabis sativa
tttgctggctgtttcctgagagatcctcgagtaatgctcggcagggaccttggagcatgttattagcgacgtcgaggatccagaatccgacgacgaaaacagcgatggcgcgtggcttcacgctcctgttgagatcgtctcctgaagcgtagcctagatcggctgcgaatccgattaggaaaactgcgattgcgactagggctgctccggcggctatgaaaggtcggcgacggccgaatctggaggtagagcggtcgctgtggtaaccgacaatgggctggaccaacattccagaaactgggccgcataaccagataaaagcggcccaagtgtgaggaatgccgaggagttgaacgtatggggtcagtaaagaaagctgtaaggcccaaccgaattggatccccgcggcgattgaagctacggcgattagttttctgaagggagctttacccgggtcgggtcccgaacccgaatctgaaacatgcaatagattattgggttttctagtagaagtagtagtactagtagtttcaacctccataatttttttttgtgttttgagaaaataatggttgtttttgggtgggtttgcatgggaatttatattgggaagagagaagagagagttgtatttatttatttttatttataattataattttgcatggggcaactggcaaaatgggtcggcagagaaaaagagagtaaagggttatccgttaagtgaggtgttttaggtaattttaattattttgtgccaagtgtagcatttatcctgtttttgggaactggagtaattaattaactttcttactatctatatatatatctcttattattattattacctctcttgttaatatttatttacaacacttatcaaaataaaattataataagtgtaataacatatttaaattttatttttatataattatgaagaaaaaaataattatataaagtattatttttgtaaaaaatttatattttacttttacttttttttttatatatttttaaagtattctataaaataacaagaaaattgttagaaataattggggtc

SEQ ID NO: 120783 - DNA, 1061 bp, Cannabis sativa
gaatgtcagtatagtaggcattggataaaaatgtggtttccttattgttgtgtgcctctttgcagtttgacacaagggaaaagtcacctaatatctcgggatcgcgtcaaaagtgtgccatgtgggttggtttttgtgacccttgccgctataagacaccatttcatatttcgttctcgaaggtctcttacgggtattctcttgatttatacttgttttctttttaaaggactgtaggtcaatctggcttcacttttggagaacattcttggtgcgtctagcttcaggtttccagattcatccttcccataggtaggtcgcatgcattattcatttggactcatcaattgggccatgttcccctgttgggctttttttatttcccacctactagctatccaaaaacacggataacatttacccccaagcctttggggctcaagcatcacaaacgcttattgtttccatataggtttgagatctttcccaaggccacgaactaggacggtcccgtaatatgctgatgcgggatgatgtgaaaatcctctaaacctttaatgctctggttatgttgtaacactctactaaattggcatgttatcgtgatttcttaatgttatgcactcatttgctaatcaaagggtttatgaaaaaacatggataatttaaaatattcttaattaaactttaaacttaaataattaaacactttgcataatttgagatcctgtttctaaagttataaacattttacaaaatatttagttacaaaagttgttacctaacgactatcaaattaaagtctacagcttcaaagatcgaacactccatgtctaacagtcctgatatgtacaatcttcatctactcatgctcacaactatacaacctcagctgcccttacttacacatacaagcaatatctgtgaattgacaaattcagtaagaaaagcataatcataacataacataaaccagattataactgggcactcatacacctaattacaatcatattctacgtcccacgcatactgaatctagaacattcgtacgatagtac

SEQ ID NO: 120784 - DNA, 3357 bp, Cannabis sativa
gaaatgttatatggaaggaagtgttgttcacctattcactaggatgaagccggtgtacagagatatcttggacccaaagcaatccaaaaaactagtgaggctattgagaagattcaagctcgtatgcttgcctcacatagtagacagaaaagcgacgctgatctgaagcgtagagatattgagattcaggttggggattttgttttcctttaggtttcaccaatgaaagggattcagagatttgggaaaaggaaaacaagccctagagttattcgtccctttaaaatcctagagagggtaggtcaagtagcttatcggctagctttacccctactttatctgaagttcacaacatgttccatatttcaatgcttaggaaatatgtgtctgattcgacccatattctgagtgatgaggacattgagctccagatggacttttcatacgaggaacaatcaaattagatcttggatagaaaagagaaagtattgtgaaacaagaccattttgctagttaaggtgctatggataaacaataaggttgaagaagcgacttgggagttagagtcatagatgcgagaacagtaccctgaattattcaggtaaattttcaggacaaaatttctgtaaggaggggatagttgtaatatctcgaacaatgtacttatgtttatttagacatattttattaaatatgtagttataagtcttaaagtaaggttataatcttattagtgctaattatgagttatttagtgatttttaagaaaatgattaattgagtataatttattaattacaaagattttattggaacatgtgggtattatatataccatttttgaaataaaaatattttcaagtttggcagttctggaaactcgatgaattggccaaggatgtcacgacggtaatagaatgagttttactgggattgtaccagattgtttaagtattcttgtgttgttgaattattcacggtagatagcattgagcaaaatatccctagagtataaactagcttaagtgttaaattgacggtaaaatagtcattttattgagataattcttttgttttatttgataatctagtaaacactagaccaaataaacttgatttgttagattagtaagtattagttaagagaaaaagaaaacatatgaaaatttcacaaaacttatcaactcttcccctcttcttcttttcgactcaagaagaaccctgaaaacctaagctctgttcatctcaatcctagtcaagttaatcaattctaggagctttacaaccttgaggtaagtttctctacttgatcttgatgatttctacggttttaagttgtgtttttttggggattttgagtaatttcaggtctgtaggtgtaacgccctaataattaggcacctacgacaaccaatattaaaaccctaatcccgctaaacgtggattattaaaagataagagtgggaaaatttaaattttatttgcaatggaatgaaaatataacttgtaataatttttaactttataaaaaaaatctaaaagataacatgtctcgggatccgacaaactttttcacaaaatattacaagttaattcacgtgctgacctaagcagcaatatttgggattacaaaatacattcacccatagacccaacccgcttggtctagtatggcccgaacatgtacaatccaccgccaagctctcaaactcatggctgattacagacagatttaccctttcctgcatagtagagcatctatgagccaagcccatcaagacaatacaaacatccatatatacagtgaaacatatcacatataaattaatgccattacacttattgtctatttgatatagacctgcgtgttacactcacacgcctatttatgtctatgtggcatagccccacgtgttacgctcacatgtctaattacaataaggccttagaacagttcatctcggttctaattaccgagtccaaccaaattacaccttgagcgtataattatttatttaaacatatatagcatgacacaacatttaaaatcatataatcattagggtaataacactaggccatataaccgctcactttagggtaataaccttaatcctagttctcaattaatcacaattttaatatcaaacatgagcgccacctcgcttaactctacgtgctaactactgtcttacctgatgtcccacgtatgtggagatttcgaatccccgggtgctcctaaccaagtactggtaatcctagtcataattcctaggattcacaaatagggttaatccctaaattcactttcacataatcatataattggcattcaaaacacaataaacatatagagctcaaaaagagctttccaacgatatatggaacacccaaaacggagtctaaatcaaaaagttatgaacaaaaaaacatagcatcaaaactgcctaaaaaaaactaggtgggtcgtgacacaccccaagcgagccgcgacacttaggttgaaaaacccaggattttgaagggcgggcagtgacgctcaatgagggagccacgacacctggattccaaacccaaaaaatccactttacagcaaatgatttccaagcccaaacacaccaaaactcacccaaatacatgaacaaacacaaatttatttcccacagattatagccatctcaacagcgaattaaaaatgccaattcaagctcaaacacaagattaacatcaaaatactcttcgttcaaacacccatgcaactagcaactaacaacataaaaaaatgcacaaattcaacatattatcagaaacaaaatataaagtaaagaggtggaaaactacctcaagttccacaatcacaattcaccaagcacaaatcaaccaaatccaatttgaagagaaatagcaaagtgagaagttgagaaagagagagagagagagagagagagagagggttcaactaagagcaaggaaaaacgagaaaatgagtttttttttaaaaaaaaatcccttttgttgataataaatcaaatggtcaaaaagaccaatgtgcccctagggccaatataccacatatgcatacaacaagagaaaaattgtcatttcatcacataccatgcttaaataaatttcaaattattcaattaattattaaatgccaaaataaaatctcaaaaatgtatttcggccccgaaccaggttcggcccgaaatacccgattgtgactataccgcgtcgacttgtcagaaaacacctatagaaggacaaaaaaaatattatataataatatagtccataagcacgctataacattaaaattacagtgttactgtaacgccctgtccaacagggatgcca

SEQ ID NO: 120785 - DNA, 822 bp, Cannabis sativa
aaaaaagtaacaatgttatattaatataaaaatatatattatagcgaaagtgaaataaatgtgtgattcttaccttatgttccatggtataaaaaaatattgtcctacttgagtcatagtatttaaccacattgataattgattgatggctatcaccttgtcctgctcattaatataactaagaagctcgacatcataaaacttgtataaccttttttttatttaaattttcccaaatgcatctgttttaaaaaaaatcaaatagagtcctaaaaaatgggtagagtttcctctatttccataaaatttccaaatttttttaagtagatagcaatacaacaaatgggcagagttttatctctccacacagtcaatcaaactcagaacctaactacggatgaatatctaagatattcaaactccactaacataatatatatgatatattagtcaaagttgatgagataccttagtcctaataacatatagctaaacccgtaagttcatcttgaatggccacttgtatgacatcttcggaagttatgtagatgtgaactcggtagaataaggatgggttgacagaaaccctcacatactcatttttaccttttactctcatatattccaagaacatggcctgaagagaaatatgagttttgttgagtacctttgcaatgaatgactcataagattcagtggaatcaagatgttccactgtcttctcttttccctttgagttgtttgaacaatgaagcttcttaattagaggaccctacataattacaagtaaaattgtaatacaattcatatataatttaacat

SEQ ID NO: 120786 - DNA, 1365 bp, Cannabis sativa
aggttaacggtagacaatcagatcgtgaccagatcatgaagtggcttgacgatcagccgcccaagtccgtggtgttgctctgtttcggcaactatggtgctttcagtacaactcagctgaaagagatcgccattgggctcgagcgcagcggtcagaggttcttgtggtccgtacggaaatcccagtcagatggcacaactgaagattacgaaaatcccaatgaagctctgccagaaggattcctggagaggaccaaggaagtgggaagggtatgtggttgggccccacaagtggaggtcctagcacacccggctaccggaggtttcgtgtctcactgcggatggaattctatactggagagtttgttgttcggagtgccgattgtgacgtggccaatgtacgcagagcagaatatcaacgcgtttcagttggtgagggatttggagttgggtgtagaacttacattggattttagaagggacagtggtgatattgtaataactgctgaggaagtagagagatctttaagatgcttgtttaacagtggtgaaggtagtttagtaaggaaaaaagtagaggagatgagtgataagtttaggaaggctgtgtcgaaaggtgggtcttcttacgagtcatttagatgtttcgtggaggatgttttggccaatgtggaacttcaaaattagtgttaagcagacactaattgagctgtactttcgaagtaattaaaatatagttgtatatcatattcatatgttctgttgtagtgatgtatgtttaattttcatggcataattatagcggtaatattattataagagaaatgctaaagggcatgtgtcaatgtcgctattcatccaattaagtattgagtcccatataatttaatataataatttttaggaagtattgctagccaatcgcaaggtgacatgtcgagggtactaagcagcaccggtgtcttatagcaatgctcttattataatggctcatttccatattttctctttctaagtttaccaattcattgcctaggaaacacttgagtataaggattatttatagagagatgctacaagacagtcgagtactataataggtggtacaatttattattggatcatgcacattttaaatcttacaaaaatactaatttttttttattgtcaaatatatatatataaaaaatattatgttaaagtttcattattacaaaaatattgtattagtaaaataaaaataataacttaaaacaactaagacagttaaaaaacaactctaaaataatttaataaacaaaatgaaaataattacaaaacaatagaaaaataataaaacattgatataattacaatatgcaaaaca

SEQ ID NO: 120787 - DNA, 851 bp, Cannabis sativa
agctaaacaacaaaagactcccaaccccaatgaggtgcttggtgcaagacttgactaatgatcaagcaccaaggcatgctcatgttacaaaatggcccaattatgggtgtgccatggggcaacacgccacattctcccccacttaattattcggcgtccttgacgaacctgctgcatgatcttcagtcttctacataaactgctgcaagttctccgccttctcccacctgatctcatcatcagcaaggcccttccatttgaccaggtactcttttctcttctttttcttcacacgaactgttctttctgcaggatttcttctggttctttgctgctgcttcgttgaatgctgatgtcatccgtggtagactggttgcgtgctggatcttctggatcttcatgatacggcttgaggttgctgacgtgcaggaccgggtgtatcttcatccatgaaggtagctcgactttgtaggatcctaggccaattttggagatgactaaaatagggccctcatatttgcgtacgagtctgatgtccttgtcccataggaatctcaattgttctagccttagtttgataaacacaaactcaccttccttgaactccacccgtcagcgtttctgatctacccacttcttcattcactgtgaagctttctctaggtatgcttgggcaatctctatgttcttcttccagtcttacttaaaattaaaggcccgcgaattccgtccgtggtattcatcgactgtgtggggtaatagtggttgttgtccattcacaactttaaaagggctcttgtttgatgaagaactcttctgagagttgaaacaaaattgagctacgtctagta

SEQ ID NO: 120788 - DNA, 1451 bp, Cannabis sativa
  modified_base (1419)..(1425): a, c, t, g, unknown or other
accaggtgtcagtactcctagtcacaattcttggatttacagaaatagggttaaaccctaattccacattcacaaaatacatacatggcatttaaaatacaaattatcacatagagctcataacgagctttccaacgatatatagaactctccaaacggagttcgaattacaaagttatgcattttcaaagtttgcacatgaatctgcccagaaacaagagggcgggccgcggcatgcaaaagccatgccacgacacctgggaccaattcccacgtctcaccaacaggggcgggcaatggcatgaaaaagccatgctgcggcacctgggttccaaacctagaaaccaacaagtttcaacacgaatttcatgtcccaaattcactcaaaaccatcgaaatcataattaaaacttcaaacctccgaaaatatttcataataatcatatagagagtttaatatacaattcatgcattaaaacccaaccataaaaacccccaaaattcatattcaaagtaaacttgacaataacttaacaaatttccactatcaaagccttaaattctcaagcatactcaaccaccaacgtcagcaatacaattaacaagtaaaactaggttttgaagcatgagaaacaccctaaaattacatccatagctcaacaaatataaatcagaacaagatcatggtatttacaccaaaacctatcaagactaacaccatttcttcttacatgcaaaattaggaacaacacaacccataacatgcttttccataataaaattcaacaggaatttctaataaaatcagtaaaaagaactacctcaactccaagctcaaagttcctcaatacaaagcttcaatccaacaccaagcttcaaacaattttccacccaaatcacaaagtttgaaatggggttagagagagagaggggttcgggttcatgggagagaaaactagaaaattcatttccatgaacccaaaattgcatttcttttctaataatccaactgcccccaaaaagacaaaaaagcccttatggccactaagcacacccatgcacaatcaagggtaaaaaggtaattttcttcataaacatttccaaatgaaattcagatcaatcaccaatagataaaattccaataattcaatccacattacattttggacccgaacccagttcggcccgaaatacagggttgtgactataccgcaaaaacttgtcggaacacacctgaaaaagacaacacagacatactatatgtaatgaccgctttagtaagtttgattagtaaaggctattaacactaattactattaatttttataatgattcacaaatacaattatttatgcaccccaatattagaaatgagcattagagttataatttctcaatttcagagattttattaaactnnnnnnntattatttgacttatatgtgaaatat

SEQ ID NO: 120789 - DNA, 909 bp, Cannabis sativa
taacaatctcaatagttgagggggaatttttaacggccaaaaaatttcaggggccatgatttggtatatgtcaaagttcggagagaaaaattactaattagacattaaaatatttaagacttaatattaatttacactaataataatatgccacattttataatacttcacaccttaaaatgtccctttaacattttttttgaaactttacctaataactaataaatcccctcaataattttataccaaagtatactttttattttcgtcatgatcactttattgattagaaaaagaattacatcaatagaacaatcatttcttctatctaaaaaagctcatcatctatcctaaaggcatgcttagccaattcatgagctgcaacgttaaaattgcaactaacatgagaaagagatatcccacaaaaattaaataataaagctttaatatctaaaactaaaacaccatattcattatctcttagtctctttctctcctatcctcaaccaaattaaaagaacaccatcaccttagccagccgttccaatccctcttgtcgtcgcacgtccgagatcgcaagacagctagcatctcacctccacctcattgtctaagttggtactgaaccttcataattaatggataaatattttttgcaaaaaaaaaatcatgaatggtattgtatttttttcagcatatggtttgtttgcatcatagttgtatgtttttggtagaatttgtgtgtttttttatctatgaactaagtagatttggttttctgcatcttttttccatttagctatttttttcgatagattctcgatggtattcttgttagacttttatttgggcttacattatattttattggttttattaaaacttgggttgattggatagttctttgct

SEQ ID NO: 120790 - DNA, 942 bp, Cannabis sativa
aaatatttatccacccctatcagttcgtaagatctttaaccacttaccttaatatttttcaaaactgctagaaattcatgaatgaaatacttatcatataaattcatagaaatttaagaagagagagttgaatgccttagtgcttctaaactcttaagtgcatgtgtcgaatgaatgaaaagagagaggtccctttcacgtagggttaaggccatttatatagtgttagggttttaaatgacagatagaaaatgtccttaaaaaatatggtagttacaatatggtgaagctttcctattttcgtgggcagtttaagtcgttccgaagttgtaagggttgttgaaggtcttctagaaggcctatggaaaaaaccacaacccatacaggctgtcaggatttgcattacgagttggtcggccaaccctatctaaaagctgctcggctatcttcattccatctctggtcggccagctgatgacctggccagggtcttgtcaaaaccttatttttcagcttgtgttattcttccttgataccttaagacctggtggtcaggaagttaccttgcattaagctgtctagccttttgtaggctgtgagctgttcgatcttctacaaactataagttgtctagccttctgcaggctgtaagctatccaaccttctgcaggctataagttgtctggcttgctagtcatcctgccagggtctatcaatacttgtgtatttgtgtctttgctcttgactttgaagctgtatggaatgtacctgtccgattgtaatggtttctaccacgtgtctactagttttggccacgtgaaggtgccacatcaggtgggcagaaattgggataacaagcaatatctctgagaactagtgactagctttgccagaacacaaaaatggactatgtgatgtcaaaatatcacttaagcatcaaaa

SEQ ID NO: 120791 - DNA, 6088 bp, Cannabis sativa
  modified_base (88)..(99): a, c, t, g, unknown or other
taacataccaagtgtttgagagcacatcaataatattagattccaagcaaaccatcacaagaaaattacatttcttctctaagtgagnnnnnnnnnnnnggcaatcagctttcttatgcccgaaacattgataaaagttgtacttccctttgaaaaactcattcttatgaacagttgaagatgagcttgcttgtccatttcccttaggatttgtatgttgctccagtatttttcaatccaaatggcatgactttgtaatagtagagccccatatttttcacgaagctcatatgttcctggtttgggatgtgcattttaatctggttatatccagaatatgcatccatgaaattcatcaattcgtgcgctacggttgcatctaccaattggtcaatccttggtagtggaaagcaatcattaggacatgccttattcaaatctaagaaatctatacaagttctctatgtgctatttggttttggtacgaggactggattagagatccacgagggatagaaggcttctcatatgaagttataagttaaaaatttgtcaacctcttctttgagcgtattttgtctctcggtatctaatggtcatcgcttctaacattttgctggataattatggtcgatattaaggtgacatgcctgagtggcttcaagcaaactgatttgggtttgtcttcaaaaaagtgattaattgctattttagttcttctccaaaacttttcccaatataaacacactttatgagacgttggtctaaaatcacctcttccaactctttgattagcttgagttggttgttatcatcttagatcctaggatccaaattttctatttccttctcgatttctttagtcaaaattaccatcagttgatgactggctcttctatttctaagtcccactgtataacactcttgagccaataattggtcgcctctaacggttcccactccagaatacgtagaaaattttaaggacaagtgctttatcgagctcactgcccccaatccaattaaagtcggacgacccatcaacacgttatatacaaagaggatgtcaacaatcgaaaacacttgcatttgtgtcgcaaacaactgtggttcccccgtagtcaagggaagctcaattatgcataagctcgcgacactgttgcttgtgaagccgcacaaattcaccatacaaagtcttagctttgccttttctaatcccatcttcttcaatgtttccttgtaaaggatgttgacatagcttccattatctactagtactctcttcattcttttattggcgagttaaattgttatcatgagaggattggcatgtggatatcgtacatgttttgaatcttcttcagagaagataatgggtggttcatttcacttcattctctttaaagattctggagcgaatgctgataattcatttttcacttcattaatgtacctcttttgcacactattactgttccctgcgaggtgtggccctccaaaaataactaagatatcctcaccctctacggagggaggttgcaatctcaagttattcgggttattggacttattaggctcatttccctgtgttctaatgtattgcctaaagtatcctcacaagatcagactttcaattttattttttaattgacagcattcctcgatggtatgcccaatatctttatagaaacggtattacttagttgaatctctcttattccttgcgtgcctcatcagttatggtatgcgaaatgcaactctattttcattgacaaggtagatattctcgcgagtttcatttaattccatatgcactgaataaatgggtacatacttctcttggtatttgatacattgggattttccacctttgttgtcacggtgctcactgttgcagtgctagtgttgggtttatctcccgagccaatctttaacaacttcatctcattttgtgcttcttttttacgcacaaaaatctatgctctttcattaatattccttaaaggacacccttgtaaatcatcccataactctcccaccccagtggataaatcagttgcaattccaacctcaagggttgttagttgaatgctatcattcaaatttctaactttagttgaagttttactaaagcgactcatgtacgcatgagtcgctttaagggactcttctggttgttgtttgatgttagtaaaaattgatgcatctggtcggcaatctcttgccgcttgaaactactttttgaaatctttcgataattgttcccatgttatggaatggttggtaaatttatcaaaccaactacttgcagctcctatcaaggaagttagaaataatatgcatcataagtttttaaaaacattgcttgctcgcattatgttgttaaaattatttaagtgggcgactggatcagtggttccatcatattacgagacatgcaaatttttaaatccttgaagaaattgtgaataggatgtcaaggtggaatggctcaatttcttcatctgaatcgtatcctagcagtttgccatattctccatcttgatatttcttaaatgttgtcctctaattgtattactcgtaactgaatgggatccaaggttgttgatttgcgttttgattaagttgattatgcaaattgggtacatttcaattcaagtgttcgcgaaggtctggctgccttcgatttaacctttgacggagatcaagttcacgatgcatttgctcataattactcacgaacctagtccctgagtaactttcagattggtaactatgcgagttacttatactttcttagttagtaaaataacgtcgagatctgctcccatctcacatttgtctatttgttccagtcgacctactatgcctgtaggatcatgattctcttgtacttataattgcttcacgcatctcatcttgcattggtcttcttctttaaaagagattagacacacgtcctctactcaagtaagtatgcatattctctcggtctgtgcgagaaggcctttttggatgccttgggggacaaccataagacctaggttggcttccaagatttcttccatcattatgagggatttcctagtttcatggtcacaattgtctcacctctgcgttcatgcgagatgactcaggtatattagtttgctcattctcttggtttgcaaatccatgggaagttcctggagcattgagtcgataatcttgatttcttatattatttgggttgggttgattttctctatccattgggacatccctcacattcccaggttgttcttccaaagcattatgggattcccttggttattctcctgcctcctgatcctggatccttgaggtcttccttggggtctccttacggttggattaggatggttttaaggaactgttccctgtgtagccctggctgtcgtgacttttcgctccaacttagcattttgtcggtttaattcagccaggcattgtcgaagtatctggtaggatcataggcatcttcacttcttctgtcggggatttgctcaccaataacattgaaattaccatcattcctccctgatcattggcattttagatgtgttggttctttgagatcacataggttcttttctaagacgatgggtagtttcctctggatgatttccttcgtgtggaatgttatcagccattgatatggatttgtaattgtgtttataaggacggattttttcaaagtttttatcaccaaggttctcaatgaaagcatcaaactgttaacgcagattttcattaactaaatatatagccttttacacaagaaatttactacagaatttaataataataatgaacaccagatattttacgtggttttacagttaaaatctgcatactatatgagttcgtattattagggatatttatttgaagacagagtataattctcaataatgataaataatagaattctctctttattttgttgtcccttttcccatgaattttgcccctatttataggtgtataggttagtagttatttttattgggatctattcacttacaactgctcatgatacgtggacattcctcacgttttatttatatgcacatgggataatatctaataacaacccaactgctcttttcctttatcctttaaacggttatgctgactaagaaggttgtttctcactgaatgtgagttatccttcttatccgtcttttgaggaaaaatgctaagcattaatattcttcttctcgcagtgctcttcatatcgtaaagttatttgcaaggtggtgttaagagggacatggatgaacgtaatcttctccatgtataattgtgtgggtcaatgagttgtaagcttttattcccaagtatgtaggtcaataagctgtaagatccttgatgtctcatcttgcatgttcttattatacactctatttattccaaagcggacatattatctcgtcaattatatatatctgttaatagttgtaattcttatctcacatacgcttatgtagtcaacgagtctaaatacttctatcaactttaattactatattctttgaactgtttcatattccttttgtaggacacatgtcagcttctgatgaatagccgaatttcgagtatcacaacaccaatagtaaaaggtggcaaattttcaaagggccaatgtccacaaaatgataaagagagagatgaaatgaaagtggttccttatgtgtcacttgtgggtagcctaatgtatgctcaagtatgtacacgtcctgatattactttggttgttggtgtgtgggtagatacttgagtgatcttgggcttagccattagaaattagcttagaaagtcatgcagtatctagggtaacaaggaacatatgttgacttatcggtgagctaacactcttgatatagttgggtttagtaacgccaattatgcaggatgcgtagatgacaagaaatccacatcaatctacatttttatgatggctgaaggagctatttcgtggaaaagtgtcaaatagacactcacagcatcctcaacaatggaggcagagtatatggcatgttaaaaggctacatgcaagcagtatggttgcataatttcatttcagcattgggtgttatggactccatctcgaggccgttaaaattgtattatgataatttcgcagcaatacctttctctaaaaatactagaagtacttcctgctctaagcacattgacataaagtattattttgttaaagagaaagttacagagtctcttatttccattgaatacactcctagtaatggcatgttagcaaacccactaacgaaaggcttacccatatgtatatttttggagcatgttgctcgaatgggattgttaggagcctagcttgttgagctcggtgggagttttactattatgtatcgaatatgctggtatcttgtatgaaatgcttatgacttgtattttgaacttgcataatgatgttgtagtcacttctagttattgttgtcatatgtatgcatgtatgcgttgtttactgaagtgacaggtattaaaggagatgaatgcgcatagtctcaattttgttgtacctcatgcatgtttggttaagacataaatataatataatatatatacataaatataatatatatatcacaatatatagtacgtactaagcgatcaatataagcgcaaaagatctaaactgtaatctgctctattaatatctttatatattaaaagtgcctatttaacgacaaatctcggtttaacgttttgttatttttattctgttaattttaacaaaatctaactccttcgttaactcgaaccgttcaatccaaaacgcacagttgattcctctttcttctccctcaaactcaaaatcaaaaccattttatgcgatattcttgatccttcgattctttttttttttcaaaactcatattgttgttgcgattttttttctcttccaaactaaaaaataacaatcgaaccaatataacacctaatatttaatatgtcgctcaaatctccaagactaacaatattgaaattccgtattttaatattcacagtttaattatttaattaa

SEQ ID NO: 120792 - DNA, 1398 bp, Cannabis sativa
gcataaaacccaacagttctttcactcaaaggcatcctctcgtagacgtaataataatattgtttgccttaaagatgctatggggaactctaaaggttgggataatggtttgggggagttaatggtggattactttgccaatctttttactgctgaaccgggtagttgggatgatgttttaagttgtgtaaatcccaaggttaatgaggaccaaaatttaatgttaactaggcctattgaagatcaagaagttaaagatgcgttgttccaaatgcatcctgataaatctccagcgcctgacggaatgaatccaaagtttttccaaaagtatttgcatattgtggggccggatgtggttgcttgtgttaagaatttttttgtgtcagaggtgattcctgctgggatgaacgataccaatattgtcctaattccgaagaagaagaaatcggatcaaatgagtgagttaaggcctatttccctttgtaatgttgttgctaaagttataactaaagtgcttgccaatagattaaaagtgttacttgcggacattatttctttgaatcaaagtgcttttattccggggagattgattacggataatataatggtgtcttttgaagttggaccttagcaaagcttatgatcgtgtggattggaatttcttgagggctatgatggctcggctgggttttaatgataaatggatccgattgattaatggatgtctatcttcggttacttataatattgtcagcagtgggcttacattggggcctattattcctagtagagggcttcgtcaaggcgaccctatattgccttacctttttctcatctgtgcggaaggtctgtcagctcttattcaaagttttaaggaaaggaagctcatacacgggtgtaaagtggccaatggcgctcctattgtatcacatatgttttttgctgacgatagtttcctttactgtagagccacagagagggaagttgctaatatccagcatatgcttgatctctttgctgatgctttggggcaaagagctaattttgacaaatcttctgtttttttcagtactaatacgaatagtcgaatgaggcaagctatttgtcataggctgagaattagagaggctgaggaaaataacaaatatcttgggctccctagctctattggaagaaataagactgctgcgtttagttatgtggtggacaaggtgcaaaagaggattcagacttgggataataagtttctctcgagagctggcaaggaaattctaattaaagcggtagttcaagctttgccggcttatactatgaatatgttcttactccctttgggaatttgccaacaggtggaaagtgctattagtagattttggtggaagtctaataactccaacg

SEQ ID NO: 120793 - DNA, 1283 bp, Cannabis sativa
ccaggatgacataatcttcttaacccatggggaaccatataacttctcactaaatggttgcacccacacagaccttattagtatatgtttccatgtgctagatttggttggtttttgttgctttgaaagtttcttgctaatagtgtgattgttatgtttgaagatactctatagttgaagatggtgaaatccttgtgtgataagattgcaaacataggttccaagatggagggtgttaaagcaaaagggaaggccacagctagggccactaggactcgtaaaccaaggcttcctagctccacttcttcatcttcgagggtttaggaaattcctcctttgatgaaggctcccccaaaggttccaagttatcaggctcccattagaaccgaaaaagccttagtcgcaattggggaggtttctcgagaactagttgtgtccaggagtggcaaaactcaagtacgccaaatggagcaccaagcgctgatggaagcttcgcttgccttggtagcagaaggagcaacccaagacaatgtagagaccactattgtcttggatgaaagcttggatgggccagtcttccccaagaagggtgttcttgtgacaattaagtgctggaacctttctccccaatcagagagggaggccaagaaggcaaggtttgcttctgataggcaacgttctctaggggagatgaagacctttgtggatccactactccttcgcaaccaactctacagattacaataccatcattaacacaattttcacagccaaaactccaaaaacaattaaaccaacaataaactctgccattgttaacacagccacaacaacgacaacaataacaacaacaacaataataataacaacaacaacaacaacaacaaccaatgtcagcaccacctaattaatctaaagacatccatgttgggatttgttttacaaggatctagatttactaacatgcatgattaattaacatcctaaatatgaattctctaatacgatgaaattaaacgggtaagagtttagaaaaccttacattgatggcagcagaataatatgactcattccgcttagatatctaacccttattcgaatctatcttagagtaacaacaagatctgtgcctagatctctttctctccttcgggttggttaccaccgtcttctgcactatgattgagtacatgacctgatatgtgtggacatggtactctatcactatggctcgagtatgaagaacaatgaatgagggccaaaatcactataaaaggagtctc

SEQ ID NO: 120794 - DNA, 1010 bp, Cannabis sativa
tgaaataagttttatttagggcacaaaatctaacactttccatatctgcgtgtgaaaagcacgagtcctagacttgaagggtgtcgttgttacaaaataggttatgttaaaggcgaaccggtcaggcttgggtggttgtgcatgtatagcatgaatcacccaaactaccgagacttttaaatttaatgtttaggggttactttaaaagttcatgactgttatcctgattgtttcgtctttacttatgtttaaaagttttcacttgttttggccacttttttatcatattgttgacatcctatcgtcatttcatcgacatcctatcgataaccaacaattacgatggaaaatagaaatttttactaaccttcgacagaaatcaaaaaaccatcgtcaaatcatcgataagttgtgcttaaatatattttccatatgttatcgacattatgtcgatatactatcgacaaactatgttgcatctactttagactgtattattaataaaatgtcgataagttatcaaaatcttgttaataatggtcatccttgtccttttattgcataatattaacattttattgatattctgtaaaaaaatctaattttcgagagaaaatcagatctggcatttcagaccaaaaaatagtaaaataataacagttcaaacaaacaccacacacatataacaaaaacaaattacatattattcataatgtctaaaaaatggttaaaacacaacttacctattataatggtgaatttgagggattgatgtggtctggttgtcaaatgtccaccatagtcagagagattaaaaggaaagtgagtgagaggaggcttgaaccaagcttagagagagggtatcagagagagagagagagggcaacagattgagagagggtgtgactaggggtgagcataaaatccagaaaactaaaaaagccgttcaaaatgacctaccgaacaccgttggaactgaaagcgatgaaaccgaaaatcaaaaaaactgc

SEQ ID NO: 120795 - DNA, 830 bp, Cannabis sativa
ttaaatgtaatatatcaaatgaatcttgtaaataattttgaatttcaattacaaagaaaaagtttatatcaaatgaatttcaatttataaacattcataaaacttttttcatgattcaaattatctaaaacaaaaaaatattctaaatgtctaataaactcatgtctagtaaatctcattagatcaatatatgagtgagtttataaagtcttgaaacttaagtccaagcacagtgaagcttgatttgacattttgcaaataactaacggttttctacaataatcactaaattaaaatatgtgatacttaattacactaattataatataatattatactactagttttgatttataacattgtataggtaggaataatgttgtaacgactttgctatttttgttgcttcatagaatggcggttgaccttatgtaaatcaacacacgagtctttttattttaacgtgtattgtcttcactcgcacgctttctgagaataacgactagccctacaaactaacacaagtaattttaatattttatcctcactcgcactttttgaaaataatgactggccttgcacatgctcgttgactcaagccaattagaggcctcgggccaaaaaaaattaattggatcttttttatataattattaattttttatgtttttttatatatagtgataacagtctaaaatatagtatcttaaaaatataattgggcctttaaccttaataaaatattaaatgcagtatctcaaaaataaaggataattacataaaacattattttttgtaaaattttaatatttttaagttcaatttttttt

SEQ ID NO: 120796 - DNA, 2387 bp, Cannabis sativa
ttgagggtggtgctgatccactcaaggcggaacagtggatgagtacgataacatccatttttcatttcatgcgggtcaaggataatgatcgagtcagatgtgccatctatatgctgcgtgaggatgccgacatctagtcggagattgtgtctcagggtcatgacctcaataacatgacctgggatgcttttcagacattgttttacaagaagtattatagtaagtctatccgagcaacaaaagcagaataatttatacaattaactcacggccgtatgatggtgacagagtatgccactaagtttgatcgattggcaaaatttgcttcggatgaagtggcttctaaagctgctagaaaggctaagtttattcggtgtttggatgaccatattgcacgggatgtgattgttgctgctaaacaacttgggattacttaaacatatgcaaagatagttgagtcggcccttgctactgaaggtacagaagctccgatacgaaagaagaatagtgcaagacgagatttatgggaacaaacatctagtactagtaggggtaattaatcttgtgaccgtaagaagagctccaatgattcattggctgcaggaccaaacaatagattccaaagtaaccaaggttttcgccgtggtgtaaacaaaaacatgtggacttttccagaatgtccaaggtgtaagaggcgccaccagggcgagtgtgaggctagggcctgctttcagcgtggggcagtgggtcacttgaagaggaattgcccatagccggtgtgaccagaacaaaagaaagatgatgcacctattcctgctcgggttttaccctaatccaggccgaggctgatgttagcccttcactgtaacaagtcagctttctgttgttggtactttcttgattgttttgattgattttgatgcgatacatttttatatttcaagtagagtaattgaaaacttgagtagacctaatgatatgctttcaagaggtttcgataccttattgcctactagagatctggttatctccagcagatgggtttggtctcttctagtatttgtggaaggaaggcagctgtcaattgatttgatagagttaaatctggaagattttgatgtcattttgggtatggattggctggaaaaatacaacacaaccattgattgtaaaagaaagatggtaacttttcaacctaagggtgaggacccctttgtatttctgggtagagtgcatggatcccgaattcccctaatctcagcgcttaaatcaagagatcttttatgtgtggggtgctcccagtttcttagcaagtgtaatggatactaccaaggaaccaccagagggaccagagcatgttccagtggtttgagaatttctgcatgtttttctagagaagctactaggtttaccaccgaagcgggaaattgatttaataccaggggcagagcctgtatcaagagctccttataggatggcacttgcagagctaaaagagttgaaagttcagttacaggggatgttggatttaaaatttactagaccttatacctcaccttggggtgcgccgattttgttcgtggaaaagaaggacggaactttacgaatgtgtatagattaccgagagttaaacaaattgacaatgaagaacaactatcctttgccaaggataaatgatttgtttgaccagttgcagggaaagactgtcttcactaagattgatcttcaatctggctatcacgagttgaggattggggaagaggatattcctaagacaacatttcattctcggtatggatactatgaatttctagtaatgtccttcagattatcaaatgcctcggtagcattcatggatttgatgaactgagtgttcaaagactttctggatgattttgttattgtctttattggcaatattgtaatttattctgacacagaagagacccacaaaagacatcttcggatggtgttgtaatgcctcagggagcataagttgtatgccaagttcaagaaatgcaaattctggttgcctcaggtgagtttcttggggcatgtggtgaatgaagatggcatttcggtggatccggtgacgattgaggcagtgagggactggcctcaacctaagtcagaaactgaggttagaagtttcctaggattagtaaggtattagttgaggggtttgctaagatttctacgcccttaacagaatctcgaaagaactgcaagtttgtttggactgataagtgtattaatagtttctaggaactgaagcaaagattaattaccgctcctgtgctaactttaccggtcagcgatgaaaactttgttggaaattattttaccaggatcttagatctactcccaagtatgttgattaacaccct

SEQ ID NO: 120797 - DNA, 4116 bp, Cannabis sativa
  modified_base (2021)..(2023): a, c, t, g, unknown or other
  modified_base (3579)..(3588): a, c, t, g, unknown or other
gtcttgaatgaagctagtacactcttgatctgcaacatgcatcttaatctgggtgtatccggagcaggcgtccatgaaggatagtatcttaaatcctgaggtggcgtccaccatctggtcgattcaaggtaaaagaagcaatctttcggacaggccttgttaagatcactgaaatctatacacacccgccatgtcccattccgattcggtaccagtatcggactacccagccattccgggtagtacacatcctggatcaagtcattggttagtagcttctacctctttttctaaggcatccacttttatcggatcaaggggacgccatttctgctgtaccgacggcatgtctgggttaacatttaggacatgggtaatcacatgggggcttatgccggtcatatccccttggcaccacgcgaaaacatctatggctgcccttaatgcttcgacaatcttgcttctttcctccagctctaggttttttcctagacggaggatcttggtagagtcgaggtcgcacacttgtacttcctcagtgttctccataggttctacagttttttcggatcccacgcggggatccaactcatcttcttccatcaatcttggttcgtttccctcatggactacgagttttaacaagtgcgttgcaacattgtagcattgccttgcctcttcctagtttcccctcactgtctccactccggcttcctgagtagggaatataaggtataagtgccggatggaggtaattgcttcaaaatcgaccaaggccggccgacaaagaatggcattgtatgctgttgggtaatccaccaccacgaaggtgcagtatttaaaagtgctctgtggggtatctgggcacagggtgacagggagtcttactttccccattggaataagcgttgtcccattaaatcctatgagttgggagccgctggacgatagatccctgtccgtgaggcctatagccgtgaaggcttctttgaacaataagttcacggaactcccattatctaccaatattctcgccacaatcttattggcgatgggagtctctatgaccagagggtcatggtgaggggaacacaccaatttggtgtcttcttccgtgaaggtaatgggctggtccatgagttggggcctttgcgttaggagttgggtgacttcccacacttcatcgtgttttatggccccaacataacgctttagctcgcttctaacggttccgccaatatggggtccaccggagatcatggcgactctcccatttggtcttggtggcaatccagggacttgttggaggattgctcctctgggggtacaacgggtgctggttctccgagtatacccattggtgttccttgaggtaacaggcctcctactggagcagggttgagatggggtagtcggttcttaatccattcatataaatgacctagttggattaggttctcaatttcatctttcaggttcttgcattcattggtactatggccaatgtcattgtgatactcacacctcttcttgggatccctttgggaactatccctatacaggggaggaggctttcggtaatgtgtattttgcctggtggcaaagtatacccgctcctgtgtgtgcgtaagctccgtgtattgagtatactgaggggtgtatcccctccgttgtcggttatcctctgtctgattgataccctttgaggacctcttgcttcaggagctctgaggaggtcctgttaggctggtggcaggcgcagactgagatggagcttgaccattcatccccgaggggttgcccacgggcgtcccaaagtgtgatgatgcggtagccaaggataggctttgattatatcatccgggggtagcagagaattgtatgccgctcatttgaggagtggctggaggcatggctcccaagagttgaagaactccgagtgcgtatcttgacactccggttgggtagtatcctccgtaagccactatttgggcttcttccaaattgatgtacttttggannntcttctggaaatcttggagattgggtgctccctcctattgtaaatcgttccagaaaggagtccccatacagatctcggcttggaggagggcaagctgttgtccgccatccaccttctaggtctttgaagcctattctttgaatcttttcataaagttctttaaagtttccgcaggcaattgctttatggtagttagggcactgacttcaaggttaatctttctcgctgccacaaactgtctccaaaagttgacttgtaatttgttccagcagtctactaatccgggttctaactttttgaaccattcttcagcggaaccactcagcgttaacggaaagtataaacactttgcatcattgttgaccctcataacagtcattacccgattgaaacatgataaatggtcactggggtccgagtctccggtgtatgcttccatctcgagcatcttaaaattcttgaggagctttgcatctagtatgtgccgggcgcacggttcccgattctcgcaatcagaatctaagtcatcccctttttgcctctgggagaccctagcaatgtctttgcgtagtaacgctaactcaaccatcattccttcatttagcgtgcccacagaagtcgttggtgcgtgtttctttttgtctagatggtctcgtaagtcaccatgtttttgaattttagccttaggtcaactggagggcacctccggtttttcctcctctctctccgagttcctggtgcacggatacacttttttggtcctctcagtcctgagggccaagactcgctcgagggagctttcccctctgcagacctttcccttttgggaaatctgagcggactttccgcggatcctgcacctttttcttttttttttttgggattgaagttggatttttcccagggttttcctcaaaagggtaccgtatagggcttggttccctggtcttggatttttgagaactcggtgaagactcttccggtgtttcctcagctcttgctgggatggccttaggatgtatgtgtatccctgcagtcttcatggctttttgcatggcgaccatcacctcttgcatcctactattatgttctttttgagttgcaagctcggcttcatgatctgtccccttttgccttaagaccagtagttccgtatagctaccttcgtgtcgtacccttcgaagttttcttcgtagtcttcgtcgttcacctcatcttgctcctcagagcccacattcacacttgaggctacttcttcgccctctgggttttgagcatcctaaagaggacaggggtgacgtgttttgttacgagtttccaccattgttaatcttacttttcttctgactgttttctatctgacaacgcttccttcaagtctcaatgaaagctccaaaatgttgaccgaggttttcggtaaccaattaaatagtagaatgagaagaactatagaaagtttaatgcaagtgatttttacgtggttggggcattaatgagccttagtccacgagtcctttttatttatgagagtgtttttacagagaatgttcttggtnnnnnnnnnnctctctctctcttctttactctctttgattccttaattaatcgatcgaccccttttccattctctctatggagtatttatagtatttttcagggggatccctagaaagggatcacttgtctttttgtgttagcctcataggggcacaaattcctaacagatacaaaataggaaatacatgacccatactgtaggtatcttaggggttaggtggatataatcctttatccttccttgattgatgtgagtcctcataatgtagccgtcactagactcgtcgattgttgtgtaatcgccgtaaaaagggcttacgccatctgtcaaatccttttatggaggttctgatacgtttcccccccatgcagcattaaatgcgtagtgactgttcgaagaatctctttccttcccaaagatgccctattacagttcttgtaaagaccgcttagtttaatttggaaattagcagctaatcacgtttaattatgaaaattatttataggtatttaaataattattatactgttattat

SEQ ID NO: 120798 - DNA, 1564 bp, Cannabis sativa
aaaccgtatttttgttgttttttctttttttgttatttttgtgcatttgtgaaattaaccaaaaaaaaagaccaattatgaagtctctcactacaattttgatgtatgtgtgatccctcaattgattttagctcttggattaatagataaaaatatatttgtttcatccttaggttggtaaatgatactatgaaagcaaattggaattctactaatttacattaattattggtgttttgctaattatcatgtttaatttatatatataaaaagtacatatattaataatttttttattttgttttaaattaattttttttcttaattaataattttcatttactttatgtcttatagaatagtttttttttccgaacagaaaaaatactttaataattattatatcatatgatagtcccattcataacaatagatttcatactttaaagggttttttttttttaatattttaaaataatttttcaattaataatataataaactatccatgttaatactatcatagcaatgacacatcaatttttaaagtgctacaccaactttagaaacataaaatgaaaagtgaaaaaaatctcacaactattagtaacatgcaaagttcaagaaaatatacttttttgttagaggttgtttatcaaccctaatgatgtaaacattatttttgacacgtggtaagaaggaaatgacagggcaattgacctggtgtcaagggcctcgcccaacactcaagttgacataaagagctttcgggtaggtatttgggtcccgtgaaatcgtttccaacccactatccttcaaatagtctaagctaacaagccaaaaagactccaagtcacagacctcgaggttgaggatgtcccctaggcatcccagaaattaatttggtttcatgtgccttgcccaatcttaggtttatttttatgcattttcagagtcaattttagtgtgtgcttttagtatttttatgctttattttcaagtttacgcttggttttaatggtaaaataaatcacaagggttgaaatgagagaaaatatgctaaataagatgaattttatagatttagcatatgaattttagagttgtaagatacaatagaaaagaattttaagttttagatgcttaacacgctctgtttgtgatcgaacataattcaaactaagaaattcaaatctacgattgaagaacaaagcattgagcttaaaggtcttattattggaaatagttttattaggatatttaatttactagtcacctatgttttgattatatatataatctgacaccttaaacatgtaatttctaaaaacaataaataaacatagaagagttatgaaaatctttacattggttgcagcggaatactgtgactcattcagttcaaatctctaatttttgattcctttctgttgcagaatataattaagatcttacgaacttgaattctcctttagtttgattgaaattccgtattttaatattcccagtttgattatttaattaaatgattaattaaatgcagaataataaaactggtactgaa

SEQ ID NO: 120799 - DNA, 2822 bp, Cannabis sativa
  modified_base (35)..(37): a, c, t, g, unknown or other
  modified_base (69)..(71): a, c, t, g, unknown or other
  modified_base (2797)..(2797): a, c, t, g, unknown or other
atctttattaataagtaaatctggttatattgaannntaaatctggttatattgaaatgggttttattnnnggcacaaaacccaacaatggaatcaacaagctggtcggccactacctccataagttagtcgacaatagctttatccaaacagctaggcaatgatccaacatggctggccacctagtttgtacccgggttagcccgatccgctaacattctactctcacacttctattttactatgaccgagaagtaaaccacatattgcaagtaaaatcccttcacaaaagggaaaaataagaggccaactcaacgcagcatgtcttctcacaaagagttatcaggcccttcaacaaatatattgaggaaagaaattcttcgtaagacacttaatccctgataagtattcatttacaacaatgatcttgtagcaagcatgcttggacacaactgaaaaaggtttggatcgagttacaagataacaataaaggtgcatttaagcctagaaagtacaacaaaaacttagagttggctcttctaccaaaatactaaagtagagaacatttcggtaagtcatctcactagccaacttgtatattggttcctctaacatttcactatgcatgaatccataaaagagctagtacccattgttcttcagcgatggcctcccatcactcttcagtaatggcctttgcacggtaacccctgcagaggtagccaaatataaaagaactaatacctatcacttttcagtatcgcctcccatcactctttagtgatagtcgttgcatagtaagccgtacaggagtagccaaagtatgatttcgaaagcagaaactaagttgtaagcttttgtgacacgtaagaccgattgtgtctaaactacttgctaacaaagataacttcgtaaagttagtcttttttagttccacatgtatacacccggtagcacccccaagaaaattcccaagcaaggtctatgaaacttggtgaattgcaagtgaccaagagaccgcaagtctgtgtgctcacttgggggcacccacaacatacaatagcaaactagcatgaagaacttgtgtagagaaattttaacgctaagtataagctactaaacctgcctctaattcaagtgcagccatacttcaggttgccataaagaaaagtaaattcatatacttacatgtcaaggcattaagaagatagccatgacaatcatgtgtccatgcttagaggctaagcaatagtagtgttcgaaagcaaagtgcctataggccaaaaacaagaacatgaaagcctcaaggctaaatatgtaaaaatagattcaaatgcataaggccgaggacatgcaagaaccgtgcagttcaaaacggataaagcctcatgagaatcgtatagctagagaagaaccggacagagttcctataggaatcacataccgcgctaaggcaaggcaaagttcctggcaggttccaagccaaaaggcagagttccttgcaagttccaagccatagacaaaactctgggcaaccgtacccaagggtacttgccaaataaggtcactgtaaaaggttgggttttagtggagtataatatcaagtgtaacagcttggacaaaggttgagttttaagttgaccattataatataatagactcaccattaagtttcatgtagagtttttaaggaaaccatgtatgacactaaggttgtatatgcctacaaggtcgtgacatgattcttgctgaagtgaaaagaggacaaaaagttggccacctgcttggaaccaaggcttaggccggcaagggttcccaagcttcaagagggtcggccagggtcccatgactcagccaagaaccggccagggtcaccatacccaggcatgaactggctaagttatctagggtgaaccctaaagctggccaactcccatgattgaatcctaggactggccaagtctagaaaaagacccctagggctaagcaaggttagttttgaatccaagtgtgtgttttttcaaaacttgaatacgtgcctcatgttcttcatgaatcaaacaattaagaatcacaacaaaggccaatattgattcaatttcatcaagagataacacattatgcattctaaaactatcatgtggatcaaaataccaaaaagattataatctaacgtgagaattaaaaagtttccaaaagcttaaaaagcttgaaacttatcaatgacagtttcaaagaagagatatcaaagcagagttaatgaggcatatatggagagagaagatcaaagatctaaaatcatgcaattcaaaaaggcaatacttggctagaaaaggttgctcgacaaaggctactacaagcaagatgagagctggaacgtccctatctgaccagatgtttgaatagggacttaaggggaaaatgttatcccaacttttgtccacctgacgtggcatgtccatgtaagccaagacagagtacatgtgtaataccttgccaatagaatgataaagtctccttacaagatatggaaaaactatcaagcagcaagcgaaaggagttaagagagttgtcaaagagttgtaccaccatgtctggctagccaaggggagtccataggccagccaggatgagcttacatggctggccaagatttgaacacaatttagccactcaaaacgtgactttcagacaagggaggatttgttcgaccaaggaagcctgaccttcataaggaaaaggtgtacaaaggttagcctccacctacaaaggttgatgtgacagtcagtagtcccgngatccgtaaggggaaacaccgggta

SEQ ID NO: 120800 - DNA, 733 bp, Cannabis sativa
attttggaaaatatatggtccattttgtcatttaacaaaacagaaggtccaattggtaacttttgcaaaacacaagagccaaaataatatttacccatcttataatcttatatctatatctaaaatttttccaaatatattcatctatattttcttatttttttcacctttctaattatatgtaataataaacaaataaaaaaaaatgtataattaacactttattttagtcgtataattctaacgattacaaataaaatacggtaataataacaattttaaattaggatgagagaaaaaagaaataaaggatcatttcgtatcaggaggtttaaaaaccattatccctcattaattaggatggagacatgtggcaagagaatgcttaaggtctcacaatccaacggttatccataaccacgcttactccgactccaaaaagttttgatgacgtggaaccccaaatgggttaattataatgattacagtcatcttttcgaaacacccgattagacaaccaaaagtcaccatctcgtgacaacctttcgcctgcctctcgcttatagtttccctcatgacataagctgtcagtcgtgaaactaggggcatgtgttatagtgagaatttctcacctgaaaactcgagactaggcttccataaaaatgacacgtggactcactctcctcgaggagggctgagatgtcagtaggagacctcttgagtgcaaacctca

SEQ ID NO: 120801 - DNA, 900 bp, Cannabis sativa
aaatggtaaaacaagttgctttttatgaatataataaagataaaggacgaaacagcaaataatgcacaatctttatgacgagacgacgccctagagggaacgagaaagaggctgttttggttttgagacggttttgatttagagtttcacatttctgcttattcttccttcttttcttaaccatggaaccccatttatttcctcttcttctgcaactatctctcgcataatttctctcttttatccttttcactctgtaaaaataaaaaacaaatataggtaacttgttctggttctagatccgtagacgaaaccctaacattgtctgttttgctaaaattgaaatcctttcacttgttttcgctgatttctgttttttctgcttctttagaatttcaattcgagcttaggattcttccgccacaaatcgatttccatttcgtcgttggatttttttttttgaaattttctgtttgggaaatcctcttggaagaccttttgttcgatctttctgcccagggaaacactagttactatcgcctcctgtatttttttctgactggtggtgatttttttttggagggttttagggtttgagtgtgtgaaatctgagaaatctgagtcgtgaaatgaacaataataataataatagagggaggtaccctccggggattggtgctggtcgaggcgggcccatgaacgcgaatccggcgtttcagtctaggggacctcagcagcagtacgtgcagagaggtttggttcagaatcaaccccagtattttcatcaccagcaacaacagcaccaccagcaacagcagcagcaatatcatcaacagcagcagcagcaacaacaacaacaacaacagcagcaatggctgaggagaggtcaattgggtggag

SEQ ID NO: 120802 - DNA, 670 bp, Cannabis sativa
ccaaacctgcctccactcccatggagaccaatctcaaattaagcaactccaaagggaatctcctacctgatcccacggtttttcgaagccttattggcaaactcatatatttgactataacaagacctcacatctcctttgctgtcaatcacttaagtcaattcctaactagcccccgggttcctcatcttcatgctgcacatcgcatcctacaatacttaaaaaccaccccagcacaaggcttatttttttcatctaccacaactccaactatatctgctcatgccaagactagtctctcccattcgaatgtccaaatatccattttttcggacgctgattgggaaacttgtcaagacacaaggcgctcagtctcgggatactgtctcttcctaggcagctctcttgtgtcatggaagtcaaaaaaacaacaaactgtttctccggtctttctgcctgaagcagaatattgagctatggcaaatgctacatctgaacttacttgggttattgctcttctaaaagactttggcatcaatcactccaatcctgctctgctttactgtgacaacaccgccgcaacccacattagtgagaatccggtctatcacgaacgtaccaagcacgcggaaattgactgccatttcattcgcgagaaggttcaacaagg

SEQ ID NO: 120803 - DNA, 609 bp, Cannabis sativa
  modified_base (28)..(43): a, c, t, g, unknown or other
tctaattataaaattgaaaagtaaaaannnnnnnnnnnnnnnngtttttaaaaaatattttcactttgtcacttttaaaaaccgaaaattaatttaaaaagtgttactaaacgtcacctttacatttgtatttttccaactattatttatatttttcatgcagttttcagattctaaatttggatcttaagacttaaaactacacaatgaattggatatttcaattaattattaatttaattattatatataaatactataaaacgtctaattaaacttgtacatatataatattccaaaagatcagaaacgtactgtcattaaaattgatggaatattaatgaagaaaatatatatttgtaaatttaatatttaataagtggataaaaatatcttaaatttatattatattctgaaagggcaaataatatatatgaaaaatttgacctttcaaagcaatcaaaacaaatgaatttagctttcaaattcctttggattcattaagttgtattcttataatttttctttgtttttatgcatcaatagtaattctattcatgaaaaggaatatatgatcatgtttactgataataatatatatatatatat

SEQ ID NO: 120804 - DNA, 963 bp, Cannabis sativa
tccagctattgattctattcaaaactttgttcttaaggaaaccaagaatagctttcttctttgtatatccattcaagtattaaaataacttaattttaagttttaagtattggattaaattcttaaatgtgggctcatatgtatttatgtttattgttatataaattttgactcaaataaagtgataattttagtaattgtggattattgggtattaaagtgtcatggactaaatatgtagatacattaaaatatatttttaatttattgagaggctaaataagaatactaaaattaataatagtactagtcccaaaaaataaaagcaactcattctcatttctcctgttaagagagaaaattaaagaagtctaagtcttgtattcttggaagatcattactcaaagatctaatctacttatggacatcactaagttaattatctctattaagaaattgaggcacgcttcactattcatttttttttttgaacaagggctttagatctatagttatgcacttctaatagtattttaatagtatgaaatattttgtgtatggaatttaattttaatattacatattttatgtgtgttaaaaaattctaacattaagttctaaaaagcaagtttttccaaattgcagccaagattctttttaaaaataaaaagataatccaaccaagattatatatggaattatttcattaatacaaaaaattaataaaaaaatttataaaaactataattgtacgaaatttttaaatatttttacgattatttattattttgttgtaaatttcttttattatttttatattattttcatatagttttttaattgtttcataaagtaaaatatactattattattaattattattttttaggctaattaggattttgtcctttgaattttgacatgtattaaattatgccacttgaacttttaaggttgttaaaa

SEQ ID NO: 120805 - DNA, 1040 bp, Cannabis sativa
tggtatttgtccaatataaaaatcaacaaaactatcactatttaacactagcgacttaatattgccaaaaagttaaatgtttaggaaccaatttaccaaaagtaaagatcgggatgccaaaacttatatatttaggaaccaatttgtaaaaaagaagggtgttggccacccaaggaacgcgtcttgtgtccagccatttgcgcctcatcaacgatctctcattcttttggcaattgcattgacatttacacattcaatttcttcttttccaaaaagtcggtttaaatctccttgccttgctactgattatgctacagttttttttttcttcttgaggagtgacaagcttatctcttcagttaccattggaattaacaattgtagaatcacccataataattgttggactcttacccttacaaatcacctcgtggtccctcagtgagtcaaaagggtcgttccctcgcgacctaaatgaccccaacaagggtccctcatttctccactctcgtttgtccaatcgctcgcacccctcgaaaccccaggcgggggatcattcatctatccctctttggaagcctaaagaccatagcgagggtttgtcctcgcatcatcgagagagctaagacttcaccaacttaggtgagcctcattgaagtacgagaccctcggtctacactccatacatggagatgctacatttgagaagtgaccaacaccaccatatgaaagaaaaatataacaccctcatttattttaataaaaatattataaatgaacttgtatcaaaataataatgttatttttcttaaaaaataatttttaaagttgggtacccaatttaaaattccacgaaacatgtttaataagttaagaataactttcagtagaagatggtcaagaccacacgcagttacacaatccaacaagatacaccccacgttgcccgagctcaacttgccacaaaactgttgggttttatgcactaaataaaactcatttcaatataatcagatatacttattaatatagatcagaaa

SEQ ID NO: 120806 - DNA, 942 bp, Cannabis sativa
gagaattgggagaagttggttttcaatttcgtgagtgttgccatgtgatgaagcacttttaatggtatgatgacccactacaatcttccattttgcacttgactcttttagtgctgaatccacatcctgcacataataaatcacatatatatacacatattaattatacatatatacaaatttatatgtttttattaattattattaaaaataataatgaccttcaagagattagaaaggtaatgttttctgggtagaatggcatcccaatcatagacatcgtcctttggctctaagaaatatttgtcaacaaaaggagtagtatctacaaagaagaactcagcaatttctgcacataataattaataaatattacatacaataatttaattaatcattatatatattatgttaaatttaatttaattatatatatatgcttacctgtgtcaacaataaaagatctcatacaaatccatttgctgtccaattttctaaggacaggactaagttgtgcctccacatcacccctgtagtcatgattccctaaaactgcaaatatatatattaatttcaataaaatatatgggaaaatataaaaatatatttcccctatatatgataattatcttaattatttttataaatatttatgatttttcttatgaaaaatgatgttaccaaatgtgtctattactttactatataatgattttgatacattgattcttgttacgtaagtctcaagattatttttcattacataatatctcacattattattgtggtcaattatatttaattttaattttccttaacactgttttcaaaaacagtaaattttattttaagaaaattgtaaatatatataattagaaaaaattcacatcactgatttgtaaaaaaaaattgatggtgcatattttaagtaaattatgatta

SEQ ID NO: 120807 - DNA, 700 bp, Cannabis sativa
aaattattaaaaaataataaagtacgtatggaccccactatacagtacaacggaatacaatccgtaattttacaagatgggcacaaaatcggttgcctatgtatatatatacatatttgaaaaaacaaaaaacaaaatctatttgaatgtcttgaaatggatggtaatgatgaggtgaaacagacaaaaaggaaaagacaactgcgatggtccaataatatatgagggaagataaagtgcttttttatattgtacctgttataaattataatagtgtatgataccggataagttcagatgttttatatatgaaaattgttatattttcaatatttgggatttgtcaccagcataattttattttcttaagcagagaaaaatctcaaacttagtgcatctctattctctactgttaatactgcaccgcactattataaaaatatcaaaattttaaatataattattctattttaccatactagcccagccctctaattttagggcaatcttcattatcacactcatttttttccctctcctttcaatttgttgtatttttaatgtatttgcttaaagtttgttaggttgttgaattattattattagtaaaatttcattattgttgtcgagtgaatttcgcaacaccaaattatattattttattaatatgaaagagaattttatgggtaatgacaagtgc

SEQ ID NO: 120808 - DNA, 1524 bp, Cannabis sativa
cttgggttcccttgaaccgggtaaagtaacatccactataaaatcaattcaattacaattaccagttctgattcttcaaatcaaacaaatgagtgcttaacatctaatttttgtagggaaacccaaaaatttgaattttgaaatgattaattcttttttcaaatttcttataaataggactaggaacctttggtgatccttttagccattttaactcttaaaaaccagaacaaaagattttcaactaagttttctcctaagttcttcgaggaatttataggaatcttcttgacgataccattcgagcagagcaagaaagcttcaaattagtgagtaagttttcgattcctttcttctacacattcataatgaaatgcgtatatgatttctgaattttttgttgtgaattttgcttgttcctaggctgttctaggttggacgacacacacacctgtgcacaactcacggggttggtcctggagctgcttggacatatctcgagacgtgtaagtattgatggtgactttgagaaatgcacgccgagtgagtaggctaattgaatatgctctcgttagtcctttggttattaggcgactaatctcgagagttagcagcgctaatttttgggttaacagagagtataattgaaacccctcaattacctttaattatacaattacagtgtatttatatcgtccgtcaaacatgataaattgtgtaagtacctttagttacatataaatccaatcacagaataacttttcaaattatataattaccactaattaatgtgtaattaccaattatcttgccaaacataataataaaaattcacgtctaattagcatttgatatctaaacaattactatacagtgtaattattataacgtgtagcaattacaatccataataattacactgcatagagtacaatgcttccaaatctaccctcacaaaaatagaatagacgcatctatctataagtacgaaagtggtgctctttcatatcattttttatttttttatttttatggcatgtttactaactgtaattggaatcagaataattaatagaagaaatcaatctggttaaaatataaaataaccggaaacgatattttattttgttgtttactaaactgaccagaaaggaaatcaaaatcatttttttttatttacataatcaagataggtaatcagaatgacttaatttgactaaattatcatggttagaacatgtaattattttttatttatatatgattgaaagacatatttgactttttttatttttaattaataaaaatataattaatataaagtaagttaaggaaagtaaaaagtaattcttatgaaaataggaaaaacctttctttttgttttctccttaatttgtttagcccattagtttttcctagggatgcacatttcccccacggggatggggccccgcggggacccgcccctaatggggcgaggattccccgtctaaatggggaacggggatcactttttgtccccga

SEQ ID NO: 120809 - DNA, 1071 bp, Cannabis sativa
  modified_base (465)..(467): a, c, t, g, unknown or other
  modified_base (646)..(684): a, c, t, g, unknown or other
gccaaccctgccaacccgacaggcctaacaaaatcgaccatcataactagtccagttgaccctgctaatctggttgatcccaatgaacagcctctgctgccgagggtagatccaccattggcacctcaaacagaaggttttgccaatgtggaacagcccccatgcaccacaagtgactctattccccggtactatgcagggaaaataggactaggaattggtgagcctcatgtagacctaggagaagactttgaatttgccagacttagagaggctgtaggccaagttgaccaaactgaagagccacccgttgttggttctgatgcttttgcctaatagagacgcatattcttgaggttaatggatgaccaggaggttatcctccaggctcatcaggcagagctggagtgccgtaacagggaagctagtaacctgataaggtagtgttggggattattttaccannntctagatttactaccatgtacattgtttagcatcctaaatatgaatttttaaaacaatacaatttaaacacatataaagttgaagaaaccttacatttgttgcagcagaattaaatgactcattccactcaaatctctaacccttgttcctttccgtcacagagtattatcaagatctnnnnnnnnnnnnnnnnnnnnnnnnnnnnnnnnnnnnnnnttacacactatgattgagtacttactagctatgtgtgggaatgtactatatcactataagagatgaaaatttgaagagaaagagagagagaaggattcgaaatagagagaacagagaaggctcaaatttcactgaaagcttaagttgcagcaactgtaagttttgagtctttcactatctatttataggaatccttctaggtttaggttttaaattatttgacattaaaaaattgataaataaatggtaaaaagaccttaagtggccggccattaggatgtgggccccccatttataatttttctatttttctcaattatttatccttttctttcataaatggcatattttccaattcaaccacttaaatatcaaaactatttattt

SEQ ID NO: 120810 - DNA, 2089 bp, Cannabis sativa
cggcgcgtgggccccacgcgcggtgaatctggacgccagacttttgggtttttgcagtcaggcagctgggcagtcctcctatgtgggcggtgagaaaaatttttcactccaaatagggttttcgaaaaacaaccctaaactcaaaccctaatttttttttttgttttttttttcagaactctaatttcgaatttcgaattttgaatcacaatggctctgataccatgtagaaaatagtgattcgaattatgtgtatcgatttcatagaataatacatatttatatacaaagctaggagattaaatatctgctaaatatctactaaatatctaactcttttacagctaatatacacctaatatctaacaaatataaatattcacttaagcttctacttcttaaatttgcatattaattgtggaaaagtttcgaagttacatggccagtcaatcagattgtggctgaagaattagcagtattagttcactagtatatcgactcataattacttgtagggagaaaggggagactagaatctttctaatgattgaacatgtaagtagaaagaagaaccatgcggaccactgcctgaaacgactatgtccaggggactgcccccgcctcccacaagatacatctagctcctatagaaacagaagcacctcacattcccaacccaaattgaaacatacttaaatgattaatgtattgaaacaaacctgaaccattgggaattcaggtgagatgtaagtccatacaaatctatcgtctagcaatgtgtgatcctcagactcgttatctgaaaagtcagtatctgattcgccaagatttctgagatggcccattttaaatcggacagctttacatgagtatatcgggtagcggtgctgaaaatatgctgatatacaaaaacaaattttcgttaagctagaagtaaaacaaaaactaaaccagagatgaaagatgcaatgcaacacagcagagtaagaaaccttggaatggttgaacatggatttcactgaccagacacatcttggtcactaactcataaagtagtgtctcaggaacagatggttcatgttgcccactacttgaccagtatgaagctacattctgatttctatccccgggttgcaaagtatgcacaatgctttcagttgggtaattgtcagtgctagatgcactaatagcagttgataagcaatcatttgtaatgacaggagaaagagctttcgctaagaaggaaaatattttatggttcctctttaacaattcaaattcggtaccgtttctaagaccaatatctactggttctatcaagttgtttagttcaacagcaccagatatttcaggaaacttctttaagcaaagctgtttacagatgtcatgttcaatcactgcacaatgtaaaaaataaaaaaattgacatcagaactgtttagagactgaaatttagatctctttccaaattcttattaaaaccatcagatgtttatatccagaaaatgtcattcaatctttctctattacattaaagtcaaattaagtcaaaaagaaaaccagaattggtttatacatcattcagagagagtcaaactgcaacaaatcatcattaaatggatttttgacaaggccattaagccactagggttaaaaagaaattaaagagcctaattgtcttataattcacgctcaaaagggtatccaaaaaaaaaattgcacaacagtgaaatttgacacaaaccgttcaccaaaatactcaatagttatagtgtagcaccaccatgggcttaccaaattgccgccagagcttggaaacagaggaaacacggactacatcagatgggtcatctaaataggttaaaatctttattgatatttcttccgcaaaccagaatataaaatcaccactattatccactttgggcatcttaagaaataatataagccttcttccaacaatcaaattcacactgcaaaaacacattactgatataagcataatatttagcttgaattcaaaataaaccaatccaaaaaagccaaagcaaaattataaaaaaaggaaaattgagagagagagagagag

SEQ ID NO: 120811 - DNA, 1584 bp, Cannabis sativa
tttaggacataaaacccaacatctgatatatattttctcagcatggagatatgaaacacattatacacttcggacaatgcaaaagtcaaggctagctgatagggtacttggcctacttacgccagtatcaaaaagcctaatgatgtaggggtttaacttccctcacgtatctctttcataggatactcagggaaaaacaaaatctcttatttggaactcgatatttctacactttaatcagtgtagcttttctctgtactcaatgaaacgagcatacaactcgaattcactctatgattttataagttcattgggtcttttcggtccattgtactcttttcttacctgtattactccagtgaacaggtgtctaatatttctcttataccacacttattaaagtacctaaccaatggtacatttaattatcacttttagcaaacgcttcgtcagtggaagagatcattctaagataatctaacatttatcaaatatgcccactgcatgtttctaatattccattgatcctcccaggttacccatatttcaagaataaaatatcatactaattttgctttaattttcatgattctcaataaccttctttaactcttaacatcatagcaaaagatatcaactttggatttcacaagattagactattccttcgtaggaactccatatcctcatttactgtataaatcgtctacactgatagacaacatattaactcagtatttctaatcgttatcactcggacaaaatcataagatcccacggtacataattcataattatgtctactaggataaagttaaagtgtacataaagtttttatgtaaatctcaacacatgagcaagaataatttcttatgtgatagagagaaaaaagttttctagtaaaaactctttctaggctttcagaaaagttacgtgaaaaattatattccaaaaactaccattcagaactttgttatactgtacatttaaagaaactcaataaaggttttatttaattaattatttaaattaaaatctatttattaaatcatatttaattatttaaataaataatataactgaattcaattatagataattacatctaataaccgattgagggaatctctcaaccacttgagagaatatttcaactacctttcaaattaaaatatttatccattaaattaattaattaaccccaaaagacaaaactaataggaacaccccacattataaggggcacatgcactatttggacacattgcattgaatgaccgcgttattagattatggattagtaggacaattagaattaattattgatgtttaatgtttatgcataattatatatgtgtgggtcccttttttcagaaaatgggcattagacttattatttctcaattatgacatatgcgaaatttataatttttatgatatttgctcggtaacaataaaaaatacgacgaatggccaatagaatcacatgggtgagtttagaactttcaatttagtagggtatccatatgttaatatttagtgtaatgaccgctctagtaatgtggattagtaaaggcaattagc

SEQ ID NO: 120812 - DNA, 1945 bp, Cannabis sativa
gagagatgtagaaagttgtacatgaaaggaatatcaaaagtaaattcttggtacgatggtggaaactagaaatcatacacgcaaccacgtccgcctcaaggccctagggggctagacaaagaggacgtggctttgcgagtagaagtagaagagcaagatgaaactaacgatctagaatacaacaaaaaccaagaggagtatgaggcatatgatgatagtagttacaccaaacttatggcattaagatagaattgaccatgaagctgagttggcagagaaaaaggagcagaacagaatgattcaagagataatgctcgttatgccaaaagcgatggaaactgtaggcatccatgtgcatccaaacacagaacccattgggcaagactaaataagagaggaatttatgtcactattagaaagtcagaggcataaaaatcgagatccaagccctatctggtatccttctaaaggttccccaaaggcaaactcaacaattattcctggaaaaaaataagaaggcccaagatccacgaggagtttgctttgatcttcctaaagggaaaggtccgtagagggacaagtttccaaagggaaatgctggtcctcaagattggggagaccaaaaaagtgtattcgtgcaccaagagccaagggagagaagggggaagagccacaaggatcctcttgtcgacttgaggcaaaaacttaacatcaagcacggtgatcttagaaatcacttagagcgaaaaaggcaaacaataccagtctcgaatggtgcactgaatgaaagaatcttggctgaacttgccattctccaaaaagatatatccaaagtctctcgaagacaaaggggagatgattcagagtctgattgcaaggatcgagaaccctgtgccagaagcatacttaaagcggagctcctaaagaatttcaaaatgcctgaaatgaccctgtacgctggagactcgaaccccagtgaccacttatctaggtttaatcgcgtgatgacggtcatgagagtcagcaatgacacaaagtatttgtgcttcccattgacattaggagggtctactgaggagtgatttaaaaagctggaacctggatccgtggactgttggcacaaattacaagttagcttcagaaggcagtttgtggcagctaggaaaataaaccttaaagtcagtgctttaaccaacatcaaacaactaccagtcgaaaatctaaaacaaatcataaaaagatttaaaaagcttccaaaactaaaaaagtggatgatggatagcagttggcattgctgcaagctataatctggacgggattccctttctagaatgagctttagcaagaaggagctgttagccttcaagacttccagaagagggttaaaaaatacatgaatttaaaagaagcacaaataaactgctttcggatgatattaccctactggcggtccagggtatgctcttagagtgtagttttctataattactcttccagttgcaccaaagacaagcggaatacccattgtgcaattctcagcaacactaggatatacccacaaccttgctcttactctagctcaatccagtttcagagtactaagggtaacctggcttccaaagtgagccagcagtatctctctcaatctacaccacctgcagcaagtgcaacagatgttcctcaaacctcccagagcaagaggtcatcgaaagaaagtatgcggattgagaacaagaggtagaagaaaggctacacctcccagtatacttagtataccaatttagtggacacccaagaacgtatatacttagccatgagataaaacatccactaccagagactgcctcctctgtattggcatagctcgtagagggaccccatcaaaagatgtgaatatcacaatgacattagtcacactactaatgaaagcaaaaatttgaaagat

SEQ ID NO: 120813 - DNA, 875 bp, Cannabis sativa
gttttattcagaagaattaaatggccgatggtaatgaagttaacaaaatagatttcctaactgaaaacagctaactgaagtgaatcaaattctctttgaaactcacaatccaaagattgaactctcattaggttttgaagagccttagactagactatcagtctatcataatatcattaattcaataaatgggaaaactagtattagaaattagtcatacccccaaccaaaaactcattatcgactccaaagttttaaactaaattgtttatccaaattgaagcttttagcatgtgttacgtgttgtgttacaaaatatcaaatagacaaagtgacaaaccaaccacgccttgcccacccctcccacaccaaccgtacggaatcaaccaagaacgagccccataccactcactgagactagccttccccatgatcacagccccagcccttctcaacctctccacgacggtggcatccctcggcgacaccgacccaagtagcgtgtaagaccccatcgtcgtgttcagcgcgtccttagtcgctatgctgtccttgagcagcaccggaacgccgtgtagctctcccagcaacgattttccgtcgcgccacgtggtgctctccctctcccagtccgcctcgtcggctagagaccgcgcgtctgggttgatttccagcacgctacgaagcaggggattgagcctctcaatctggtcgatgtaaaagtcaactaactgcctcgacgtcagcctcccgtctgcgaaggcgagttgaatatgttagagattttataacaatggaagaaaatcaagatttattacaactctattgtaaaataatacaaggactaaaataagagattgattaaatatatgcta

SEQ ID NO: 120814 - DNA, 2327 bp, Cannabis sativa
ccgtattagctatccgatatatgtaaagatttaattagtctatcatttgtatttgaagaaaagaatacatatatgtggcatgtgggccattttatctaagctcattcaattaagtacgtacgtacgtacttgtgttgtgtcaaaacttttatcatcacgtgatttttttagagctcgtatatataatgtgtacgtccctacctaattgaatgagtttccttaagatatgtaactggtaactagaggtattggttacttcaaatatactaactcatataagataatgacattttttaattggtcgacatgctagaaaagttgacgattgataaactgatcataacactatttagtttaactttaactataattagttttagctttaattaatgtattgttttagaattatagttacacataacagattaagtaacccatcttaagtactactagtgctttttttttaagtgttaagtgttttgatttcaattggtttgggaattggaagctgtaataattaataggcctatgaacaatagggtttgcaccaactgatttttttttcatcacgttttttttttcaagtgatttaatttcaattatattccaattatttgtgataattaaaaagcctatttgaatatacaataggttttgcaggcaccaacattttttttttactacaactgatttttttttttcatcacgtggtttataggtttaggaccagattaattttgaaaggttacgtaggtacgtatagagttatagaatttattatgatcataattttagttgaaaataatgtctattttgatttttgaataatgcccaaaaacaaaaagagaaattaacagactccaattttgaaaagtacaacttaaaaatatttcagtcaaagggcacatccttgtattatatatttctagtttttttaacatagctccaagaccagttttttttattattattattttttttatttaagcgtttatatattacaaccatacataatttgggactcgaacccaggacctctaacacacacgcaccctctatggccacttgagctagcctcaagtggttactccaagaccagtttatgtttggaattttggatgaaaaattaaaattaaactttttattaaattatatatatatatcaatcaatactttataaattcagttttcaataaaaaaaattataaattctaaaataaacaagaactttagaaccatgtatatttgaatcacaaaattttatcaatttttttttttgtaagtgtgtgtttgctcttataaatatttatgtatactatatattatagaaaaatatttactatattatatataaaagggattgtaaaaaataggaaacattttaatatatagaaccttgtgcaatgatctatatactacctaacacttgagagaacaatgcttatagttatagttatagttatagataatagattggtaaaaggagttataagtaagaagtacattattactttttcttttaccaatattttttttatgataatataaatgtgattattattttaacacgttgtctacaaaattagggttcacattgacatctaattccaaatgtatagatttaggaccacactaattttatcatgaaacaaaatttatttgaagggattataaaaattaaagaagtaggcaatttgagaacaatgcttatagataataataataggtaggtaaggactaataattaaggggtgcattagtttttgcaccaatatgttttacaataataaatgagattattatttttaacacgttgttagaataacacccaaccagatgtatagatttaggaccatacttaattacatgtatataatgtgcattgctaatttgttattagtgatgtttagtgtcatttaaagatggcatattacaattaattcataatattttttaaaaaattatttaattaatttatataaaatttgatatttaattgtaccaataacaatataacacctagagatgacactggcatatttttagcattaatttgtacacttaacttctgaattttgcttttggtggtaattaccctttaattaacttcaaatctcactacaaaaatttttatttttagtcttaacaaaatttgtaactaaaagtaaaatagttgtgtctaattacaaatcatcattcttatgttgtgactaaaataaactctgtgactaattaaaagtattaattacaaaaatcacaaattgttgtgactaaatatatttttagtcacaatacttgttgttactaaaactaaattagtgataatt

SEQ ID NO: 120815 - DNA, 1176 bp, Cannabis sativa
aaaattagactaaaaaatttttctggatgccgaaacaagttaagggtgcatcagtgcatctcttttaagggggtgcattgtagaatcaccccattttatatatacagaaaaaaagaaagcaaattatttatataatcgtgacactagcctctgacgtgctgggtttattcatagcagacttctcatttaccatggaaaatttcattttacacttaaataaatatcttttaatagaatttagactcctaattaatttatacaattaaatattattattttcaacttttactcaaaatactctccttttcattttccttctctctctctgtctctttctcttcatcgctctctcttcctcttcctcacaccaccgagatcacccagactcaggcaccgagactattaaccaccaccactgaacctcctcatctaccaagaaacccagacgaaatctagaagcccaagacttagacctccatagcacttaagcatcgaaaaaacacaaaggccccgaacctccgtctcagtcttcgtctacgagcgtcatccatactgagagggcgacctcggctctgagcccgactagatgctcaccagatttcgccttcatcttcgtgtttatttgtttttttttttattggatttgtatttgtttcaaaccttagatgtggttgtagttatagtgtttcttggccaaaacgtgcttatcgatagtttatcgacaatttatgtttgtgtaacacaattttgtcaataggttatcaatagtatatattgataggttatcgatagtttatcggtggcatttatcgataggttatcgataatttctatttgtgcacaaaaatagcagtgcatagacaaaaccatcgataactatcgataacccatcgataatcacattttagtcggaaaacgataccctttaccaccatataatgtttcaaacaaatacaaattcgaaagaggaagatagagcgaggaagaatttctggtggtctgtcttggtctcggttcgtggtgtggtggtatcgttcaatgagcttttggttaggagaggattaggtaggtggtggtgaatagcttttggtagatgaggaggttcggtagtggtggttggtggtctcagtgcctgggtctgggtgtctcggtggtgcgagagagagagagagagag

SEQ ID NO: 120816 - DNA, 856 bp, Cannabis sativa
cattatccgtgttttataataatcttaataataaataaaaagcaagtaattaatccctgttttaaatattttgttttttttttcttattttgataataataaagttatcaatttgcatatgagcaaatggagtgctatagttcatgttcataagattaaatttcaacgatggtgtataatgtgagctaaatttagctttgattaaaagttgtgactaaatgtattataaaatataagagtattttaacggagtgctaaaaatgtggttcatatgggtggtatataaagtgatttaaatttatcacatgctaaaaattatatcgaatttagcataaaatataataatataatacggaccaaattttatgccacaataaatatcacttttttatttactcttttgctaattaataattttttactttcaataaaaatttaatatttttcctaacttttttacactaattttatccctaaatgcattatagtactacgtaaaatttgtgtcaaatataacattgagtcattttttagataaatttaacttaaattatacaccatttggtcacataaactaaatttacaccacaaaaatatcacattttttaattactcttttgacactcattaaatttaaatgttaactaatttttaaggtaattttacacataaatacattgaagcacaattataaaatttaagccaaatataatattgactcatttttttaagctaaatttagtacaaagttcttgcatttataacattaataattaataaatattttatattttgaataataattaatgaatattattagttctcaaaataaaaatttaaaaaaataaaaatgaaa

SEQ ID NO: 120817 - DNA, 1218 bp, Cannabis sativa
  modified_base (1192)..(1193): a, c, t, g, unknown or other
ctttattgatattgaataatccggattacacttaaatggagttttatttagggcataaaacccaacatagaagttgtttttttgtgaaagagaaccttcactttttcatacatctttcaggttgtagcttctttacgaagttgggttctaggagtaacgtcgcgactgtcctagactttaggtatttttcttattttgatccttgccaacatgaagttttagctaattgcaaacctgacaaactatacttttaggaaatctattgagatatgtaagaaaggattcaggcaaattcttcttttcaagaatttttgccaaatacgcatctcatctccaaatttacactaagtttggtttttgaagaaagaattcaagtgtattgttcaaaacatttcttactttcagttgcatatgcacgttgagctaataactttggcaaatgagtgtaagaaattacagtcgtcaacaatcgggcataccatacctcccaaatgagccgagatatttgaatgcctctaaactcttggtcgcctgaaatccaacatgtaccatttttcggtccctaggaggaggtttgggtgcgtgtttttatccaacccttactctgggaggagtagtttatgctagtcacccaaactgtgtcttttgggaggggtttttcccaaaggttgagagagacttggctaaattcggcagtgatctcttggcttttgcgagggaaagccgttctgggactgaattttaagccaaggctttatttctagaattgtaggtggaaaccaagttggatggcagacttcaagtgattccaagcaatatttccatccacaagttttgtatgtgaccctttgacatgatagagacctcgtggtggaggcatgagcttttgtggaatggtaggattttggtttcccaggaggaaagctaaaactacgcaatctcttaaggactcgttccatgctgaggtatgctttgatacgggagagtcacgttcaatttttatgaggcaaacttcaacttctacgagggaaggctaaagttgcatagaaatttaagcgatgattttgctttaaaagaccaaaggctgaaatatcactaggcctgtgatagacttcaagcaatccttctcttcaaggaaggatggttgaagacctctcatacccccagtgatctttctgttgggttttatgcnntaaataaaactctgtttcaatgtaa

SEQ ID NO: 120818 - DNA, 2778 bp, Cannabis sativa
aaatatactaaatttaatctaaaattaatactaaaattaacctaacacctggcttatattgtgtagtattggtaccaacttattctgtagtggagttgctaggagcaataggagctaagttcattaaaacaatagtaacatgattagaattgtgggaaacattggtttgagtgggagatacttgtgaagtagcaacaggagctgcttgtgaaacagcagcgcgggagcagttgaatgtggagggtgaaagccaggaggtgggaatggtagagtggttctttgagatgtactaggagttggaatatctactgagacaggtgatggatatttggactgagatgaattttggattgactcagtaggatagggaaagatatctcatcaaagagaacatctctaaagatatacactctaccatccttggagagacatttgtaacctttgtgagaaaggctataactattaaaggtgcagggttgtgacctttattgtaacttgattttttatagggccttaacttgatagcataggcatccaaacaccttaagtgaggaataagcatgtttggcattgaaatggtgatagatgatttagttgatgtgatggcattctatttatgagaaagacaactaatgtgtaagcttcatcccaaaattttaaaggcatgttggcttgtgccagaggattaatccactctctactatgtgcctatgctttctctcaataataccattttgttcatatgtgtgtggacacaagacactttctgtaggatgccagattgttgtaaaaattgagtgaatgcttggtacttaccaccccaatcagattgtatttatttgattggcagtccaagttgaagctcaacttgtgttttgaatgtgataaaagtgttaagtgcctcatttttggttctcaacatgtaaatccatgtgtgtgcctagagaagcatctacaaaactgatgtagtatctatagtcgatggcgaaattgattggggaaggaccccataaatctgggtgcaagagttgtaacagtgcaatgtagatggtggtggatgtgggaaaggggagtttatggtgttttccaagacaacaaacagaacatagttgagaaaaatcacaatttttattgctggttttgatattacaagcagttaatacatgtttaacaattctatgatggggatggccaagtcttttgtgccataaagagaaagaattgtttgcatcagttagactgcttgaattacattgtgtgtcagctgttggagacttggaactagagggttgacatgaggagggctgcttgttgtgaaaggtaaggaagttgagttgattggagtcaaacttggacaagcctttctgatcaggcttcccaacaagaaaattcctcaaagagacctgatccttgacaacccaatgtaatgggggaaattcaaagaaaacaccattatcgtgagagaattgagaaacatctacaatgcaacacactcggtggtgccatattgtaagccttatcccatgagaaaagattagcaagcgagacaagaacaagttttgccgattctacaataattatggccatgatactgatgagtgcaacaatctgaaggaggagatagagttcctcatcagacaaaacaacaaccatttgaggaggtatgtacatcatgacaacaaccaacccccttggaaacaacagtaggtggtcggggatgaccaacaactattacctcccccatcgcgggtctcttaaacgtgatatctagaggacctcatttagtcaggaattctagaaaatcctaagaaagatatgcttgatcccttacacatgagcagagtgaagatgtgttggaagtccagaagcgaactcccaaaccacggtatgaatatgaatcaatcaccttctctgaggatgacaccaaccatgttcactacccacacaattaccccttggtggtagaagtacagatccccaatatgattatagcaagaataatgattgatgatggatcgtcaactaatatcctcttcaagtcctcattggagaggatgggtttgagggcaaaggatttgaaaccttgtgaacatctcatatatggattaattcacacgaaacgatatggcaccggttgggctcattaggctaccattgactgtgggaacaattcctaagagtgtcactgttatggcattgtttgtggtattggatatcatatcaccatacaacgccttgataggccatccgaccctatatgaccttaaagcaatcacatctatctttcatctccttgtcaagtttcctaccatgagtagaataggttgcctgaaagggaaccaactagtagcacgagagtgttacaacctatcaatcacaactagaaaaaatgcatctaaatccctcaaatgtagcaggcaattcttagcaatgaggactcgcccaaaatggtgttaaaggcattgatcctcgtttttgggatactgatacatgtatctcttagttttgtttgctttgtcttttagtttctttgtgatgagagtgttatacaccctaggtcctttgtgatgttagctttacgttgttaatttgtagggtaatttgtgccctttgttttccattatggatttcaagcttttttctctattagtaatgaacatggtttgtcgtttgtttagtcatctttgtaagatttgtccagtttcgtttcgcctgattgtttaggctttgttcacatttaatcttaaatgaaattttcatattctttcaaaaaaaaaa

SEQ ID NO: 120819 - DNA, 1004 bp, Cannabis sativa
ctcactccatgttcaggttgattttgagcgttcgtcccctgtgctgccctggccgaagctgcctcacgttctaactcagcgtttcgatgttgtgcttcttccaaacgacatttccgattcataagttctttcttccacagattgggcacctccacaattgagctcttcgtccctcgccccggggttctgtccattcccacgctgaattctcctcgagcgtgttgtccacgtactagaactaacgtcgggttgagttatccgaggacgtgtggtccgagcacggggccaccctcaggtttagccctcctggaatgggtggtccttttggactgcggattggtaaatcttttggagcccatgggaaatactttacactttattttctttccaacaaagtaaacatgccacaagagaaggagaagactgaaggaatcgagacttactaaattgatatgttattacagtgtaatttttcaatgtgaacatactatctattcaatattttaaagaactattttttcatgattggaacattatattttattacatactctcttgttttgactaaaaaatgtatttagagtgtgtacccaatattcatctctcttttaaatcttgtcattgttctctccaaatatttctttcctccctcttttgtgatttacaaacatagagttaacatatttattcaaaaatttaccttcaaacaaaataataataatagaaattattattaatttattaattaagttcttatcaatactttaattaataaagttcacaattgaagactagtaatagtacagcaacaccggtcacgacttttacatgagcatgacaaaagaaaaaggggttttttttaaaaatgtacgtaaaatataaaataattacaaaaataacttaacaaatctcaattacaataataccttgccacgatattaaaaaataccttaattttaaaataatatgcctgaaataaaactaatcccgaatttttttttttt

SEQ ID NO: 120820 - DNA, 888 bp, Cannabis sativa
actctttaaggacttttatgatgtattatgtatgagattttgcatatttgtgttatgaattacaatactttttattcttaaatatttctaaatcttgttattaattttgggattactagtaagtttttttatctttgtttatttctaatcattgcatttataaatgataaagagattactttgataattctatatataaatgttagtaagctttttaagtaagcattgcatcttatttgtttgtttctaattattttaattaattttgggattataatgttggtaagggatttaaaaaaaaaaaaggaattaggtaataaatgatgtgattatatgtgattcaccatggaaatatatattattttaatttagtctttgtattaggtactaaatgatgataatggtgttaatgaggaacaacctcctcttgatgaaaatcctacagataatgataatggtactgataagggtaagggtactaaaaaaagggtagacctcctattctgcttattcctaagaagaagggaaagtttgatgtttggcttcattttactaaggaaaacaatcctcctcgagctataaaggatgatgatgaagaacctcaatctcgtgttcctaagtgtatctgcaattattgtgcgagtgatttttattgtgacacttaaaaacatgggactagtcatttatggagttatttgaagaaaaaaaagtgtatgagcttagtccactaaaaaatgaagataaaaaataaaagattttaagtttcgagcctaataagggtggcaaggaggggaaactaaatttagtagttgtggcctataacaaagaagcttgtaggaccgccctcacaatatattgtgttagatgagttaccatttcgacatgttg

SEQ ID NO: 120821 - DNA, 2246 bp, Cannabis sativa
  modified_base (50)..(58): a, c, t, g, unknown or other
  modified_base (994)..(998): a, c, t, g, unknown or other
  modified_base (1276)..(1276): a, c, t, g, unknown or other
taaatagctataaataattttcatgattaaacatgattaactgctaattnnnnnnnnnaactaagcggtctttacaaacattttttcatagccataggctaaagcaaaatgagttttcttgatagccatctgttcagtggtcttatacgaccaaagcacttcaggtaattcttcaggccaattacccttagcttcttcaagaagttttttcacagtgtccttgattgttttttttactactttaacctgaccatttgtctgagagtgtacgactgttgagaagctttttacaattccatgtgttatgcaaaaattagtgaacatttggttgttaaactattttccattgtctaaaataatttttgaggaagtctgtaccgacatatgatgttcttcaccacaaaatctaaaactttctcgaaagttatgatggctaatggctcaacttccgtccactatgtaaaatagtcaattgctacaactgcgtattgtaccttacctttttccttagggagttgtcctatcagatctattccccatatatcaatgaccatggactttgaatttagatcaatttgttgggtagagccctaggcagtgtaaaaaatctttggcacttgtcacatttattcaccctaggcttttgaatcttcaatcatggtcggccaaaatatccttgtcgaagaatttcttgggcaaaattaccccccagtgtggttgccatagaacccctcattaacttcagtaaggattcgtgcaacttcctcttttgtaacacacctcaacaagggtagagagaaacctcgtctgtacattactctgtcctcatggtacaaaatactaaaagataatgagttggaaatgagttatcaaagtctaaacttccattccggaattctcaaagtcagcctgggcgcaaggctaaggacccctcataagtcgacttgctatgaatcatgactactcaactctgagatgtcatctttcttgccannnnncaaacattgatgtccatgtcatcatagatacttttggtgtaaacaaagtgttaattttagaactgaaaaaattgtgcacaaatttagattggatctaaattatacttttactagtgaattaacagtgctaaaggataaaaaaaagtaattagaatggtaaaacagtaatttgactaaaactaattatgaacgaaaacaaggagggttaatcactgcaattgattaaataaatgggcactgcaataaaactcactaaatataattctataattactaanagttcaattccatatttatagtggtataatcgtggaattaataaacaggattatttggttggtgagattcaataaataatctaattttttagaatttagaattatagatctatggtccccagatcactaccttaaaaaactgtaaagggtatggacacagtccccatgcccggccagaccccatgaaagccacctatggctggccaggcttcaaacaaagcctccttggccggccagcatgtacatggatcaaaacacatgatttttcaagaactcaaacatgttctttgtgttcttcgtgactcaaagagccaagaatcacaacaaaggtcatattcagttctttttcatccataaatcacagattatttatcctaaggctatcatgcggatcaaaataccgaatggactacaatctaacgtaagaattgaagcatgatcaaaacaagaaacaatgttcatgcattcatggaaaaatcaatcaaattaagtgaaagagagaaaatagaaagcttactcgcaacaagattccaatgaagacggagatgggaagcctggatcgttgaaataacacaaaaatcccaaggagattgaagcctagaggtttggccacctagagaggaggagctttttcaagagccaaattctagtgagagaaagtaaaagtgaaattgaaaaatggatttctccccaaaactcacttatatagtacacgtgggcccccctttttcccacttacttcaccaacttatcataaaggcacataaaagagttatttctctattgcaatgagatcaaacagtcaagactaaatgcttcaacacacacaccactttttattcagcaaaggtaactacagtcccaacaacaccgattaggggtgttcgcggtgcgggtggtgcagtttttgactattttttcaaaccaacccgcacatgcagtttttcaaattttccaaaccgcacccgca

SEQ ID NO: 120822 - DNA, 2098 bp, Cannabis sativa
tctaaatgtcaatttcgaatctggtgggtgttctcacaccctttagcttccctttttataaaatgggttaaaaaaagggaagctaaaggcccatattctagtagtgaatgaactataattggagcatatataaattgactgagtttgttgatgatgaaagcaacattcgatcggtcttgttagagtcaagtattgtagatcacttaaagtgcttctgtgcaatgtaacatctttaaaaggtgcaccctcagttaaggacaattttgttgctgaattggttgaatttggacaacttttgactcatctaaatgaagcttcaccagaagatctgtaatgtacttaagacaagtacatgcccacagaatctctaaatatttccacacgtaaaaaataatgagcttgtccaaggtctttcaagcaaaaaatgttgttcaggtcatgaattagtttggagaagagttgtgaattcgcgtcagttgttatcatatcatcaacatatactaataatgaaataagtagaaaatctaatccatgaataaagagtgatgtatctaaccttgatgccttaaatccccattgaaacaacatttgtataagtttgtcattccaagcttttgcagattgtttgaggtaggtaggtttttaagaatcatcaaacctttgaggttgctttatgtatactctttcttgaaggtctctattagaattactgatatctaattgctaactacccagttggaagatacagccagagaaagaactattcgaattgttgcagttttagctactggactaaaagtgtcgtcatagtcattccatggagttttatggtaaccttttgtaactaatttggacttgtacatatctattgtaccatctgcatttaacttgattctgaaaatccacttacacctaatgatgtgcatattaggatcataaggcactagagtccaagtttttgacccgatcagggcaacaaactcattgtttatagaggcaaaccactttgaattttgtagagcattttgacagattttggctcaaatggaaaaaagactccagtagaggatgttttgtagccaaatatgcctttggcttatagatgccactttgagacctggctcttatagagtgaattttttagtttgtagaaggagcgatcactacaagaatagtatatatcagtgaccctacttgttaggtctatttcaaggttatttttgcgtctagttttaggtttatttttgattgtttttatgttttgttgttcgattttactttttatttatgttactttgttagtttcaagttttaattgaaggcactttcgccttttggagaaaaattagtgtttttcaagtttcttggcgttagaattattaattttttgcaaaaggatccttggaatctattttttttttggctcggtgcaagtcccaggtctctaaaattcaatttttaatgtttcggagtcaagagttgcgaccttctctagagagtcccagctctgcgaaagttatagaagcaaagttttggaaatcatccaaaagttgtgaccttccctaaaaagttgcgacccttagccaattggagaaacactcactctataagaaagccaagagtcgaaactttccttagagagtcgcaatgcttgggtattttcaacaatttcctttttgtgcaaaatgaaagaaggaagctaggttaagtgaggggggcttcaaattttctgaaatgaggagcagggacaatagctaagaaggaaaatcatcattggaggatgcaattttgagtttttatcttttatctttattttttcatgcttgtaattgaattctttatttgttagaaatgaagattatgggctagtttctctttagggattttatgtgaatcttttggaaattctttttatggattaatgcagaactttttttttcttctctcatttcaattccttataatctatagttaatttattataattatttactggccatttataattattattcatgaatcaaattgaaatctgaaaagtgtaaaatttgatatgttttgattgtttggatgcaaattcaatttagaacgaaagtat

SEQ ID NO: 120823 - DNA, 1275 bp, Cannabis sativa
  modified_base (38)..(39): a, c, t, g, unknown or other
  modified_base (84)..(84): a, c, t, g, unknown or other
atcatgtgaaccatgaaacattaaatgttatttctganntatattaataagtaaatctcattatattgaaatgggttttatttngggcataaaacccaacactataactatatacttagacatttttctacgaagatgtttaagaaaagtgttacttgaatggcaagaacaacaaagcacagtcagcatatccgtctacagataaagacaaagagcagttaggcggtaatttataattatctcatgtacacaaaaataaaacgtgagaaatgttcacgtttcatgaacagttacgaatgatcatatcccaaaggaataagtgtcaccttgaactcttataaataaggacagaacccaaagaacaaagaacgaccaacctttggaaaaatagataatattgtgattatttattgttcattcatgaaaaatagtgttattgtattttatatacaatctttcaaacttgaataagatgaactcgtgaacagtcaaaatttaacttcaaaactacataaaaaaaccctcttgtcatttattgtcattcttattattaattattatgtaattaattctaaagtttatttattatagaaaaaagactaataattatttagttaacgaaaatctgtgtataaaaacttttttcaacttgaaaaagttaaagtactatctttttgtttggaataagatgagcattcctaagcacaaatttatcttttcgcaagtgataaattctaagttactcactagggatcacttggctcggcttggcatctatttagagagcttgatttgcctaatttatggagtggacaaggaggatcatgagcatctcttttttaatttctccttgttcaaagttggatcggttgtaggtggcctcaaaattatgagaactgcctctcttgactagaaggtctgaagagaaggatcaaaactggtgctatttcgactgtgatgtcgttaattatatactacatttgaaataataaaaatacttgcattttcgagttcattataagatttatagttttttacatcaagttttgtgagctggaagtagcttgttgagccttgcttggttggcctttaggtgtaactttatatgtgactaatgaaaaaaaaaaaatttcttgtaaaaaaataattaaatttttaacaaaattaaatgaacaaaatgaagcttctttcggaccttattgattaggaaaatttacatggtatactaacttttatcatttttttacaaaaatactgccaggcggtattttttac

SEQ ID NO: 120824 - DNA, 1625 bp, Cannabis sativa
  modified_base (1565)..(1574): a, c, t, g, unknown or other
tctctctctctctctcatctttgtgtctcttttattattttcaggttgtggagtgctcaaactcaaatcgttgcaaaattttgatattggtggagagatgagcgtatgcccaaacctgttgttcatgctttcgaggtttgtttttttagtcttttactccttacccatttggagttttgatgtaaatttgccaacttcaatcttgataatgatcttgttattgtcttgatccttgtattggaatatggtcttgatccttgtattgggaaagctaaatgataacactgggaagggagtgggttgattaggcgatcaatttttttgaatgtgatggtgcaaaatcttcgtctatagcatttactattgtcgaaggttttaaactatcgataaatttttccccaactgttttaaattgtcgcctattctacccaattttgcgacgatcgaataggtgaaagtaatagataccaacaataatacattagctaactgttttaaaaaaaagggaaaacctaatttttagtaatgttaattagtttcctcgcaaatattattatcaataacgcctatgagagttgctttttttttttggaaaacaaagagtagagagaataatctttacttttgctcaataagtaattgatgaaaataatgaagataaaatagagaaaataattttgatttgatacatttgtctcacatgcatatctcttctcctctcctctccttgtattgaacatccagaattgtactatccatattataaactcaatcccaacctgaatcctggatccaacctaggctttggatggggttcagagttcgggattcaagatcagggtcgaattcgtggtttgggtcgtgtttggggccggggtctgggtctgggtccagaattcaagttcagtgctgagttcaggttcaagatggggtctggggttcgcggccaaagctagggtcctaggtctagggttggggctggggttcgggtccaagttcgggtctagggtcggggtcagaactggggtcgggtctaggacggggtacaagatcaaggttcaggtttggggtgtgggtctaggtctggatccagggtcggggtcggaactggggttgggtctagggcagggtacaagatcagggtccgggtttggggttcgggatcggctctgggtttgggatttggatttaggtctgagtccagtgttcagggctaaggttaggtttgggactggggtttgggtttggttataagttatagcagccggagtttgggaccgggttcaaggtctgggtttggggtccggagtgaatccccaaccacaaactctttctaaatattataatacaagctaatacaaataatttattatgtatgaaataatacaattcacattatattaaaatttaaagttataataattaatacattacaaaattttataaaaaatataatattctttattattcaatacaatataatttatatactatccaaaagagcccataacattgattgtagtagttgttgcagtacattggtgttcatccgatccaatccgcannnnnnnnnncaaacaacatccaatccgcactaagtgcggatttcatattttggatccaat

SEQ ID NO: 120825 - DNA, 3131 bp, Cannabis sativa
cccatgggttcgaccttgcacttacatgaacactatattccgaaacgattcgtgcacttgcgagtataaatattaaaacactcacttttgaggacaacactccttattgcatcgagaaaactaaggccatatttttaggcgcagtccatcaaagtattcacgaaccatccgctccggcagatcttacaaaaacctgaagcttctgggagactcctcaagtgggcaatggaactaagccaatttgacatacagtacatactccgcatctcaatcaaaggctaggcactcagagattttattgttgactgcaatgaaactgaggctaacgccaatatgccagatctagatatgcctacatggaaagtgtatgtcgatggggcatcgaacgagaatggattgggggtcagggtagcaatgatatctcctgatggactgaatatgaagccctgctagtggcactaaggctggcaaaggcagtaggagccaacatggtggaggtgtacaacgactctcaactagttgttaactaggtgttggaagaataccaaacacatggagaaaagatggccgcttacgtcttaactgtcagagaattgctgcaagaatttaagaattacaagatcgaatggattccccaagaaaggaacgttcatgcagattgccaagctaagttagcatcagtttatgaggtagaaaagctggggttagtgctagttgagtatctcacggaacccaacattaggccaaaagtggaagtagcgacaaatgaacaaatgcaaagctggatggacccaattgtcaagtacataacaaagggagaattacctcaatagaggactatgtctagaagggtacaatatcaagctcaccgttacttgataattgatggtattctctatcgaagggggctcaatatgccatatctaagtgtgtaagatcctgaagttagatagattatacaagaggtccattcttcgaagatcacactgggggcccaagcctctccaagaaaatcctaaggtaaggatacttctggcctaccatgacgaaagattgcatagactacgtccttagtgtgatccatgtcaaagatttgcaaatatctcgagagccccgccaaatgaaatcacgttaatgataagcccgcgaccctttgcagtacggggaatagaccttataagatctctctccataggaaagggtggggtaaaatatgcaaatagtggttgtggattatttcacgaaatggacaaaggcaggacctatgaagtctataaaagctaagtaagctttagactttgtcatcaaaaacattgtgtgttgaaatgggttgcctcataagatagtctcagacaatggtaagcaattcgattgtgatgagttcacggatttgtgcaacaaacacggagtttctcaactgtggcacaaccacagccaaatagacaagtggaagtcgtcaacaaaatactaaaggtcacccttaaggaaaaactcatggcctgcaaaaacgattggcctgaagagttgccacacgtattatgggcatacaggaccactacaaggactaccactagacattccccattctcaatggtgtatgggtgtgaggccatggtcctagtagaagttgtaatcccctcccatagaagaactacttatgatccagcaacaaactaagccttgttacaagaagcactggatttagtatatgaactctgggaagaatcacaaatacgcatggcaccataccagaagaaagtggcaaaatatttcaactccaaagtcaagaacaaaaaatttgccattggtgatctggtcctaagaagggtcttcccagcctcctaagaatcaggagtgggggtactcagaccagattgggaaggcccgtacgaagttgaagatgaaataagctttgggacttataaattgaagcgaatggacgaatcgatagtacccagagcctggaatgctgttcatctccaaaaatactatcagtaatcaggaattcagtatttaatttcatctttgtactttgtaagttaacctgtagcgaacaaagatatatgcattatcctgggtaaatctaacctaagtgacctaaaaattcctttttaagtcacttaacggggtactaaggcataaacatacacaaagataggcaaaaatcaaaaataaaaagggacgataaatagataaatacaagtactttcttaaaatataagttgtccaaaaaagataggcttggggaaaggctataaaaatgtctcccctaacgaaatgtaaagataatataaactaaaaattaaaagtattgtcttaagggggagagtagtaaaagggagtaagagagaagggcttaattaatctgcccttgaaggaagtcgaggacccatccactcagccaagacttgctccaacttcttgttcttttcccaaaagcaaaccatggtagcctcaggatcgagcatgaagtggaggtgaggttcaaacttgttcgatttccaacacataaaaactccatcctcgaagatcttcgcacaatgcttacatgtctttggagttaataaagcttccctcgtagcctttggagcctccttctgggttcgttcccagaactcacgtaactcatagagctcaactgacatactcgctgtagtctccaagttagtcttatgtagctctttaagagtcttgagtttttctgtgagtccctgaatctcctttcaaccatttagaaggtcgttttggtttgaggcaatggtgtcatctttggccttgagagcctcctgatctcgctccctgagagctctctctgccagagcgtcattacaaagagtctccatctagttctcaaactccctaagcttcctcagaatgccatccatgccacccagctccgaaatgacaaacccttagtcaattaacgcttagagataaaaccggactttgcagcaatctgacagcaatcaaataaaattgggtcaggtctttaaaaaataataatgaaaaaggaaaacaaaacttgaaagtatatactaggggtgttcaaaaaaatttacaaaccgcccaacctgaataaaccgcccaaaccaaaccgaataaaccgacaaaaaatacaacccgaaataata

SEQ ID NO: 120826 - DNA, 2072 bp, Cannabis sativa
aagagactgacctatttaagaaatacggaccgacaagaacaaagcatgacacgaatccgagcacaacacaaaaaataccaagcctacagatcgtgttgggcctaccctttaagaatattggacgactcatatttttttgtggcactgcacgacccgacctgttttttaaaaagcactattaaatatgggtcgagccaacacaacacgcacgaacttacaatactattttacaaatagtgatattgtaacttgaaaaggtgtagtaccactggtagcttttagcatttctcgtagttatatgtccactgaaagtaagggtagatggattccttgataggaaaataatgtaactgtaactattttagccgttggatttaggaaggaagtttatttttgttatccaatggtagctatatgagcattgctattaggcactaatagcgccttgtgattgattagtgatacactataaaagttattataataaattatattgaactcgctaattaattgtaccaatagtaatattacactttggaaggtactaggcagtaggcattactgttaccttttagcatttctcgtagttacatgtccacttaaacttagagcatttcaaatagagtgctataaatattgtgtatatgtattttttagctcatgttcataaaatttaactccaatagtaatgtataatgtgatctaaatttggcacatgtcaaaattgatgtagggttttttcctttcttgggcgattttttctctctggaaattttgaactcaaaaattcaaagtggagataatggtaactagtcgataattgctccattcatacccaagatggtggtccatgtgcttttaatctgatagcctaaattaaatcttataaaacacaaaaaagatccaacggttcgagaatacaaaagggttgcatttaaggccgtgtgcaggatctaggtcgtctaatgatgatattctccttgaaaactctatggacatgaacccgctgtcatctcgcatccataagcttcatgcactttttcaaggcgcatggtatgcacggactaaaagatccatgacatgtgtactttattctaggaagatgaatggattgcaagcttctgccacttactactttggaatctctagagtttgcacctgttcatagttctgcatccaacaatgaatttgggaggaggttgcaagccttcacgactcttgagccgtgaaggcttgggggtaaatgttatctgcgttactagataaatggtgtgtgtatttttcaaaggccaatatcagccacaacaagtccattcctgggcccagttaagtcaataagtccacccacttatgaagtcaaggcacaacttcgggaaagattgtatggtagaaggcgaagtgtccatcaagatttacctggatgctctcaatgggtaatccagacacgggaaattaaagagacacagggtcccaccatgtcaggggtttgtctctcacattaggcctgtggagtgatgccccactataaggcaaccaccttcttgtctaacgccatattctctgacatactcggtaccaatgcatcagcccgcgacacgtggcatcatcaaccagtcccccttgtacggacgatcgttatctcgtgaaccgggcctcacctaattagcctaaagtcaatatatattgtattttatccatcaatgagtctaactgacacctctaaatcttaccgcaagctcacccatatctgattctacattataaatagaacatgatcttaaggttcattaatgcatgaaacacttaaaattttggttgccttattaagcttaagtattttataataatttttcgaaaatctcggttaacagattttagtcatttatttaatttaatattttgataatttattatatttaaagtaatatatagagttttttgtagttaaaccttctcaactatcatttcacttgtatttaactatccaagcttaattttagtggtaaaatcctccaaactacttgttgtgtaccgaaatagtacgtattacatttatcaactcgcaagcgcac

SEQ ID NO: 120827 - DNA, 1045 bp, Cannabis sativa
caaggtcagtttataattgttataatagtataaagataatgtatattttgtttgttttaattcattacttttcattttaataggtaaagggaaagacatcaagaattgaaaacaacatgtggcattgtttcaatgctgttcttttttctcttctagcagttgtgtcaactatttctgcacttcggttaatagtaaataatgttaggcaataccatttttttgctgattcatgactcatatatatgagacattatataaataatatataaattaatgtaaacattttattattttgattaaagtcaattaataaaatgtataattataattaattctaccacaacacccacttgcatcaattttataatccacactgccccgtctccatccatctaatgtataataattagaaattttcctttccttaattatgggtgtgttataaaattaaaggtgcgtttggaaagctacattaaatttgaattgaatgtaattaaaggtaattataaagtttaaagtgtttgtttaattatgtaattatataataattgtataattaaaggtaataagaagacttcaattactctcttcaattctcgtactcataagtataattacataccaaaaataagtttaattatataattaatataataattattatgatttagtctttcatttttattttcttttctcatatacataattttatttttttataatgtgtatgatgctattttataaatttttttagtatgattttttttgtattgtttgcaaataaagggaaaaaaagaaactaatatacgatatatgaaatttgatttttaatttttaacatcactttttgagttattttttgaattagacatctaatagatttattcatgatttaacataaattttaactgatgaaatgcttaaattattttagggtgtttttatttttatacttcaaactaatttttttttttttgtatttttacggaattctacatggaaactcctattgcaactagcgctgccacctacattgcaacaaaaa

SEQ ID NO: 120828 - DNA, 3296 bp, Cannabis sativa
tctcgttaatatactaagtaccagtttgtatattgattccttgcctaagacctttcaatcagcaggttacaaatatactctgatacttaggtaattaatgagttatcccataaaaagcgattacgttgatccgtactccttttatcttgactcgtgtcctctgttgatatggcaaccgaatttcgggtataacatttacagttggcatcttcttgctttctgaaataaagtgacacgtaacattatttctttggctcttaggattactttaattaatggagcgtgtgctacatggatttgtgaaatgacagatgatcatgtcagcgaatgtcccgaggagaatatcatcacttgaatatctcaattccaaacaatgaattaaatgaaaatctgacatctctttcggatcgtttgatgtattttgtgttttcttcgatatcatctttgtgttcctgatctaatcgtgctggaacaactttcgttaagaattttactttcgaatgtagggtccaaaagggacccttcgaagcagtgataagggaagactctcctataccattgttatcttctatagtgtgggtatttaagtgcttgactttttctttttctttcccagtttttatcatgacagaagttgtccaagttgataaagcttaaattttggagcaagaggaagttgcagctctaagaatggtgttcgtaatccgaggagatggatcactacaacaacaagttaaaaaattacgaggccctccttgcgtatgaataggatcacggtctcaagtatgaagactcgatcaaactgagtaaagaaaagagtaaaaaggtttaataaaggatgtgggtggcacccacaattttatttatttaatcaaaccccctacttgtcagaccctttctctaactttccctatttctatctttctttctctctcttcaaaacaacaaagagaaacccataaccaccaccaccaccggtgaagctccagcaaacacaatccgatgaccgcttgggcctacacgccgcacctccaacacttggcaatctcaccccaagtggtgcctcctcattcgctacaagaagcgagagatctcgagtcaaagtttggagttttaaactttgaatgcattttttagtcacatccaatatccgtttaacgatttgtcttcaccactagactcatctcatcaatgagaacaatatacactaagtcattctgcctaactcactactttttctagtgacattttcgtagctctgcccctttttggagacttgctagcgtatcgtgtactgtgttgacaaatcgttggcatgggtgcgatctactcattgtggtggtcattttgatatatactacccctatttttggtgatgtttctgttacactgatttccacctcaacaataattaatgtctaccgcataaaatatagttatgttatctgtcattggactcaattttaattttagaatgcaatgatgataattatttagccatttgatggtcataggtgaaagtgatatataagattggactaaacaattggagctcgggacttgagaggttaggatcctctttttagacaaagtttaatgacctgtgagaggtagggactcaagttgattattggaatttgttaacccaaaaactttccttggtgacatgcatttaaatgtttgacatgtagcaagaaggatgaaaacacagagttgagtagactcgagtcatagcagtcgacttgggaggagtccctagccctgtgccaggttgactttaggaacttcatgatggaagttcaaacttcaataactcatttccaacttactatttttagtataaggtatgatgaagacatggagtaactaaatctaggccccaggagccaaaattacatgaacttgcaccccaaaagtcaacctaggcacaacgggtttcacccaacacccaagctgacatcctcaactagggtttctatttctaggactgcctttgttaaaatgggttaaattttgcattggaacatgaactagacataccatggacatatttgaagcatcaaaattagatttagagaaactccatttttgagcacctggtgctcgggcacccagcacccagcacccaggttgacaacttgtcaatctgggcaacatttaagtatcaaattgacaatctaacttttgcattgtctttgccttcataaaaaatgtggaaatggtactttcaaggaagaaatgacacatcctaggtgctagaatagcgcccaagttgacacctagggctggcccagcacccaggtttacattttgtcaaactaggtcgatttcgatgatgcttttcgagaaaaattccaagcatgttctctaatttcaacaaatattaagattcaaaaaattatggggacgaagtggaactttcaaggggccaaaattgggacccagctcccaggttgacacctggcactaggcctagtgcccatgttgtcatattgtcaacctgggcctttttcaatcagattctcaaaaatatgttctaggcattttttccatcatcaaaaataatgaagattcaagccaactcagggggaaaaccacaaactcgagggcctggaaacagagcccatcacccgagttgaccttgtgatgggcccaatgcccaggttgacaatcaatatggtgcactggtttcaatcattcaaatgccaaatctgatctgataaatctttccagaatggccaaaaattgtgtaggagacctcatcctcaagttttaaaactttggaagtatcaaaacatcccagaagctccagatgttgggttttgtgccttaattaaaacccaatttcaatataatcttgaatattcattacttgtctaatgtgttaatttgttcatgtgatcacttgtttgatttataagttcatccaaatccttatcacattgatattcttgtttattgggatgtcaacacagtggaaagtaatcgagattgtgtgattaaatgtattggtatgatttatcagtacacaaggtttaattgattggataatctacaatgtatagtttacttgcaccttggataagtgctatattctttccagggcattggttaaagtaagcttgggtttgatgtattgagtatacatcagaagagaccgatatttaatttggataaaagataataaaatgaccataatatctatttaattcaatatcacctagttgatcttaaatcaaatgatctcaatcctgagatggctagtttctagttctgttgtattatttatgttcttc

SEQ ID NO: 120829 - DNA, 937 bp, Cannabis sativa
tgtgagtagatctaagatcctgctaaaataaattccaacatatagttcctccaaataaaaatatttttggaaggagtcgtggtaagtaagaagtcgaccataaagtagtttcagaagtctagcgtgtctactccggaattagtctttagggaagctatcatctttcggaaaggatttccataaggctagttgttccctcaaggaagagggttccggataagtctgcttcagttggctttgaatctatccagaaaatcctcccatgaacacacttcatctgtttgggacatccgtctaggaagcatgctttacatccagagagctcacaccaaagctggatggatatcttgttacaaggagtttgttaagtctgttaagtcgtagctgacttaacaacttagttgttgcaaccaccgactttgggattcatttcttaaatctataaataccacaatcctcgtctttagaaatacaacataggagatgattttgagagcaaaggtcaagagtgagattgagagttagagagagagataggtacagagaaaagagagagattgagtttttggatttgtatgaagaagcttcttgggtaagagtgtgagagataaatactttgagagaatcctaacagtgaatcgatctcaactgtaatgtacccttattcttgctcaatcaataaatatattttagtggtgttctaaaactggagtagagacatagatcacatcaatctataggacttcaattagtatatatcttggtgttatttttactattttcttgctttaatcgtttctgattttaattattctattctaccttattttatctctgattcttagttgtagttttgttgattttgtcattgtttttaggctaattataatttttgccccctgaactttgacacgtaccaaatcatgccccctgaact

SEQ ID NO: 120830 - DNA, 933 bp, Cannabis sativa
tggtaaaataattcccaacatgaccgtctcccctttatgtgctttaattgtggttttgtgggacatgatactcgaatttgtgcagaaccagttaaatgttttgaagatggtatggggaatgtcaagccgagctatggaatttggttgaaagtagatgacaaaagagactcctctgcctcatcggtacatggtttctctactctgaatgcccacaactcagctccccctggtttccctgagaaaagagtccattatacaaattgtaattctcctaattctgtgataaacaaagaaaaaggccctccaaatttgtcaagtcttggacagattcaaagaatgggtgctgatctgttctccctttccagttcttccaatctaggcaccacggataagggtaaagaagtgttcttgggtgatacttttggtttgactgctttaggaaatttgctctcacagggtacattgaattctggaggagggtctatgaaggaagtgattggtgaagggataagcaaagcaaaaaggagtggttcttggagagatgaaggtgtaatttcttcaggtgatggttttacctcaaaggataatttaccaaactatacaaagaaggcgaatttgatgaataatattgtgattgaccccaacactcttatggatgtccctataacttatgatactggtagtgaatctttgaaaaagattgaaggcccttctaaacggcgaaaggtgatccctaaaagaagcaagattaacaagggtattggtccgaatgatgctaatgtgaggaaaactactacaacagagatggaaggaagtgcaaaggaaatttctatggttgatttgacctttgctatgaatttggaagcggcgaactcagcgagtctgggtcgccgagaacaatgatggccctgttttggaatgtccaagggcttg

SEQ ID NO: 120831 - DNA, 1204 bp, Cannabis sativa
taattttcataattaaaccttaattatctgctaatttccaaatttaaactaagcggtctatacagttctcttgctcctccgattattgctgctgcttcatccacctatcctccttcaagccataagaacaacgccaatgcttcttggagcaagaaaactcaccctacatgttctcactgcctcaaacctggtcatttggttgagaaatggtactttctccatgcattccctcctggatatggtgacaaacacaaacaatccgattcagccaactctaatcaagcttcgaccactattgttaggggatatgacactacctcggagctgcaactcagccaacaacttattcaactcatgagcaagcagctccagcatccatctatttccagagatgtaccttcgagtgcctctaatgtgtatggtaactctgatttttctctactttttatattgttgataatggtactacacaccatatatgcaataatattagatgctttactacctttgatcataatattgttgctactttaatcactttgcctaatggtgaacaaattaatgtccctacttctggtattgttcatcttaataagaatattaggccgaaaaatgttcttttcattcataaatttaaattcaatttattttcggtgaatgaatttttagaaaataacactaacttgtatatttttttttcttgctatgttattcaggaaccctctcggaatttaacgattagtacaacttagaaagtcgggaagctcttcttctttgagtaagaatttttttttttttacttttgatgctttagtttcagctaataatacatatgtactactgattatccttggcatttttgccttggacatccttcaatgttcatttctaattcaataaataagacattgcaattttcttcgaaaccttatggtacacattgttctatttgtcactttgctaataaaaaacgcctcccttttcattctaaaaataacatgactgctgccccttttgatttaatccatattgatacttggggcccttttcatattgaaagtattgaaggatatagatattttttatcattgtggatgatttttctcgctttacttgggtctatatgttcactgttagaaataatagagagattacaatggaagaataaaataagatgaataaaagactaagacaattacaactc

SEQ ID NO: 120832 - DNA, 1120 bp, Cannabis sativa
  modified_base (27)..(28): a, c, t, g, unknown or other
tttcttaaagttggttatattaaaaannaaaattgttaaaaattgagctcaatgtcctatttttactattttgaaaaatataaagtctattttgtcaattaataagggtctaattgataacttttacaaaacacagagtttaaaatagtatttacccttaataaaaaacaaagaaaaaaataggtattttcttaaaaaataaataaatgaattggaccttgaaaaatagaggtgttgtccaattaatgcccaagctactcaatacttgggccgattgtgaccacaatatatcatatggccattaatgatgtgattctgtagtattataataacacaactactcaattagttattggttagtttcttttcttgttacaaatttgggaggacattcttggtagttggctcagctttctcttgtgacacatagagtgaattatatgggatgtgagataaatgttgtgaggattcagtgattgatcgatcgatcttagcagatctgagattagtctgtaatagatactttgtaagtataatctcttggagaaattggtaaggaataactctctaatctttatagcaaagagtagctcaacctttcaaaaaaaataataattaattaaataaattataaatagatatttctttggttaccaaggaaaactattggactgaattttcatcatataaaatatgggccatgcaatttttcatcttcatttatctaaagtttataggacttaaaatgtattttctttttatttttaccacaattaattattttttgtatttaaatctaatttaatttaataattactaataattattaaataaaacataatttaaatatttttattaatttaacaaattaaaaatatcaagattaataaaatattttttatttacttttttttttttctatttttacttagcataaaaattctcaaaattgaataagttaataatgtaagtcataattaattaataacaaatcaattatcgagacttatgacttgatatttatcctggatattacgggaggaaattacactctatactctttttatattgtcctcttttatttttaccctcttttttaaagtctatcatttttacctct

SEQ ID NO: 120833 - DNA, 518 bp, Cannabis sativa
caacaatctcaatagttcatgagagatttttaactgtcagaaaaattcagggagcataatttggtacatgtcaaaattcaggagacaaaaatcgtaattagccataaatttaacactaattatctcatcatttgtcatcacaaaattttctcatccatacaataaaatttacaaagagtttagaatggttggccttaaaacatgtgataaattgtgattattgtatataattaaataaagtacgaaaatgactgaacatacaaaaacaaaaacatgtgataaattaccaaaaagacaaaaacaaaaacaaaaataaaagtaaaaggaaaaaacaaagaagaactaataaatgaagaaaaaggaaaattcttaacttgattttaaagaaagaaaaagagacacatataggaataaaggggtggacttttactttgccaagtgtctcttttaattctaaaaacaaaaaccaatataattcatatatgttattttttttttttttgaatggaaaatgtaaa

SEQ ID NO: 120834 - DNA, 1367 bp, Cannabis sativa
ctcttctaaattggcttgctctttcgaaagttattttcaaagttctatgatgaaatacatatataaataggccacttgttggcttctacttttggaagctccatcactattaaatgaaatgaatacataaataaataggccataacttgagaacactttttaagttccattacaacttaaaatagatatgtaagtcgtaactttaaaagctactatcatatttcaacattagaaattttatcaccttaaattattataaaataaattattataatattaatattttacatcctatgtgttattcacgtgcggcgtatagccttactagtattaataaaaaatgtcttaacctcgtctatatatacataaataattgtatcatgacaactcaaataactaatataattaccaaatgctttaattttgtaaagtgacattaataatattttttctaccaaacctcctttatattttcattttcaattaaaattcatcatggctggttaacattgaagctggatctattattatctataatgttgtccaaattacatgtagatattattaagtggtctcaatcctatgacattatataaatatgagaaattaattaatcaagtggcacccgtacccaaatattacaagagatattaaataattattggtgtacgatttgacaaataataggagaaatcaccaatcactcacaaaaccacatactcacacagcgacatacgtgtatagtgttggactatgactaataacaatgctaagcctctagaaattggttacaaaaattaggagaattttctaaacacatataatagcagtctctttataccactattttgttctcaaatgatcatatagtactcgacttcttcgtctattcataatccaattaatgtttgaaatggaccaattcagccgttgacgaagaatttatcaaacaaagaaaaactaagactaagacaaagagatcccgtgtatatacaaataccctcttcattaaattactattccaactctataaactgtattgatcatcaacaagaattaataacaatggagtacagtataaggtcatataattttactggtcttctcaagttaaccattgttatcttcttcttattcctactcgagaaaagctcttctgtttccttcagtttccctcaaaacaaaagtgacattgaagtggagaagcacgcaagcattgtttacgagactctagaactcacaacgaatagagttgatgcttttcttaacagcagctatggtcgaggatcgtacaacaagccggttcagctttgggatcccaaaacaaaacttgttacagatttcactactaatttcacattttccat

SEQ ID NO: 120835 - DNA, 947 bp, Cannabis sativa
  modified_base (898)..(913): a, c, t, g, unknown or other
caattagagctaatttagcatacccctattttactaataaatttaggcagtttttaccactcattaaattttactaatattgcggtcaggttagactttctttacttaaattggacaaaagtgcttaaatctaacaatctcaataatttagggggaatttttaatagctaaaaaaatttagaaagtatttagtacatatcaaaattcgggagataaaaatcttaaatagcctatatattatacgaagaaaaataatattattacatatatgaatataaaattcttaaattcaattctcagcattagcttatattagctacatttatatacttaattaacttataatgataattaaattattcttgattaaaaaatatctatattaattagggtactttaataatacactcctgaaaaaagaggtgtattatgcaccctttttgtgttttctacatccagatttagtcatagtttgttttatataacagtgtacaacaaactgtttaaattttatttttgccaaattattattttttttttaatttcttaaaaattttcaaaatatcttaaaatgatcacgttatacacattcatataacaatgtattgaaactaaaattatgtaaatgtcaaaaacactattcgtataccataaaaatttccctagaatgttaatcataaatttttttagccctatttataagaataatggtatttataatttattattttcttaaaaaatatatatgtgtatttttaaaagtttattttttatttggtatgagataatgttttaataaaaatgataatcttttacattttcttgtttagtatgagatttttctattttataaatagaaatatggaataattacataagacaccattttttgtaaaannnnnnnnnnnnnnnnttcaaagaatgttttttttacatttttacggttt

SEQ ID NO: 120836 - DNA, 1037 bp, Cannabis sativa
ttggattggatcggatggaaaaatccaatatccaataaataattggattagatcggatgggtccaaatccattggatgtgatccaataaacacacctattcatatcaattgatgaagttttaggaatgattacaaatatttcattgtacttactaaattaaattaggtgatataacaccttagaaagtgataagcttaagtgagacatttggggttgtttgttgatttatggacaagaagtaaaaaagttatgatgtgtatgagttaggttaatatgtctgcaacaaatgagacatcacatacttattgtctatgaacacatttatgacttgatttgataagcatctggaaattcttctcaaattcaagagatttcatttaatacatatgtattaattaactagtttatttaatatataaaattacagattcctatgtactatcagatttaggaatctctggtgtaatattaattagagagctttttaagttttaatattattataatatgtgggtgtaaatgaatataatataaataatgtcatattataacatttgttttgtttaaattactttattacatgaagatattggactaaaatgtgttgaatgaggggttgtgggacatacttctattcccaatgttatttcataattctttaatatttgaataatattacttttaatgctatctattaatgaataataaaatgataattttcacacttaattttaaaatgtagttaatattgaatattagtgatgtttaatatttttttttataggttacgtcttataattagttagtgatatcccataaagttattattttaagttatatgaatctcgatacttaattacaccacaatatggcacagagaaaagtactagacactaattatacttttagtatttcttttcaaaataatattgagatgttgtggtgccttttagtttttttctttaaaataatacgggtaaatactgttttggactctctgttttacaaaagttaccaattggaccctgtattttgt

SEQ ID NO: 120837 - DNA, 1059 bp, Cannabis sativa
tgcggattggattggatttaaactattatgcggatcggattggatctaaaatatgaaatttgcagtgcagattggatgttgtttgaccaaaaataatacagattgaatcaaatgaacacctttatttgtatattattaatcttgacagaaaaaatatataaataatttatgaatgtttccagttaagaaaacgtagttatatataattgtgtaaactgttagtacttttttatgaggtatattgtaatagactttgttaaaatactaacaaactcaaaataaaatatttagggagtgagagatatatggtattaatgtttatataaatttaaatatcaataatttttagaggagtgctaccgtcaacttcctgttacaacctcttagtcaacctccatgcccaaaaatacatgtcggtatatttttttcaattttttttcacggggagtgttcgttatacttacaatatcatccttataaatttttgaaaattttcgaatagtttatagtgccgaaaatacgtttgaaattttttgaacgcgcgtggtaaactggaatatcaggaaatctgtttttcgatcctgtaaactactcgaaatttttcaaaaatttacagggatgatactgtaactataacgaataccgttatgaaaaaaaaaattgaaaaaaaatatttcgacatgtgatttcgaacgtagaagttgacgaagagattataataaaagattgtaattaacattcttctaattcttattggctaagaaaatatcattgtataaaatagattaatatagttacctactcataattaggaagaacaagtcctaatggccctaaaaagataaccgtgagctgaggatgtcacgtggacattttagggctcaacttgggtctaatgtcagtgttgggcgcccaggttgacatcttgtgcaccgtctcgcatcaattttagttctcataaactttttatgggcaatctacttagttattgtcctaaaatacatgagagtaggggtgttcacaaagtatccaatccaatccgcaaaatgcggatatccg

SEQ ID NO: 120838 - DNA, 701 bp, Cannabis sativa
cttttacttccagtgtcagaccattatatcgggtgtgtcacttagcgaggcagtagttggtattactcaaagataaagtcaaaatttgagaaattcaaattgttggaaagggtgaaaggaatcccctttcaagcaattctttgagagagtgtcattacagttttgtgtaatgccctaatccataaggacggcatgtgtgtacttttggaagatagtttagtaatcgtagattaattattaataaaatttgtaaaaataataaaaattttactgaagtaaaaaatcctagctacgaataagatgacatcactaaaatttgtttcgggatccattgttacaaaattttacaaaaagactatatacaatagtggatcaaatgcacattagatacaactcaaaataacttttggtaactcgaccatacaagccagataagtcaatatgtgcattttctaaagaagaccattgtctcttgactgcccttacctacaccccagagcacctgtgagtcacaaggactcagccaaaaaagtaacagtgaaagcacatataataatctaatatctagatcgggattgtaatatcattaaacaacaatattcaaatagttgttgttaatcacaaaaattagcgttacaaacttactcactcagcacgcatttcccaaagtcaccctcggctcaaagagccttctcaaccat

SEQ ID NO: 120839 - DNA, 2617 bp, Cannabis sativa
cttgagggaaacaattcctttcctaccagaagttcgattcttaatagcatgaacgagttcaaaggccacgaggatgttatccgtgattagacgattcggtaaaaaggcgttttgtgtctctgaaatgacagatgggaggacaaccttaaatcgactaaccagaacctttgtgatgagcttagagataacattgcaaaggctgatgggacggaagtctttcatagtatgaggctttttaatctttggtatcaaagttatgatggtgcggttgagtttggtagggtcagccccatcatttagaactcccaacacagcttcagcaactaaattccccaccaaatcccagttttgttggtagaacatcgcagacataccatcaatccccggactcttatccggactcatgttgtgcaaagcatcttcaatctccactttggtgaaaggcctggtaagatcattgttcatttcaggcgtgaccatggcaggattgtttcaaggacagcagacattgcctcggcatcagaatgtgaggtctgaaaaatgttttggaaataatcttcaacaaccgacacaagatctgtttgggctgtcattttttggccagtatcattaaagagaaatctgattctgttattggattgacgagccgaagctttagcatgaaagaactttgtgttgcggtcccctaaattcatccaatcaacacgtgagcgttgttgccaatacatttcttcttgttctaaaaggtcatcgagaatagattcagaaaccttgagctcctccatagtattagcagatcggatgacagagttgttcaaatcagtcactcggttttgagcttcagcaatggttttcttcatacgcccatattttcgaatgtgccattgttgcaaattggtagcacacgagtccaggttgtgcagcacattatcaattgaaggttgagaagaatgatgtaaccaactttgagaaatgatgtctttactttcagcatcagccaaccaaagtttttcaaaacgaaaacggcttttacgtttgaattgttgtgctggtgtattatgagaagtgagtacagcagcgatagcacgatggtcagagtggaaataatccaagtgagttagtctcggcaccagaaaaacattgtcccaaagattgttggtgaaacaccagtcaagacgttccttcaaagaggatgcagcagttcggttcttgatccaggtgaaagcatcaccttcaaaaggaatatcagacaaatggcagcgatcaagagaggttctaaagtctgccattaagcgttcattacgcagaggacccccattcttgtcagcatttgataaaatctcgttaaaatcgccaattactagccacggttggagaggagcggagtcagccaatctattcaaaagtgtccatgaagcaaaccgatcttgtgcagcaggtgcaccataaaaagctgaaaagtgaaaaggtggtccatcttcaaaagccataatgcagtcaaaaaaagtatgaccaaaatgtaggagttgaacattaacattgtctttccaaagaagcatcaatccaccacttaaaccaacccttggtgcttctaaaccattattaaagtgaagactattacggagacgagtaagagaatttggattaagctttgtttccatgagaaacaagacatggggcgattgttgttgaacaagcaatcgtaaatgtcggaatgcattcgggttccccaaaccccgaacattccagcttatgattttcatggcgattggcggggctgcaaagcaacctccgctgaatgaaaaacagtggctgttgaatccgtggtcgcagaaacattagtcacaagatcagcagcctcaaaagaagatgctgaggccccatttaaaacacgactccgcttgagcattttcctcactgacattgattcactagggcgtttaggaaagacatttggagagatattctcttggttcatagcagtagtagcacaaatgttgacagaatggaaggtaggtggatgtggcattggtgtatgaagtggagttgaggtctgagatggtaaaagagtgttgtgagatggtgggtaagtagcaaaaacattacatggcataggattggtggatacatagtcaatgtcatgcatatagacatttgaaaggtcaacaaccgagtgtgtagaagctgtagtagaagtggtattagtggcagtggggggggtgttggagacatgagatgctttgtcttttgaatggtgatttatgtggttgagagcagcaggagtaggtgggatagtagtgacacaggaggcagattgatggagtggatgagatgacgatatacagccagtatttagtgtaaattgtggaggggaaggaggttggaggctggtatttgctagagattgcaaaatgtgatctgggttgtgaatattggtctggccgtggtgtgaaaggtgtgtaggaatggtgtgagaagattctccatggtgaagaattctaggctgtggaggggcacgggaagggggaatgggcagtgaggaagtaagtgtgtttcttgccaatcgtgtgagaaacggccaggcattggccttagaaaagtcggtgcgataacggtc

SEQ ID NO: 120840 - DNA, 1689 bp, Cannabis sativa
tcctggtaaaataaattccatcaattgtaggggtcagattgtagttggtttttgttcctctaaaactggtgcactttggccgaggctcatgctcttctgcaagccctataatggtgtgacattgttaaatttcccttgcattccattcattcagattgtctggttttagtaaagaaaattaacagcaattggaaggatagatcttctttgtcgaatttggttggtaaagtgttggaatctttatcttcttttcctagtgctaaggtttgttacattccaagagaaaacaatgtaaaagcacacacacttgctataaaggctctaggaacggatagagatttggtttggaattgtattggttccaatttgtgtatcatctgattttgtaactggactctcactttactttaatgttacaaatcagtttattcaaaaaaaaaaaaaaaggcttcatgcattcctggcgttttgatcggcctcttaatttttacttgttgaagtttctagccattgaagaccacttagaaccaagaacagagtaggacagagagaaagaagaagaagaggaaaggaaaagagatgcgaagattgaaaaaagattctcattaatcaataacatgtgttacagcttatataacaattcagtacaagaattcactaacagaattcatatcaaactaacagcagttaaacacgtgtttaataactctaactaccattaattgtcttcaacacctcccctcaaactcataattgaacgatcttcaattttgagtttgtgtctgaactcaacaaatctttgacttgatatagctttagttaacccatctgctaattgttcatagaaagagagttgtttaagctgaacagttttattaagcgccttttctctgatgaaatacaagtcgagttcaatgtgttttgttctttgatagaacacgggattctgagtgagcattatggtacttagattatcacagcatacagtaagaggttgagagagttgtatcttaagttcacagaatagatactgcaaccaggttagttcagctataacactagcaacactcctatattcatctttagtgcttgatcgagagatagtctgttgctttttacttttccaagcaattaaattcgagccaagaaagatagcaaatcctgtagttgacctcctgtcgtctggatctgaggcccaatctgcatcacagtaggccacaagatcaagagtgcatggtttttacaaatgcagtccatagtatgttgtgccactaatatatcgaagtattcgtttaatagctgaccaatgtgtagacaaaggtttctgcatatattggcaaaccttatttacactaaagcaaagttcaagtcttgtaatggtcagacattgcaaggctctaacaactgacctataaagttgaacatcttccaaaggttccccctggtaaggtgataaacgaataaccacttgtcattagagtgggtgccaagcttggcattactcatttgagcttttgctagaaggtccttggcatacttggcttgtgacaggtgtataccagcatctgtttgtgtcacttcaataccaagaaagcgtgtgatgagagagtgtaaagaccgcttagtttaatttagaaattagcaaatatttagggtttaattatggaaattatttattgatatttaaat

SEQ ID NO: 120841 - DNA, 1454 bp, Cannabis sativa
ttttttttttttttttaattgagtcatccataacaatgatttttttttttctattattttatttttattttttatgaatgatcttattttttttctattattttttaaaatgatcttttgtactatatttttttgctcgtaattttttttttttatcagtatttttttttttaattttatgaatgattgtttttttcttttcaatgtcatagaaaatagataccttagcatttatatgttaagtacatatctttattggttttaattaaaatttttaacttttgattagttgtacataacttcgaaagtttttttagttcttttttatttttgtcttatttatactatttatatatagttaattgttcttagtaatttttatatatataaataggggctttctatataatttattaaatcaaaatttataagactcaatattaaaatacaccaataatggtatgccacctcttttggtgcttggtatctctcttagcattttacttattaatatgtacatgtctttgttcactttaattaaaattttaactttttgtttaattatacataactttgtaagtttattttttttagttcttttttgtttttgtcttatttatattgtcgataattaattatatttattagtaattttttataaatttatttttgttttacgatatacatgtacatgatatattattttttattattttggttcactttaattgaatgttgtattaagtatattatttttgttgaaatgaattagtaatttaattagttagacaattacatattaaaattttttcaaaattataactaattttttatagtaaaatttatatgggagtatgtatgacaacacttgagtataatatcttttttttttttaatattttatgttttttttttaaatgtaaaaaaagataacagaattttttatttataaaattaaattttagatttttttttttaatttttctgtatatgtatatatatatattacttgtaaatattttaagaacttaagaaaaaaatataattttatcttgagttaattgtagcaaaaatcctaatactttcactttgctagcacttaaatttcaaaacataaattttagcgttaaaatcctcaaaactacaaacccgttagcaatttataatttttatccattttaagtgttaagtgtcatgttggattatccacatgtacatagtgtacatgtggctcaattatatttgtacacataattttattttttaaaaaattaaaataaaaaatctgaaataaataatttttttcttttttctttttgtttttctttttgttttctttttctttatgttcacgtaattctctctcttctctttctcgatcttctctctctctcgatctttgtaaagaccgcttagtttaatttggaaattaacagttaatcatgtttaattat

SEQ ID NO: 120842 - DNA, 1008 bp, Cannabis sativa
atatactatttttaatttttttttctaaatttatgttttgagtttttccaataatttatttgataatttttatgtgagttactgtacaaattttagttatgatttagattattgttatataaatttttatttaaaattttgtaaaaatataaaaaaattatttttaaagtgtaaaaataaaaaattaatgttattgatgacaagctatatacctatataggtatacgtgtaagtctccaaataaaaaaaaaaagagacatttaaatttaattattatattcaaaccttcaattattattttattattgatcaatttgaaaaaggattattattattaattcaaacatgaaaaactttcttcatgtctattatctagctagctagaagagagagaaaaaagacaaaaataatgtgtctaatgacatatcatgtccattgagaaaatattgtaaaaaggtatttatatatgattgaaaagctgagaagattaatgttatatatttatataaattaatttattttttgtcttttttagagacatgttaatccttttatgggtgtgtgacaaatatatattaatttaatttgttcaattaataaaaataaaaacagtagtaaccctaattaatgtttggactaaatattgaggtcaaattacatatttgtgaaaaacaaacataaattaaaagtgaaaaaaaatataaaaatcatatacttaatgatataattagggatgtatattttttttcatggagggtttcataggacccgtcttaatgagacaaaaatttaccgtttaaataagaaaaggcaaggatgagaaactgcttaaactgcttaatatattacttatctttttatttatattttatgttttataatatatgttggtattttttttagtacattagattattttttataatattttaagttgtgttttgtataataatttatatatattgaataataaataatgtataatattttattttttttatataattt

SEQ ID NO: 120843 - DNA, 708 bp, Cannabis sativa
  modified_base (93)..(106): a, c, t, g, unknown or other
caaccaatgtaaggttttcttaactttatatgtgtttatttattgttttagaaagttcatatttagggtattaaacaacatacttgtgagtannnnnnnnnnnnnngtaaaataaattccaacagtaatatcttcctgtttagttctcactacgggttccctaaccctagcatcgttcagttctaatgtggaggtgggttttgaagggttgggtttacacgggatggctaattttgtaggtaactcaaactctaaaacttctggacgataaattccttaaccagagtgggacattgctgcaccttaaaacaacctacatattgcctgaaccttagtatgaacctagatacagtttcaaaaccctaaaaactaccaaatccacataagatgcaatgatagaaacaaactaggtaacacatccacacaatgaaacaaacatgagaaggaagaaaacaacttactttttgaagttagggcttgggccaatgcctggttactctgtctgcaaatcatcgaatgaagcaaggatcgctttgagaggatgaagtcggaggaaactcgcaagaaaaagttcaaggaatgggatggcatgaaagtcttcaaacaaacttaatagtgatccgtgacgaagaagtttaagggttttttcaaactttctaaaatggagaaaatgatgcaaaggttgttccttttttcttactttatacc

SEQ ID NO: 120844 - DNA, 1154 bp, Cannabis sativa
ctctctctctctctcttattttgttggttgacaattaaagtgctacaaccttagttgctaatcatgtattccatactgtgcaaacacattgaaattgattttcattttgtctgagatcaaatattgccaaataactttcagtgcgttatgtaccttcaatcgacgaagttgctaatgtactcacgaaaccactcactactgattgcttcaaccacctcaaaggcaaactttatatggctaactcgtcattttgtttgaggagggatataaactaataaatcaattctttagttagttagttatcgacaattaggtagttagataaagaattagttttctgttatttgtttggttttgaaaacttcttgtatcttgtgacagtataaataaatacatttagctaactatttggttaaattttttctggttattcttcttttagctctgcttttttcctttctaaatttttttctgctattgctaagcttctacaaagattgtaaataaatttataaattatttgtcaagtttagctcacttaatccttgtgagcaagttcttttaactacccattattaagttagttaactcggttataaccaacatgtttcatggtaatatgaggttggagaatgtaaataaaattaggataagacaacatgtttcgtggaaatatatataagtttaaatatttatctatacaaatttatttagtgttcatatattgggattatattactttatttagtgttcaataaaattgttatttaatgttcataaattatactattttattaacctacttgaaaaagaaaaatagactatgcatggaagaagagtgattaggtgatgggatatatatcgaatatggataatagtatagatagatacatcatgttttaatagtctaaatcaaccttaattaaagagaggtaagaaaaaaaaagggtatgagttcaaacccaagataactaaggttattaataactatgatataccactatgttacactctaaaaattcatattagattttgattcatatctcaaagataaaaataaaagtactcaaagttttaagtttgtaagcggcataaattcaatgtttatttttagtgacataagtacttaatattgtaaaactgtaatttttctt

SEQ ID NO: 120845 - DNA, 654 bp, Cannabis sativa
ttgtaaaatctgagggatagtgaataagttgcagtgttaattatgtataattaaataaattgcagactaattaaatgcactttgtttattattatgtcaatttacaaaactagagggtctatatagttatggataatctttattatatatattattaattaattaattaatgatctaattttataacttttttttacgatgtataaatatttttatgttcactacaaggaaatatgcatatgggttgattaagaaaatatatgtaaaatttaggggacgtttggtaacacttttgtttttaattttaaaaataaaaaacaaaagtaaaatttgtgtttttaaaaaataaaaatgtgttctataacgacttttgtttttcaattttaaaaacagaaaacaaaagtttgttctataactttcaattttatttttatttttaattttatttaagtcatgtccaggtccgggtctggggccggggccgtagtccgagtccaggattggagccggcgccagagtccaggtcccaaggtctaggttggggtcaaagtccaaaatattgattaagaaaattgttgtttaaaaaaattctaaagtgatttttttgtttttaaaatttagattcttaattaaaaaaattgaaaagtaaaaaca

SEQ ID NO: 120846 - DNA, 1581 bp, Cannabis sativa
  modified_base (1518)..(1518): a, c, t, g, unknown or other
ccaataccagctggcatggatagaggctgtgtagtcccacctttttatacgataactttttacaaatgtgcaatatttgtgcgattttcttttccataatttatttgactaaatatttttcatattttacaatatttgcgatatttatgcgatatcttttgatatttgtgcaatatttttacgattttatttttgttgtgcgaaacaaaacaatcaatgaattacgattcaatttacagtactaacaaaaacgcaacacaatcaagaaacaatataccaagagatctcaagtattcaagtaatgagttaagcagtaaaacagaaaagaataacaccaggtttaatgagtttgagccatgtgcaatgctttacatctcagttggaacaacaacaactatatttttattgatatcagtgtttacaaggtaacaagaatcttcacaaatttctcagagattacgagaagaagtttctctcgctagtttagactttctctctcaaccttacactatcacaatttttactcaagcaaatctggtttgaatatcacagactattacaaagatttacaactatatatagatttgaattgttaccaaaaatatctccaaaatttccatggcacatttacactgctttaaatgatccagctcatcactaacaacaataactcatgttagcttgaaaggcgtgctttcagtacagacaatccagaagctctattaacacacaagccttccggatacatacatggcttccttcggaataccttctagactgacaataagcagtctgggagtgacctccagatcagtgacaagctatgcaggagagttattccatacacggtacaagattatctagaagtaccttctagatattctataagaccttccaccatggctttctggatccacactaagcttttagtatttgttctccggattcacagcttccaatcttagatgactaaaattgtaaccataaccaacaaatctctaccttggtttcaagttgaattctcttgataaatcaattatttaaatgttgttgtcccctaagcccctctgggctcaactgactccgatcagcttcaagcaatgcttaaacttactaattggcactatcttggttatcatatcagaaggattgtctttagttagaactttggcaatcttcacagcttctttctccacaacctctcgtatgaaatgaagcttgatatcaatgtgcttagtacattcatagtgcacacaatgcttaggtaatctaattgcactctgattatcacaataaatagaaataaccttttgattgagcttcaactcttccatcaacccggttaaccacagtgcttccttgatcgcttctatcaaggccatatattcaaattctgttgtcgacaatgccacaatcttctgaatgatcgatttctaactaatagttgttccaaatatagtaaacacatatttggtcaaagactttcaagtatcgatactgtgacagtcagtagtcccntgatccgtaaggggaaatatcgggtaagttgtgcaatcccacatcgtctggggaaggtcaagt

SEQ ID NO: 120847 - DNA, 2486 bp, Cannabis sativa
  modified_base (2451)..(2458): a, c, t, g, unknown or other
gggcataaaacccaacaagttaaggccccactttcaagctcatcttgttcgggtatacactgaccaaccactacaccaaatattacaaaaacccgacgattctggacggttactcaaatgggtagtggaattgagtcaatacaaaataatctttcaaccccaaacagcagtcaaaggataggccttagcgaactttgtagttgagtgcacatgaaaagaaaaaagcattccaaaaggcaacccggagccagtataagagcctcagccgagcaacaatgaagacaaacttacctggaaattacacgtggacgggtcatctacagattaactgtctggtatagggatttcccttgtcacacttgggggcaacacctatacggagcagtcaagtttggattcaaagcttctaataatgaagcagagtacgaagccctcattgccagtctaaaacttgctcgggagttgcatgttgaacacatcgagatctgtagtgactcacagttggtagtgaatcatgtgtctggagagtatgaggcccggggggaaaattgataacctatttgagcaaaatacatgatctgcttgcacaatttaagagctatgctctcaggaaaattctaagagaagaaaacacaattgccgacgcatttgcccgatttgcgagcaacaacatagctgataagtctaatttagtctcaattaaattccttgaagtgcctagcatcacctatgcgggagaaattgaaatgattgacgcagctccaaactggatgacaccaatagtagcctacctcaacactggagaacttcaaaatgacaagaatgaagctcgaaagataaggagaaaggctggacggtatatcagcataaaagaagtcatctatagaaggggattctccatgccactacttatatgtgttacacaaggagaagctgcacggcttttatctaaggtaaatgatggattttgtgggaaccacgcagccggacaaagcctatcaaagaaaatactaaggcaaggatatttttggccgaccatggttgaagattcaaaagcttatgttaataaatgtgataagtgccagagattttcaaagatacctcgtgcaccgcccaatgagctaacttagatgcaaagtccttggcctttgctatttggggaattgatttgatcgaacaattgcctaaaggtaaaggggaagtacagtatgcggtggttgcagtggattgcggtggttgcagtggattatttcactaaatggacagaagtcaaaccattagcaacaatcacatctaaaaaagtgctagacttcgtggtgaaaaacataatatgtcagtttggactcccctacaagatagtctcggacaacggcacatagtttgacagccaattattcactgatttctgtgtgaaccatggaatcataaaaagtttatctacagtggcacaccctcaggcaaatggtcaagtcgaagcagtcaataaaacacttaaaagataccttgaaaaaacaacttgaagattctaaggggaactggccggaagaactttcaaaagtactatggtcataccgcacaactgagaaaacagtaactggacaaactccattcgctatggcctatggttatgaagctatgctgcccgtagaattagaacctccgtcccacagaagattgacctatgatgaagaggataaccatgctctcttagtagaatcacttgacgaaatcgaagaaaaatgagctgcagcaaacctaaagtttgtggcccatcaacaaaaggtatctcggtactttaacaagaaagtgaaggcacaaaactttttcggtgggagatatggtcctcagaagagtatttctaaacacaaaaaacagcacgactggtgtgctcggaccaaactggaaagggccatatcaggtggttgaagttatagaatcgagagtgtacaaactggggcagtatgacgaaaatatcaaactcgttgtagcaccaaggtattgtaatggggaacaattaagaaagtactaccaataaaagtaccaggtcggatgaccaccctaagtacaaaattaaagaacatttactctcaagtaaatagccttctaagcgaaccccacccaaaggttcgaatacaatgactaagtactcatgtcggatgaccacctctgaaagtataattttttttaaatgcaatttgttttatttaaatttagctaaagacagattagatcaatataatagcttttatgtaagttactacggtaacaaaaatattccgaccaatgaatgaataaagatgtctatttaaattcaaattgtgtcaattctattagcaagttataaatttaccattaaatgcgtacaaaggtctgctcgaatccaaagaaccgaatacacaaaatgttgggaatattttaccaggatctacacttcaatgtattttatccttnnnnnnnntagcaacctataaatgatacttcagtaa

SEQ ID NO: 120848 - DNA, 675 bp, Cannabis sativa
atttcactatttaatataaaatatctatttaaaaaaatgaaaaaatttcttcttttaccttaggggaataattataaagctatatatataatttgaatcacccccaattaatgcatattatatagtttagtactaagttgaaaataaataaatagacttaattattaattttataaaaaagaataagaaagaaaatagccggcaatcttgaattcttgattcttgagtactgtttttcgaaaagaaaaaaaagaagaaaaaatcttgataattgactcctttcttgtctttaatatatgatattgaatttgaaattgaaacaataataataatactttgaaaaaatgtgtatgagatcaagaaattaattaaagcatgacatggataattaatttggaagaattatatgcatgcatgcatgcatctcttctatttctataaataatgaccatggcttaaaaattaataatataaaagtataatcccttaattgcataatattattctctacacaaatatttccatcactttaaaaataataagaaatattaatattgaatcatcatccactaggagttgttaaaattatcacatagattatgagctatccaaacacacattcaacattaatcatcattgctcataatcataaaaccaagatcaatactttattta

SEQ ID NO: 120849 - DNA, 768 bp, Cannabis sativa
gctggattagttacccagacttctaacatgcccaaacactggattggacaaattagcctgtctaatccaatccagtcctgcgtaccaaacgggcccctaaagtctataattcagtccatccccacttattccatgaatctgtttctacttcctgtcatcttggtgaatgaaattcaaagactttgtgcactgttttggtagggtggtcgtattgataagaaaatgattcactggtgtacttgggatatgctttgttgacataaatttgattgtgatatggattttagggacttctttgtatttaatcaagctctttgttttcttcccctgactctcttgtggctaaatttataaaggctatttacttccccacgtcttccctgattgaggccattaacactaaaaagtttctttcatctgacattcaatttaatgggggaaagatcttttttctttctggaaaacattggctaacaagtgatggctcatagccttcagtttataaggatcgttggatccctactgtgtttggtaattgttcttattctccacgttatttacctttggatgttactgtgagtatgttattgggacctttgaggttatggaatgttgacttggttcgcagctcttctgaaaaagatgaggctagggctattcttgttatacccagaggccattctcctatctctgattagttagcttggcatcgtgaaaaactcagtttatacttggttcataatagctattggcatgctattagaatta

SEQ ID NO: 120850 - DNA, 792 bp, Cannabis sativa
atagtaattaataaagaataaatatctcataaaatagactgaaaactaaaattcctctaaaacttattaatccaacaaattactattgtaaaatcattattaataatagagatactgaaactaataccacattataatataccttaaaacactaataaattaaaaattgaaagacaaaattacaaattatttaattatttaattttagtgtttaaattaaaagtgttgtagcaatggtatcatatataaacattatacacgtgagtcacgtgacgaaaattctgttcaacaacgttgtaaggcaaactgttgcatgtatcatatgtatacatacaataaaacaacctagcagttaattattaaagctggtaaccccaaagaaagaggaacaccaaacaaaaatgaaataataaaaataatgatgtaaaataaatcttaaatcatagattctgggacgttcatggtccccactttcatctaaaaattctcttctgaaatgctcaagaaataagttaaaccttaacaaaaaaaattataatttataaataatattttttcatattatattttacaaaagtatattttacataattaatcacctaaaacttaaataattttgttaaaattattgttatttctaatacaatttcaagctaatatcaaatattatgggaaaaaaaaaaatagaagacattaaacaaggaaaaaaaattaaagaaaaatcttttttttttttatttggaataacaaattagtggaagattgagttaaaagtgaaaattacatcaaata

SEQ ID NO: 120851 - DNA, 1035 bp, Cannabis sativa
tgaaatgagttttattcagggcataaaacccaacattattctctttctcacctattggatggtgaaaaatggactgagcattagactataccattggtaaatcacatcaaggttaatgttgatggagcattgtttgagcaagagggtcggtttggtattgcctgcgtggctcacaatagtcagggccaagtgatagaggctatgactttgggtaaaataggacgagttcaacttgaagttccagagatagttggcatcaaagaggctttaagctggattataagacattcttggcgacatgttaccttagaaatcgatagcctggtgtgtgttcaagcaattcaaagtagcatctccttgccatctcagtttggtcttttagtctaggatgttcataaccttttattattttatcaacataacgacctgcatatagagtaactcatagtcttgctaggagctcctatttctcgtcaggccgtgtgcttcagctggaggattgttttgctgaagtgcgttctattgtcttggaagattttatttgttaatgaaacgtatcgcttttattcaaaaaaaaaaaataataacaataatttgttttatgtttttgctagttatgtgaaaaaaaatattatttcataaatagtaaataatttcatattgaaaagtaaccagtctaaaatagccgatccaatccgtacttttgcagattgaattcgagctattatgcgaatttaattggatccaaaatatgaaatccacacatagtgcggatcgaatgcactatgagcaaaatattataatatcaacatttaagagtgatggctttatgtttctaagaaaataaaagttaggggaccttttgacaaaaaataaaatttgaggaccgatttgccaaaagttatataatttagggactaatttatcaaaagataaaatttaggactaacttgctaaaacttatataatttaaggaccaagtacaaataagcttaatattattaattaaaaaataaaaaaggctaattagtaatt

SEQ ID NO: 120852 - DNA, 559 bp, Cannabis sativa
tcaaaagaatcatcccacgatggccttgtggaccatgagaagccgagccttagctggatggtaggtgtcaacgtgttggaagtagttcctacttacccattcaaagccattaacaaaatttatttaaattaaaacagttagtacatacctgaaatttttattaaataaaaactaataatagatcattcaactaaaaagatataaagagaagagttaatacctaaaatgtttatgagatgatttattaggttgttaaaattacatgatgcagctacaaaaaaattatgtagtacataccaatccttctttttagacctttttacttcactaagtgtgcaacaacaatacacattttattattttatattttttcttgtatatacatctatagatagcgacttacttttgtgggtaagaaaaaaatactcaatttaggtgtgacggaggaaggagaggtagagtgatatatatagtacttgggaatgtgattgtgatttgtggtcttgtcctaatataaaatgaaattccgtattttaatattcccagtttgattatttaa

SEQ ID NO: 120853 - DNA, 1306 bp, Cannabis sativa
gatgcacttgagttcaacaacacagcaaatgtgtactcatttggtgcaatatcttttgttttcatgtttacaaaatggttcaaagcttcctcaaagtacccattttgaaaataagcagccatgattgttgtccaggagacaacattacgagttaacaagcgttgaaaaatattcactgcatttatgagcttgccacatttcccatacatatccatgatcgcacagttaacaaaggcatcatgttcaatgtcagccttcaacatttggcaatgaacttcaagacctaatctcaaagttccaagactagaacaaaggccaaaaacagtaacgtaagtagcactgtcccatttcagacactcacccaccatcctactcaaaacttgtattgcttcctttagatgaccaagttctagtagcccatgtaataatgaattataagaaaaaatatcattagttggtactgtattgaaaacgcttatagccccttccatatccgaaagccttgagtacatgtgaacaagggaattcttcacatgctgatgaaaactcaacccagactttaaaacataaccatgacactgcttgccttcgtggactttcccaccattagaacaggaagaaagaacagtggtcattacaaattcattaggccgacatatatgatccagagaaaacatacttttgaacaagccaagaacttcgaagtcacgtccattatgcaagtaaccagccattaatgcactccaagaaaccacatttctcacacgcatacaatcgaacagctggcgagcaatctgaatttgaccacatttagcgtagaaattgatcagaaaattcgtgtgaactacaccactaccgttatctaatgcgttgttcggaacaacgacgaaatgggcatggattatttttccgagcttaaagtttttagtatcagtagcaaatttcaggagcctcaccggatcagcagaggaggttatgtgttctgtagctttgaacagaaaaacaggagagttccttggtgtagctttaagaatggccattgtcgctgctgtagtagttgttactactcctcttcatggcgagtgtagatagtcttccgattctcattagatggtggatctattattattattattattattattattaggctaaatagaagcatcagttaagtactcaaattttatgtttgtaatagagttgacgaaacttaaagaaaattacagttttataaatattgggtagctaaaaataaaccgcttacacacataaaaaattaagtacttatgagctatttacccttatt

SEQ ID NO: 120854 - DNA, 832 bp, Cannabis sativa
tttgttttgtaattttgaagaaaagataggaggtagagtacttcttggagacaacaaaccctgcacaatttaaggaattagctcaatgatgttcaagcttgatgaggagtcaaaaggaaagtgcagaatgtgaggtatgtacctaatcttgagagaaatttattgtcaattggtgtcttggaagaaaatggatgtattgttaagaaaaatgagaagtctcttaagattattaaagggtttgtaatggtcatgaagggataatataaaaatggcatgtattttcttaaaggtgaaactgttgttagtaatgcaaacacagttgcatctgagaagagttgtgatgagactaagttgtggcatctaaggcttggacatttcagtgagagagggctcacagaacttaaaaaacaaggtattctagagggtaagagtgtgtatttaggaaaagtcatcgattgaagttcagtataggaagacacacaactaaagagcctctaggatacattcattcaaatctatggggaccaacaagggtatttatcattggtggtgctaattatttcttgagtataattgatgattactcaagaaaaatttaggttcacttgttgaaatcaaaagatgaggcattcaaaacttttgttgaatggaagaaattggttaaaaatcaaatagggaagaagattaagaaacttagaacagacaatgacctaaagtactattctaatcagttcaaaaattactgcaagcaagttgggatttggagacataaataaacacctaatgtaacgtccccgcttcaagctttcattgggcccttacacccacataa

SEQ ID NO: 120855 - DNA, 968 bp, Cannabis sativa
gcaaaaatgagaaattcgattatgtggtgtaaaaaacatttaatattttgttgggttaagctaaaagcccaaaccaaagaaaagcccaagagcccatttttctaccgctctcactgaacccaaaccctaattaataacaacagagcacacaacgctcgtctttctctttaaagaacctccgtctctcttgttcgaccgaagaagaagaagaacccacctgtgccctgagatcctcgatcgtttcgagggtccaaatcaaaaaacctaactcaagatgaggccaattttgatgaaagggcacgagaggcccctcacctttctcaagtacaacagagatggggaccttctcttctcatgcgccaaggaccacactcccaccgtctggttcgccgacaatggagagcgtctcggaacctatcgaggtcacaacggtgccgtttggtcctgcgacgtatcaagtaaatctcccttctttcaaaattttacctttttttgggtttttggtttttaatttcttgtgtttaatgacttggagggtttatggtttaggggattcgatgttgttgattactggaagtgcggatcagtcggctatgctatggaatgttcagactggtcagcaattattcacctttaactttgattctccggccaggtctgttgatttctcggtgggtgataagctcgctgttatcaccactgacccttttatgggtcacacttctgcaattcaagtcaagactattgctgaggatccagaggatcgtaagtcactatttttgagctgaagctttgttttttgttgtattcaagagtttgaaataggtgtatgatgtgtaaggtttgtgtgttcttaagtttttcattaaatttttcagagattggtgaatctgctttggtcattaagggtcctcagggaagaattaacagggctatttggggacctcttaaccgcaccattattagtg

SEQ ID NO: 120856 - DNA, 1659 bp, Cannabis sativa
taataaagtaaaataaatgggatcaaatatagagttgcaccaataataatattacacctcacatgggtgttaggcactataaatgcactttagcatttctcttttattttattaaattttaatattttaattttatgtttttttatcgtttcttttacgtgaaaaaatttaaatagtatattgagctatcctgaaagaatcataaatttatagtgccactgctgaatttgccaactagtgatgaaaaatttgatctattgtgatgcttggaaacaagggttaagttattcttaatgcaatcagaaaaaatcattgcctatgcatctaggcagttgaaagattatgagtagcgctatcccacccatgatcttgcattggcagcaataatgtttaccctaaaagtttgacaccattacatatatggcgagaagtgtgagatttacaccgatcacaaaaaccttaagtattttttttacacagaaagattaaatatgagacaataacgatggttagaattagtaaaggattcctgtgaaatcttctaccatctcggaaaagcaattgtggtggcaaatgccctaagtcggaaaagtccagtgcaagtttatgaattgaagcaaattttgccaaaactagtggaagacatgactagagctggaattgagttacagtcagaaagttggccaacatcgccttacagtcagatttactggaaaggatcaagatagcgcaacaaagcaatcccgtattggtagaacataaagagaagttcgaggctggtttagcaaaggacttttcagtatctatgaatgatttactgaggtataaagagaggatttgtgttctagtagatgatggaattataagagagattctagatgagtctcacattacttcgtactcattacacccaagaacgacaaagatgtatcaagatgtgaaatccttatactggtggctggatatgaaaggtgatatagttgagtatgtatcaaaatgcttaaattttcaacaagataaggttactaaagcctttgaagattcctaagtgaaaatgggaagatttgactatggagtttgtagttggattaccgaaaactacaggactgtatgactctatctagataattgtgaatagatttaccaagtcagcgcacattttgccaatgcgaacatcctatacaatggattaatatgtcgacatgtacatcaaggagataatacgacttcacggtgcttcgaaattgattttctcatatcgtgatccaaaatttacatctaaatttcgggagagtttacataatgccatgggtaccaagataaagtttagcatcgcttctcatcctcagagtaactaatggacagtctgagagaaatatatagatattagaagacatgttataagtatgtgtacatgagaaaatatagatcacccattcattgggatgaaacaggtgagagaagatatcttgggctagaaacagtccagaaaactcgtgaagccataaaaaaaattagagcccgaatgctcgcttcaaattgtagactaaaaagctatgatgatccagagcataggtatgtgaaattctaggggattttgtgttggaattaattttaccaggatctatttactatcatgtatgtttgattaacatccta

SEQ ID NO: 120857 - DNA, 1487 bp, Cannabis sativa
aaaatttaaaactaatagttaagacctaccgtaatcttgttgtatatttatatttagatattaaaaaaagaaaaaaacgatacctaaaattgaccaatatgctataaaagctttcctttagacaaaagtagtgccattttaatattcttaaatcttaattgagccgcatttggaacagtatttctccatttttgataaatcgaacctacaatcccaattgttattatataatccgacagaagttttccactttaaaagacccaatctaatcgattgatattgataatggcccctacagccttagtattaactgttctgtctattaatctctctcttttggacattagaccactatttaccatatcataatttactacattaatcatctgcttttagaaaaagaggaagacagaaaccattcctttttcattcttaataattattgttattttctattgtaaaagtaatttattgacttaattcttaactttttagtaccatgatcaaaatggagatgataactaaaaaaattaattgaatactcagcagtaacattgacggtataacataacattgaaaatatttgatcacatttagaggcagacccaactaaagacgaagggtgctgctcttgaaaaaaaaaaaataaaaaaaatatatatctaaatgtgatatatttgttaaaaaaaatataatagtggttaaactactttaaagcgattttaacttttaatatttaaaatttactttttgttcttctaaaaaagaataaaagatacccttcaatttttttttttgaaccagaaaattaacttttattaaatcaaatcagctaccaaaatagctttcaaatcaacagggacataaccctcttgggacacagccagacatagaaccagaagaacaagctaaaaagttagccgcctggttcccggaccgtttaacaaaattaattgaaataggaaacaaatgagaggactgcgtaagagcaacacggtccgtgattaaaagccccactagagacagcaaccgcttcttctgttgcacggcttgcaccagcagcagtgacagtgagtctgactccataaccacactaccaggcacaccttcctctacccacctccccttcacccaactgagcacctccttcaacaccatagcttcagccataaacgggtcaggttgaccataacttttaaccgccaagggatcaatgaataaaccattatgatcccgagcaatccaacccaaaccaatactattgtcatcctcaatgacagcagcatcacaattaacttttatctcgctaaaacgagattcagcccattgctcacacccggttttattcagataagaaactggcaaaacaactctattttctagctgagcattctttcaagaatcaaggtaagtaattgcagcattcaccaccctctctaacgacaaagccttattactccacaccaagtcattacgagctccccaaa

SEQ ID NO: 120858 - DNA, 1112 bp, Cannabis sativa
tatgtaatttttttgttgttttcgagttatttttatgaaaaccgtaaaaatataaaaaaaaaatcattaaatgtaaaaaatgtaaatttttttacaaaaaatatatggtaccttatgtaattatccgtaattataacatacatcacatactgtattacagattttatagtatccaaataattattatatattacaatttttgttttctgaaaaattccaaataaaagtgtaaaaattgataatacgtgcttatcattactctaaacaaatatattaccctaattcaaagctttgtgtttcttagactaaaataaatatttgaaatcaatgaataatatatgcattatatttatactcatgatttataatatttttaaatataaaatatttaaataacatgcatgcattctatggcgcagccggccacattatataatttttttagttaaaagaatattatataatttttatgttgaaaaaaataaaaaaaaaatttatagaaaaaaataaaattatgtggaaaaaagtaaaaaaatatgacatttataaggaaacaataaaaatatgtgagaatataaataaaaaaaatattaattttataagagctaaaataatatattcaaaaatttatatataaaaattttatatatagaaaattaaaggtactaaataactcacaggcccttgccacattgtaatcacaaattaaaataagatattttttttaagaaaaataccacatcggaaaagaaagtgttcatagtatctctttaactttataattatttctttttaaaaaatatatatctaagaatataaatgaaaaaaaaaaatattaattttatagagaatatttattttataattataattaaatcttataacaaaattatttatttaataattatgagaatatttttttttggattgtcatttcaatcgagagagatatcgcagcaatatcggaaagaaatttgaaaaattgtaattcgacatacaacatgaaaacatgattttcacattgaaataatcagaattaggaaagagtttcttcatgaaaaatgtagatcattaaattatctttaaaacggtacctagatcactgaaaacgg

SEQ ID NO: 120859 - DNA, 1808 bp, Cannabis sativa
atgtcgatcctttgaaatttcaatattttgtagaggatgacgagaagcctatttaccctaattgtaataggtttactaaatcatcaacacttattagattatacaatataaaagcaaaagaggggtggagtgataaggcaaagaagataatttcttccttaggcatgcaatatgaaaaaaatacatgcatgtcctaatgattgcatcctataccgtaagatgtttgtggatgcaatatcgtatcctgcttgtggtgagtctaggtggcaaaagaaaaagaattttgaagaggtaaaggttggtgtccctataaaagtgttatggtgcttaccccaaatacatcatttggttcagttctttcgaaatgtcaatcatgcaaaaaatttgatatggcatgccagtgatagaaagttagatggtaagatgacacatcttgttgactcacccgtttggaaatcaattgatgctaggtggcctaaatttagaaatgaacctaggaatatccgtcttggtctttcagcgaacaaaattaatctacataccacacttagcagtaagtatagttgatggcaagttttgcttgtgatgtataacttaccaccttggttggtaatgaagaggaagttcactatgcttacactgttgatatcaggcccttcacagcctgataatgacattgatgtgtacttagcccctctagttgatgatttgagtcaattgtggtatgagggtgttcctgcatacgatgccttcgggaaagaagaattcaatcttaaggccatattaccgtggaccattagtgattttctagctttcgaaaatctttctagagacagtgtgaaagggtacaaagcatgtcctatttgtgaggagaaaacatgttctatgtatttaaaacactcgaacaaaaatgtgatacatgggacaacctccaaaacaccctgagtgaccgggtaagctaacagatcatggtcgttatgtcaaaccacgacaaaccagctcaatcattaccttctacaattctgtcaaaaggtgatccaagtcgtccataatccaattccaggttgcttatgatctatttggcgtcaaagattacactatttggcttgttaaaaaagacattcacaaattgtgtaccatgcaatacttgggagcccaaccaatagcagtttggtgcaagtatgatttataattcttaataataaatttgataatgttcttttgactatggcggttattaattatgactttttatcatgcacataaaagaaagactgttgaacattaatgggctgaatcgagtatataaatttctaattttgggtgcgatttccatcgatgctggcactactaaaaaaaacagaatttccgacggtcgtaaaaataacttttttggtggaccgttgctaaaaaaattatttgagtgttcaaaaccgtcgtctatagtatactataagcaacaattttcaacactcgtatagattaggcgacattttataagtgcggagatgttttttttttaaaaaaataatgcactattcctggatgtttagaactgtcgggcaaagtattggccacagttttaaactgtggcccatactttgtccgccggttcaaaatcgtcaggaataaggctaataaaataaaaacacattactctcattaaaacctttagtcacgatctcaaaccctcacctctcactctctcagaccctttttctcaaaccccaactcgtgctaccctcaaatcctttttctctcttttctttctcgccgacggaccacattacactctctctctctctctc

SEQ ID NO: 120860 - DNA, 1694 bp, Cannabis sativa
tcatctactttatattattttataacagtaaaatatttatcattgttgttcttagttgattgttggaggtaagaatatttcttaactgtttttaaaatcatattttttattcattatttgttttcttttttatgctatttaattgcaatttaaaatcttcctttaatttatatttaatagtgaataataaattaattatagtacttgtgagttccatttgtatttattactattatacaagaataactgataatacagaaataaaaatagttattaatttttttgtagtaaacgaaacgtgttatcgtaaaaagtttgttggcgcttttagttgacctttactaattcagaatttcgtccgcaaaaatctcttttcttataatgcaccctgatatattagagactgtcaaacttttaatgtcttacaccgtgtaagatattggatagagtcacctaaagtatatttttagtagtctattagtggagaaaaaataggtacgccaatagtcacacccataatagtttaagtttattattacttggaaataaattagcatatttttaggcattttaaggtggccaaactacttgaagcgacaacttattagtcatgatattagcagtttccttgtaaaattaaaacatggagaattgtgtcaatatatatagtatagtatgatagctatatgcacatgcatgtggtgttaaacacgaaggtactatttagcaattattttcaaaatttgtaatcagtaaaataatttggtaattttataaattaattaaaaaatttaaatataaataggattagtctcgtctaaacttacgaaactgtctcttaaaaattgtgtccctttaatattttttattccaaatattctccttaattatacaaatgattgcaaatatttccattagttatatttttgttcttttatttcaataactagtaaatagagcgcagttcgggtgcaacagtcaaattattatataaatattaattgaataaaaaattggatatttattaattttaaactttatatatgtttattaaaaaaaattaataaatttatataaaaaaccttaaaattctaaaaagaaaaattattatacaatttcctatataaattaaaaaatacacattttttttttaaatatacattatagtaatgaaaaattagaaaacaataaatttataaaaaactcatcatataattttaagtcaactatcatcaccgtatctcatttttcgttaccattgcatttaaagttgatgtcatcactgtatctaattataaaaaattctatatgtatatgttaacgcagaatttcgttaaccaaaatttgagcctgaataataaacttgcacagaaaaataaagatggtaaagaaaaggaaaatatgtacacagaggatttttttacgtagttttgtagttaaaattctgcatactccacgagtcaatcttattagatttctgatgatttttcagggtcttttttcttatgatttttttcgtcccttttttagtctaacttgcttctatttataatcacatagtaggcaattagttacagagttgactgtaatctatacaacgtttatcccttgaaatcgtcgggtttaattacatatcacgtagtataaatgcgactattatttgaatatcacacagctgtgatttatccgctttt

SEQ ID NO: 120861 - DNA, 578 bp, Cannabis sativa
tcaataacgtcttcttcctcaactgcaagtcgggcttgtttcgctccatctgtagcaaacaatctgataaaatgtgggttgctctttgaagttttcctcattatttgctttgttcgcgccatcactttatgtttgggtagtgactttagttcagttttatgtcgagcaacagttacaacaaccttggcaacagaggttctcttagtggttggggctagatacccttcgcgcaaagtatcaacgacaccagattggactctttatgtccttttaacatgcaagtggtgcctccaacctttctgtatttcccagataaaatgcctgtttccttcgccacttatttggttggggtaccaatgatgctgcacctcagactctaatgatggtatatgctcactactcacttcccagtcttcaaagctataattcgagagactgtcactagacaaagatgaacttacacggagtcgagggtggtctttgtacaaaagttgaagcaagtcctagtcaatgtggtgatttcctccccaaaaatcactagggttcatctaacaaaaggtgggagacaagaaaataag

SEQ ID NO: 120862 - DNA, 566 bp, Cannabis sativa
ttgaggatatgaatcccaaaagcgatgacttcaaacaactaagtagttaatttagttaagacttaaccgatttaactggctccttacaatgagacctctaagtcagctcttgacatcaaactctcttcgaacattcctgaacatatgtcctaaactaatgaagcgcaatctggaaggacgttcctgctgggcacaaaacctactagaacaaactatccggaatctcttccaagagggaacaactaatttcacaagaaatctttcggatggacaaactagcctttctagaaacttcttatatatacaaatctccaatctcacactgtaaagtagggttgtgcaaaaaaattcataaaccgcccaaaccgaataatccgcccaaaccaaaccgaaaaaccgataaaaattacaaactgaaataatgagaaaaaattacaaacagctcaatcttttacttgggcgggttgaaaattggtctaaccctcccaattaaactgaatcacccgaccaacctgactttagactttaatttttttttttttgtttactttttagtttttattata

SEQ ID NO: 120863 - DNA, 2040 bp, Cannabis sativa
  modified_base (26)..(28): a, c, t, g, unknown or other
tcctttccattccattccatttcatnnnctccaaccaaacgccacctaaatagcttgatactcataataatactcattatacaagtattatacttaatgtaagttgatacgatatttcctagctagctaatatgaactatgcactatgagatgatggtgtatatatcatttttatataaggggcttatcatggtgattgtcgaataacttttagctacacttcaaatatattctcttaattaatatttcccctcgacaagttttataaggattataaataatataattttagttcattaatgtacaaaatcaatatataaatatatatatatatatatatatttatcaggttttttttacatcatctttcatatatatatatatatatatccatatacttataatttatataattagtttgcatgatcatcattttattccttaattaactagtcatattaatttataatttatattaattagttttcttaaaaatatatggtttgtcaagtaatttttttttttgaattctcatatttgataagacaaattgtaattacgtatgacaatatattaataatattcagtaaaatttaataaatttatctacttaatgagttattttcacttttatgtaaattaaacatttaatacataatatatagtatcatcaaacacattcataaatgcataaattaaatataaacataaacacatgcaaacatatagattagtgttacagctatatttcgaacatcaaatataaatattacacgtgtccatatgagtaaaagaataaagaaaatgataaatgagaggaatgaataaatgttccgccttgagataaattatgataattaaaagatgtgataacttagcgtggcactatcaatacagtaattcacaaggataacaagattacaagttaaatcctcgatacattcttgagataaataaggttggtgaatagcaagaaagaataagttaagtagaaagggtagataatgagttttttaagaggtgacccatatacttgtgagtatattgaaagagtaagagaaataaaaaaaagtacaacttatctcagaatctcaaaacactagtccaagagttgccataaaaaggctatagcgatgacaaacatcctaactagtatcccgaagaataggggtgtttattggaccacatctaatatttttaggcctatccagatccgatctaattatatattagatattagagtttaccatccgattcgatccaattcatttcagtcatccaatagattagcatccactggatgttggattagatcgatactatccattagatgtattttatgtatatctattacagtaattcagatttatcaagtattttagacctagtatttttttaattatatcggatccatccaatattgtagattcagtatttattggatttgattggatccatccaatctaaaaagaaaagtaaaattttaatgttaattttcatgtatacatatatatatatttttatgtataacaatataaaatcaaatcactcatccaaactaaatgaaatattaagtagtttgattggatgttggattatttttggacacctcatttaacatccgatccgatccgattggatattaaaaaataacatccaatccgatctgatcacaattggacatctaatctttggcggtcggttgtaattggatcggtcggttgtcattggattggattgatttatgcacacccctaccgcagaatatgaccatctattcctgaatacgttgaagaatgtcagtcataaatagagtgggttaccttgacaaagacaaattattttatgataagaacaaaaaatagttatcagtaattattttattttatccatatattgtaaatatgaaatgtgggaattgtttacgcttcatgaacgattacttatgttggatttctaatcctcaagctatgatctaactcagatgtgttgacaatcgaaaacaaaccattggcagtaatgccacatacacttaaccat

SEQ ID NO: 120864 - DNA, 1808 bp, Cannabis sativa
atcaataaaggaacaaaattattttattacttagtataatgcttggttcacatgtttatttcatgatcatatgtttgatatataaattctattaaatttttatcacattgctattcatgattaatgtgttgtctacacattgaaaaataattaagattatgtgattaaactaattagtctcgtgatttattagtacacatgatttacactgatttgataatcaataatttagtttacttacacttgtatagttgaatattttttctaaggtattagcaaagtaagcttatattagatgtacgattatacatcaaactgagcgatattcagtgtgcaaaatatatcataaacttaccataatatttttttaagtaaatatcacttacttgatcttagatcaatcttctcaatcctgagatggttaggctccagtataagtgtattgcttgcgttctttgatttgttcgttaaagctaatcaattggattgctccaatacttacatcttagtaacacgatgcaattgagtggaagtgttaatcaaaggtacaaaattcatagcttctttaaatacatagaagtgaaacgatagtttccttcgagcttggctaaacgagtttaaatagtagagtactcatttgagtaattatattagtttattataatatcatttacaaataggtaagtagtttaaggataaaatacattgaatggtggaacggtaaatttgaccctactcaatgtaaattatcaatagctatcatataaataaatttgtccctactcaatgtaaattttcaatagctatcatataaatagaataatatagctcttatttacataacctaattgactcattgtctgactaaatagaaaaataaaaagagcgccttctattttctaattcatattcttcttcttctaaaatttttgaacctgataatgaatgagtgattccccacacgattcaagtcaatactcaagatagtgtggaagattatgtagtatttttatcactttaaggagaaaccaggttcaaagcttaatcatactctacgatagaaatgatcaagagttagagatctaaacggaagaagtcatactattttgttgccatcagtataagtctttctataactttatttgtttaattcatcacttttggagaattcatatttaggatgttagattatagatttataatcacacatacatgttagtaaatctagatcttggtaaaatacttctagcaattggccgcaaagcaatggtaataatttattttcatgacatatggatttcaaacgatatttggatgatttggatgtgttcatattggtttatgtgatttttaatgattggttgtgatattaagaaattttctacaaaagttaatttgatttttgagctaacattattttatttggatagttggttaaaaattaagcaaatttaccttttacaaaacttaatttcaaataaaataaaaaagttataatattttaaagtttttgaaaatttggctaaggtttcccattcttgtgcgcgtagataaagtgattcactcagaccgcctaggccatgctggactgaccagcacattacacatcaacatagcatatgcaaataactaacactcgcgtgtcagccatccaagccctcagcctagattccatgcatctttcctccaacagatgtcttaagcccacgtgcatgtctttggatagacattgttaacttccagcaattgtcattcacgtgtgtcaccatgcacactgtctgagaaatcgtttgcatgcatgcccatgc

SEQ ID NO: 120865 - DNA, 1473 bp, Cannabis sativa
gggacacagtttcttgagcaaaggaagggatggatgacccaaacgacaatgagcctcaaaagcggaagcaacactcgaacaaataatagacgttgatggaagtgtgtcaagaacatacaagccactagatttatgtcttttaccaataatcatctttgccataaaatcttgaaataaacaatggtcaagaaataatgagatgaaacaatttagattacgagtgagtttgtaatatcccaataagcttaatagttaataattagggtttatatttatattatgagttaaccaggtattaagtgagattatgatcctactaatctagttcaatataaatttttaaattttctataagtggataaataaacgtaatttttaaattactgagatttatatagcatgtgtgaatgtaatatgaactatatgtggaataaaaatattttcaagtttggcgaccttggagactcgatcggaggccaataatgtcacaatgggtttaattagtagttttaataggattgttacagtaagttagctttagaattattaggatattttgagatacttgtagtgactaaataccctaagattagagatttctagtgattaaaaaatggcaaaataaccaattattaactaattttactattattgttgttgtcactgtagtagttgttgttattattattattattattattataaaaaaataataatctgattatatatatgataaacttagaaaacttataaacctaaacattcattctctctcgtacagagcagcaaaccttcattcattctcatccttttctaaaataacaattaatttatctttagaaattgagaatttatatagcttgaggagtagagttagcataaagatatttaggtaagttttcttattttgcttttggaatttcagatgtagctaagggttataatttttgatgttagattatactttgagtgtggtgaatttgaaatcaaagacattaattgttaagccatctgaatatttatatgtatatgtataagtagttagatttcatgtcttcttgtgttgtgaatgagaaaaatataattggtacaatattttgaaatttatttattatttatgtatttttatatgtgtttgtatgtatttgtgtgtgtaaagagaatatattgatataagaaatatgaaatgctatcatatgtagtttttaaaactagtatttttcgagaaaagtaatttttgtattttggccataacttttcactcgagtgtccgttttagacgttctatatactttttcgaagcttatgacaagctctacaatatagtgtatgacttagagtcataatataagttttattttagtgtatctgtaccgcaagatttggtagaaaatcctagattatcttacacgagtgttaagtagtgttttgggataaacacttattggtttaccattgtcatgacatagggcc

SEQ ID NO: 120866 - DNA, 968 bp, Cannabis sativa
  modified_base (48)..(71): a, c, t, g, unknown or other
  modified_base (133)..(134): a, c, t, g, unknown or other
ataactggcccaaatcaggacttgatttttttttataacaaattagannnnnnnnnnnnnnnnnnnnnnnntaaatagaggttctactgtaattgaggtttatatattcgagaagactataaattaccttagnnaacctgctattgcatagaaattggtaacaagaagataatcatattaggccataatcaatagatacaattgaaattgaagccctaactttaatcattgttaatttccttgcttcttattttcactgttttcactgttttctagtttaatttcctcttaattttgacataaccaaatagaagtaaagatttaattttacagtacttaactacaatccttgtgggatcaacctcgttcctggtgagtctattacttattacgatacgtacacttgcgtgtgcaaattaccacaacaatcttccctaatttattgcaataaagattttttaataactagagtgtttgtttatttttaagtcagtatcttgttttttatttttcattttgaattatattacattattttcttcttattattattattgtttaattgtaatgggtacctaatgggtccccatattcaatgtggattcccctcccccgaacccatcattaattaagcgggttggggacagggatgaggggcataaatgagaaatagagatggggtgaagaggtgcattactcactaattattcatccaatttccattcctagtagaggctccgtttaccatcggaacgatggtagcgttgttgcttggagacctcacaatgaggctcgaatggaaaatctcaggcaatttgaattgccctgtacggagagggtttttgtgaatctttatacatacacaatgcaatagcatatatatatatatactagcaaaaaactacgtgcgaggcacgtatactaaattttatgctaattttttttatgttatttgaaagttatacaat

SEQ ID NO: 120867 - DNA, 830 bp, Cannabis sativa
tgaatataatgaacttcataacattggcttgctaataaagaatccaactagtatagacaaagttataaatagaaaaatgatgtcattagtgcctaacatcaataggaagtgtcatactgctactgctaatggggtagttaaatattttagattttatatattttaatataatagttagattcaatttgaggtaagatccaataaatccaattttctagttattcctctcttctcgagaatctatactttgttagtatatgacaagaacataataagtttagattcgccatcacgtgatgttttggactctagatttttttaactttacattagaattctaagcctaactattaaacacataagctacaagttaagagatcttattatgagaccattcattggtgtttggtacttgagattatcacaatcaataaccacactaatgtactacctataatgtgtggtgtagttgtaaaaattcttttcaaacaaccttctttgctcagattaagagtttgaatctcattatgactcttatgactcttatggtgagaaattacacttgtccttgaaggccagcttgccagcttattgtggtggtggggccatcattggaatgaaaacccttataggtggtaatgatgacttaattaaaataagaagatataaaaaatttttaaccattttttcaaatcaacatgcacattgcggttttttcaattttttaaattatacccgcattgtaaaattaaaaatggtaaaaaccgtaccgtaaaaaatagtgcagtttctacagtttgaactatcaccaaataattaaattatcacaa

SEQ ID NO: 120868 - DNA, 557 bp, Cannabis sativa
ttagttgtaaattttgaataatgattgttatatatgtttgtggtaattacagatatgattgtttggatctcagtaggcattttgatatgccttttcatggtgcaaagatttggaacagacaaagttgggtatagttttgctcccataatttgtttatggtttgcactcatctccggcattggtctctacaattttgtcaaatttgatccttcagtggtcaaagccataaatcccaaatacatagtcgattattttcgtagaaacaacaaggacgcctggatttctcttggtggcattgttctagccattacaggttcattcattctcctatatatacaactatatattattgattttataaatttaacaaaactcctttattttattactaatttaacaaaactctcatgtatgagtattactctattactactacgtacagactgaaaaattagtgttgtaaattatctaatgattaaatatagactaattaagatttttgtctcatggactttgacatgtaccaaatcgtgctttctgaacttttaaggttgtta

SEQ ID NO: 120869 - DNA, 6029 bp, Cannabis sativa
attttgtggtggataatactttttactgacaaactattcccaacgacttttcaccaacgaaatgtcctcattgatagataatactgacaaaaaaggagctttttaccaacaaaatttgtcctcattgatgcacatatttcttatagtgcttattataactaatctctctagctaattgctaatgtggcaaagttgccactgaaattcactcattcaatattatctatatataatggccacgtggatgttgatatttttaagttaatgatattatcgaattaggtcagtcccgacccgaaacaaacataatcagggcagggcggggcgggacgaagacccgagtagagacccgattatcctggggcgggactaccccatcgggttggggccccgacccgatccgcgaaaaagcccctatatgccattcatagttttaatggaaattgaaaatgagagggaacatgaagttaattaacttgtatctagggttttaaatatggattagaggatcttgacacgtggtattggaaaactaaaagtcactcaatctaacaattatctcaaaacacgctcacatgaatgccaaaggtttgatgacgtggcagattgaaaaaataaaataatcaatgtgggtgtcattttaaaaccctcaacaagacaaccaagagtcaccgtcatgtgacagaacaactcgcttgtccctcatgaatagtttccctatttgagaaatagttgtcatcacgaaactaagggcagatgttattgtacaaattttctacctaaaaatacaagtacagtctcataaataactgacacattgacccagttcccgatagaaaaggatgatagttgagctaactttgcctgatgcaaacttgcgagaagatgccttcaagacagggtctagtcgcatactatgcctcacatagtcaaaagaataagcagaaccaagaggagttaatgctggtcgcgcatatactaatattatacgtgatgatcaagtatgcctctccgacaactagtaaagatcatttctttacataggttttgttcgaatgacaaatgtgttcgacgactcgataatgactcacatgttccacgtggtcaacacagaatgttcgactatgcgatcaaagatgaacgcaaacattcagacaataggcccaaaggccatatcgtgcgagtacaaacaccatagagcctgcgagctcgtgtgttggaatatgaacgagcaactcacgtcttgtcaagtcacatatgttgttgtacttaatttaaaaaacggatgaaactatttttatttattctttaaacgtttattctaattaaatactatcatttattataaaaacagttctaaacgataagttatataatcttaaaggacacttgctttctatataaaggagtgatccaaataaaataaacgaagttaaaaattattaccaaaagtggactaagcagaccaagctatagctgaaccactagaattctcttatcttatctttattttttgctttcgtttttgttcatttagtagcctatattttgagtactcgctatttttactgagtactcttatatcagcttttgagtattataattttatttaaatactcgcattaaattagtgttatctaattttctccgataacaattcgtttttcaattgaatattgaattgtattaatagtaatgacatttatgtaggcgctcacaatgtttatagaatcacgtgcagtgagtgcgagaatatcaacataagaaactataccagagcatgcaacttcgagtttttgcttagagtcgccacgacagtgtagctggttattccattgttaggtggagcagtcttctcgttggctgcaccctcgatgaggattgaactgtcacagccatgaacaaaacagtcgtagaaatgcactctcgggattcgtagagctatgggaagattggatttgcaatgagactccacagttgatctaacaatgactccgctttggggcaccttcttgagtagaatccaactctggtgccttgcccattcacaagtgtgccaactaagccaagtgacattataaacaaaaacactttgtaatagccgtccatgtagccatatttattagtgaacaaagagcgaaacagagagaaacatgggagaagagaaagaaaatgtattattgaaattaattgataacagatacaagggtttatatatagttgagatacaagagagctttggttgtaacaaactaaccaaccaagaataataataacggtaataactaacaaatgaaacagtaaaaacctaacaacctctaatacgccccttcaagctggtgtgtaaaagtcttttacatccagcttggacatgatgctgtgaaattgttgtggaaacagaggcttggttaatatatcagcgagattgttttgggaagagacatgattcatctgaagtgtaccgttgttaatcttttcacgaagagtgtgacaatcgatttccacatgctttgtccattcatggaagacgggattttcagcaatgtggatagttgcagtattatcacaatacaagataaaaggagttttgatgggaactgcaaagtcttgaagaattgatgtgagccatgtcagttcgcaagtggcatgtgccattgatctatattcggcttcagcagaggatcttgaggtagtttgctgcttcttagacttccaagacagtagagaatgctccaacaaaacacaatatcctgaggtagatctccttgaatctgggcaggccccccaatcggcatcagcaaaggcttgaagttggagagggtgaggtgtttgagcatggtagaataggccctgccctggagattgtttgagatagttgacaactcgtattgcagcttgaaaatgaggttggcgaggttgttgaatgtattgacttagtttgttgacagcaacactgatgtcaggcctagttatggtgaggtagatgagcttgcctatgagactttggtattgttttggatctggcaaaagagcactcgattcattgcttattttgagattgggttccattagtgtggagacaggctttgagccaaggtgacccgtgtcttaaagaagttgcaatgtgaatggtctttgggaaactaaaattcctttgttcgattgtgcaactttgagtcccaagaagaatcgtaggctgccaagatctttcagtttgaaagtggaatcaagtgtagcaataaaatgattgagagctaaaatgttgtttatagctacaattatgtcatctacgtatataagaaaatctatgaaagcattagatgtatttttaatgaacaaggagtggtcacttttggattgtgtaaaaccttgtgtaatgagagtggagctgagtttagcataccattgtcgagatgcttgttttaaaccgtataagctttttttttttttttttaatttgcaaacgacattaggtggcatcacccctttgggagtgtaactttgaggtagtttcatgtaaacatcctcatttaaatctccatggaggaaagcattatctatatccatgtgatgtaggtgccattgttttatggcaacaagagcaaaaaggagttttagtttattgaacttagctacaggagcataagtgtcaaaaaaatcaataccttgttgttgggtataacctttggcaaccagtcgagctttgagtctattgactgagccatctggattgtacttaatcttgtaaacccacttgtttccaatagcatgttcgttgggtggtaaacttgtaacaatccatgtgtgatttctttctaaggcatctgtttcagcatccatagcctgtaaccaggcagcatatttggaggcttcagcataggattttggttcaattaatgattgagtggcaagaatagcattcctgaaaagattagaaaatctatggtaagaaacatagttagcaatgggataattggttgtgtgtgcaaccttgtcacatatatagtcttgtagatatagtggttttttgatgtttctacccgttttggacatagattggtgtttgtttgaagcagtttttggaggaataatagctgctggtgtagatgcagtagggattatgtttgttggtgtgggatcagtgggtatattgattgctggtttgggatcatcaggtgtatgggttgctggtttgggatcaacaatattgttgtcatttggtgtgggatcatcgaagttgttggttactgggttggattcatggtttggtgtagaaggtgtggatgaagaagcagctgcagcaaggggtgtaacatttcgattgccaagggttctttggcgttcttgatgaacaatcatagaaaaaactttatttaatggtggacaaggatcgagaagcaatacctgatcacgaacaacatggtaagattcattaagacccttgaggaattgcagcacttgatcatggttgtggtattcttgtgttttagtagcagcaacacaagtgcaaggtatctttgggtgaagttgttgaatttcatcccaaatggcagtcggtttagtgaattaggtactgactgaatcatctccttgatggagaaaagtgaggctttcattaagctcaaaaatccgtggaccattaccttgattgaatctattgtttagttcggtcaacatttcagcagcagtatcaaaatacatgatactgctcttgatctcggatgaaaccgagtgaaggatccaagattggaccatttgattacaatgaatccaagaactatagagaggatcatcaggaggtggtttgggaagcgtatcgtcgaggaacggagtcttgttacgcgcacctatagagagtttgaagtctcgagtcctaggttgaaagttttgatctgtgaagatcggagtgacaagggctaagcctgggtgatctacagtgctgaggtagtagggacttcgtacatcctcatacgccggtcgatcgccattgttgtgatgagtagcagcagctggaacaggaactcgtggtggaatatatgtagaattctgaaatgttggaggagcagaattcgaaggagcttcgtccacgggattgttaatggaggtagctgatgaattggctctcgtgcgcaccattgttgcagatagtggaagctttgaaaaagattattgttctagcttgaatttttgcaattgataccatatagtgaacaaagagagaaacaggaaggagaaacatatatgcggctggctcttcttcttgaagcttcctacaggctttgctctggttttgcaccaacattggtttgttgtgtctgacttccagttctgttccttcccaggtttgtgtcttcttagtttcgtttctctccatcttctttttctgatttctttctgtttgtgcatttattgttctatctgtttctctttgttttctttgttccctctcgcctcttttcccattccctggctttgatttggttctgttcaacctcattaatactcttggatttgtttcctttatacgtcatcataatcattatgtattttcccctaatttctcgagcatcctcactgtttaatgccatctctctctctcacacttgcatttaattctggcggctccttcttatcagcatttactttccctgcataatcttctcttccttcgatttttgaatcgtaattatatctctaaaccaaccgtcattttacttattttcctctctcaaccaaaagccatcattgctcttaagcgacgattccagaccttctctctcagccgtgaaatgatggttcagacgccaatcctctctccgaggcgactcttcttctccaggtactcgtctctctcgctcctttccatatttgtctatttatatgtccttttcatttctgtctgcacatcactttcgatccctgctaaaaacccagttactctctactaccacaccttaatggcttcctcttccaccaaccccaaccccattacccctctcgatgacgaggacagcctcgttcatgacttt

SEQ ID NO: 120870 - DNA, 2099 bp, Cannabis sativa
tggtaaaatatttccaacacatcttcccagctagcactaagggaggtccaaggagaagatgaattaggtctacgggtaggtgtggaatgaataatagagcctgtggaagaggtagaagaagtatgcattaatgatgaataccccactaaagtcatcagagtgggaaagaatctacctccggcagtgaaagaaaagattgcctctacagttaaggtaaacattgatgtattagcctaaagtccttctaacatgagtggagtcagtcctcaagtaatttgtcatgcattgaatatagatcccacggctgatctaatttgatagaagtggagacccttagatacagtgagatcggaagcagtgaaggtagaagtagacaagttgaccaacattgatttcttcagagaagctctatatcccatatggctagtcaatctggttttggtcccaaagcctaatgggacacggagaatgtgtatagattttactgatctaaacaaggcttgtccaaaagactacttcccacttttgtaatttgatcagatggtcgacgtaacctcaaggtatgaactcttaagcttcatggatgcatactttggttacaatcaaatcaaaatgcacgtggctaaccaagagcatacaagctttcaaactggcaaaggaatcaattgctacaaggtcatgtcatttggatagaagaacgatgtagctacctaccagcaaatggtcaacaaaatgttcaagaatgtactgaggaagaacatgaaagtttatgtcgatgacatgctggtgaaatcaaaatccatgagcaatcacgaagatctcaaagatgccttttccattatctgggagcgtagaatgaaactaaaccaaaagaaatgcacttttagagttttttttaaggaaattattgggtttcatagttagttatcgaggcattgaggcaaacctggagaagatcaaagcccttttagacataccttcacccagaaaacacaagaatgttcacaagttagctggaaggattattgcacttagtagattcgtttctaaatctatagataagtgcatacctttcttcaatgtacttcgagaaaataataagtttgaatggacaattgagtgcccacttagtagattcgagaaactcaaagaacacctaacgaaggctctaatattgtccaaatcaattaagggagagtcgttattcttgtacctgtcattgtcagatcatgctataagtgccgccttagtgcgagaagaagaaaatgtacaacttccagtttattacatgagcaaaagattgttgggcgtggagtgcaaatatcctatgattaaaaacctttccttttgcttactaattgattcatggaagttaagaccatactttcaagttgatgccattaaggtattgaccaaccaccctctttgtcaagtattacaaaagctagagtcatcaggaagactcctaaagtgtgcaatggagctaagccaatttgatatacattatcaaccaagaatttcaatcaaaggtcgagccttagtagatttcattgtcgaatgcacggggataaatgatgaccctgaaatgccaatcttgaagttagaagtttggaaaatatatgtagatagagcattaaatgagaaaggttctggagctggaatcaatctaatttcttctcaacaacttcaactccaaagtgcacttcaatttgaattcgaagcttccaataatgaagctgaacatgaagctatgattgctggcttgcaattggctaaagaggttggtgccaagaacattgagctttgcagcgattcacaggtagttgtcaaccaagtttctggagagtatcagacgaaagaagagaagatggctagttatgtagcaaaacccagggagctattgaaacattttaagcactattctatgaagtaaatccctagggataaaaataccttcgcagacatgctagctaaattagcaatagatctaaaagtgaaaaaaatacggactagtgcccatcgcacatctactttgtaaagaccgcttagtttaattcggaaattagcagttaattaagatttaattatgaaaattattt

SEQ ID NO: 120871 - DNA, 1284 bp, Cannabis sativa
tagatgttacctatcttataacacatgaaaagaacataacaaaatcttaaaaaccaaatacagaaataataaatgatccaaaaaactcctaattcggttagttaaaaaaaaaaaaaaaaaaactgtaatcctattcaaaataggataatatgagtaaataaattcacctcaaatttagttcatgtcaaaaattatgtattatagattaaaacgcaaaacctgaatcttctgaaaaggtagtatggtgataatatttatctttcttgagctgataaaatatttggacaagtaagaatttcccaagcttaagctgctaacatggcttaattgtgcaaaacaaatgaacaaaagcctaagctaccttgttgctatggaaaatataatttatacacagccaactaataaactttttgtttattcacaaaagaagtccaccaatatttttctattaacccttccaactcctcacaagtttttaaaggtaactaaaaacaagacatcacgttagtggggatagaattgaattgaataaaaacttttagaagtatctctttactcccataagagaaaaagtttattattcgaggaatttaattgagaccaaacattttctttaacattattaaatatattttctttgtttattttgtccgcttaacattggtaactctaaatacttattatcaatagctttagtgatttgcatgtgaaaagttgcagtatataaggattgcatatcatcggctgtatttggtgagagtgtatactagatttattaaaatttattagctgcaaaaaagaaaaaaaaaatatgtaaattaacaaaatagacttaaattaatgtaaggacattttagctacaccacaatataagtctaagtatcatattattataagtatataacctcttgtaacatagtagattcattaaattatttagatgcaaagattcaaagttaatactaaaagaattctaaagtcaaaaccaaagataatacattgaaataaatgataaatagtatgtagtagaacagggaaccaaagtaaactatattatcataagaacatttcaagtttcagttatacctcaatatataagtctctaaagtcgtactgttataagctaacaaccttttagacacctaacgaatcattagtacgtaatagattaattaatcggtgaaaaaatacctgaccagatgctttagaatataaattaaagagctcaatcaaagaagttgagaaaaagcacagctgaagagaatactatcatctacgaaaaaa

SEQ ID NO: 120872 - DNA, 2318 bp, Cannabis sativa
  modified_base (1248)..(1256): a, c, t, g, unknown or other
tgatcataatcaaaactaggttggtttttttgattatgattaatgatattattaatgttgttgttactaagaggagattcagattccaattgggtttgatcagctttggctgagcctgaattatctgtactatcatcaccaccaccaccagattttgaacttgcctgaaatattaatcaaagaaaaagccaaaaaaaaaaagattaaaactattccaaaaggatagaaaaaagctgataaagtttggatcttttttatggtcaaacattaaagaagaagaagaagaaatgataaagtatggaacttttttgtgttttgtgtatcaaaacaagaaaaagatcataacccattaagactattccaaaagggtaatgaaatcatcaatttttgagagaagaaagctgataaagttttggttttttttatggtcaaagtatgaaacttttttaatactaactcttggggtttggtgatatctcattggccatgaagggaacatttccagagtagctgcaggtctgttgttgttgttgttgttgttagtgttactactgcttgttgtgaataaagctgtaaaagaaagaatcacaaaagcaaataatacttctttttagaagaaaatctctctttgaaaaatgatataatgaaaatattgttaaaaggttaaaaaaagaagaaaagggaacctaatcccaacagttatgaagtcagtaaactaaaatgaaaatcatgctaaagatgttagctttctatgtttgtaaactcatgcctattcaaactctatactctcttaaatcattactctattggaaaatggtaactttatagtgacattttcaaatcttaaacgtaagaaagagaattaataagtaaaacaaagcaaaccatacttgttttattattattattattattaacttcatgatgatgatgatggtgatcatttccaccacttattttaactccttgaagagcaattgcttgttcaagctcaccaaaatcaaaagctgatgacccatcttgattactgaaaaaataaacacaaaattataagtaaagatcaaattttgattatatatatatttacacaaaaaaagaagttgaattttgttacttacatgaagctagttgaaggagtattaatattcatgttatggtgaaaaactccatatggccctgaatctgataaacctgttgttgtctctacaactctatgactagccatgcaaatttatatatatatatatnnnnnnnnntatatatatatatgtatatgtgattgaagatgatgatgatgatgattgagtactatgatgatcttcaaactatattctcatcatctgaaagagaggaaagaacaaaactttgatgaagttagtgatgagcaaaatactaaaacagaggacttggaaaaaagaggttagttttgattattattaattaccttaaaaaaaaaagaaaactttatgagagctccaaagatagagacaccacccaacaaaaattaaaagaagattatattaaagatcaaagctttcttgtcaaagagagagaaagagaaagaaaaaaggtgcagtctttttcttcagatgtataataaatccatctttgatataataaagttttgatctttcataagagggtgttttttttttttttttgtaaactaagtttgattagtactatatatgaattgaattatatgtgtgtgtatgtatatatgtatatgtgtgtatgtatttgagtgaaaaatatgaataatatgatagagattttgagactcttttgaaagggtacagaaaatcttgtccttgcagacctgtctctcaggcccccttatggagggttctgttgtatgtggggtttcaatattttttaattttattttaaataatgttttttataagcttatggtcaaaaagaaagaaaaaattaattagttgaaaatattcaaaaagtttaagtctttgtagttaaaattttgatgggttattttgattttgttataattatattaaagaaatgtgtacacatagtactcttaaaataaattgtaggttcactactacaaaaacttcttttaaaggcggtttttaagctctttcagtgtcgattttggcgaaattcgttaccgacactgttcaggacgacactaaagggttttaaaaaaccgacgttattcttttaaatgaaaatttcggtacatcttctattagttttagcatttaagaagttttttagtctaattattttttatggttgtagatattgtagttgtttaggattatctataaatttttagaaaatttcaaataatt

SEQ ID NO: 120873 - DNA, 2024 bp, Cannabis sativa
  modified_base (1196)..(1201): a, c, t, g, unknown or other
  modified_base (1316)..(1319): a, c, t, g, unknown or other
atatgtcaagcactacaacacgtggcatatcgttattgttgcattcaatatctgatcccaacaaagatttaataaataatatgaaaaatatctaccaattaagaggtaccacatctaatgcaatcgtacaacacctaaactcttaccagtcagatttgtttttcaataatataaattaaacacataaaagaaaaaccatttgaaaaactgataagaatcaaattgaacaatatcatcagtaaattcaagtaaccatcatgaaaaatactttaataaatcataatacatggattaaacaaattactaaaatatagtacacccagtcaattatgagttaccaaactactacttttcactttcttatatcatactctattttatttatttatttatttttttaaaaaaatcacttctttcatattgagaaaaactagtaacctgattacttctgagttctattttactaagacgagagagaacataccagcactgggagaatagcaattgaaatcagcacagtcagccattcgagggctgcccataccaggagcttcagctccaacttcattgcagaagttccaagcttctaaaccaactctgacatttgggctcttcattcctgggtctccaacggctgacacgtaagatttctctgagctcagcggggacacgtaaacccccatactcagcaccaacatatccgaaacaaccacgagaagaagaagaaacaaccgctccgagttgacaatagccatggaagacgctaacgccaggccaactctttacttacgagtttgtgttgaaggggcaggcaaggtggcgcgtgggctcgttgcgcgcatgctatgaataaaatggaagattggagagatgggtttttgttgatttcgtgaagaaacccatgaaagaaaagatcaggtgggtagtttttgcttagacgcgacgcctgagctagctttcggatttggacagttgccccgtgagtgtgaagtgtacaggaactagaagacgaagaattcagtactcggttggtgaaaaacgaggaaagtcgtcattttcggccttcatgagaaacaaatatgggccttagctttttggaccatcatgagaaacgaagaagggccttcctattaaataataaaaaaaaattacaccaaatactcatttttttttatttcataaatacacaaaaatannnnnnaaattacaaaaatacggtttcacaaaatttaaaatatttaaatgatttttttgatcttatttatagaaaatacagtctttttatgttgtactcttattaatttattgttaatttnnnnttatttgtatgttatttttttgttgttgttttgatgttatgtatatgttattttcatgttacttttatgtagttttcttgttttttttttttttttgtattgtttctatgaaaaactataaaaatgtaaaagaaattctttaaacataaaaatgtaatttttttacaaaaaattgtgccttatttatttttttttttctaaactttacatttatacgacaacataaattttacatttatatttttcctacttaattttttttattttttacaatatttacttattgaagttaaaaaaaaaaaatctcttctttatatgacaaatggactcaatatcacttttctaaatagagatcttgatgaagtgatttatatagaataattaaaaaggtatgtgttaccaggggaagatcgagaggtgtgcaagttgcttaaatctatttatggattgaagcaagcctctagatcttggaagatcatctttaataagactattaaaaagtatggctttaaacaaaataaaaacgaaacttgtgtatacaaatacatttaaggtaatgtagtggtatttctagttctttatgttgatgactttctacttattgtaaagtgaaaattacatgaaatatgagattttgtaaaaaagttacaaaaatatgtcatttataggtttgccacccttctatggcattttttcacatttaag

SEQ ID NO: 120874 - DNA, 1012 bp, Cannabis sativa
  modified_base (979)..(987): a, c, t, g, unknown or other
gacattgtcacttgcatggaaatctctctccagtactacagataagggaaaaaagaaagctgaagatattgagaatgattccttcgacaatcctactacttcaggcttagttgagaagaatatagaaagtaatttcacttctcaagagctagtttttttaaccttctctgcgttcttcatcctcagtttttttatcagagttcttggtctgatcttccttcctttcaaagatgtcaaacaactatcaacccaatcctgcaaccataggagataatccaactcagaatgtgattagggaaggcataaacccaacaatacaagaaaaacaagcacaccaagcaatacaatagaggaatccactcaaagatccatctggcccttactgctttcatcctgctgataatccaagtaatgtcttggtctcacaactcctcactggacaagacaactacatgtcatggagtacgacaatgcaactggcgatctcattcaagaacaaacttggaatatatcaagaaactccaagaacaccaccacatggaatatatcatgtcttttctaatgggtctttcagattcttactcacaggttaggagcagcatacttctcatggaaccattgcctgaaggcaaccgtgtttttcatttagttacacaagaggaaaatcaaagagaaagtgtcactgtgactgctgatcaaactcctagcatggcttctgctctttaaggagagaaaaacaagtctcacccacaaaaaaataggtctttttgtactcatgacaacatcttggtcacaccattgaaaaatattataagatacatggttacccacctagttacaaccaaaacaaagggaaatatgcagtagccaacaaagtacaagccaaccctgaaattgggaatatttctggtgacaatcaagctatgcttccccaactcactgttggaaattattttaacaggatcttagatctactcannnnnnnnnttattaacatcctaaataagaactt

SEQ ID NO: 120875 - DNA, 1805 bp, Cannabis sativa
attttagcccacaataaatgtcaccttttttaattaactatttgtcactcattaatactattcattaataaaaaatatttttatatttataagttattaaaataatataaataaagttaattgtttgtatatttttaatgagtattaatgatattattgacttttatagctaatttgcaccttgtgcattggagctcaaatataaaaattggaccaaatatagttttatagtatattttgaaccaaatttaatccaaaatatacaccatccattaaagatggtcttaccactcgaataagaacaatagacctaaattaaagcactcttgacacgtgtttaattttgtgattatcaaagttagagtgacacgaattaacaaaacataataaataattgaaaaatgctaaaggtcacagtgatatctagcagccttttatgtgttaatatcactattggtccaactaaatattggatttcatatagtttaatataatagtttttagggagtgtcgctaatcaatcataacacgacatgtctagaagatgctaggtattactagtgcctattatcaatgctttaaataattagatatataaaaataaaaaaataaaaaaaacaaaaaaaaaatgagattctagtacaatttacggtaatatttttttttttgaataatttacggtaatatttttgttagaacaaactggagttgtaaatgttaaaagatgtttacattttttttttaaatgattcttcataaaaacaaaatctacattcttttaatgtagttattctttttctttttagcaaaattcccatttttttttttttttaataatagtagagaatataagctcaaatctataacattgttttcagatgaatttagtctataacgttaagaaaatgaccttttactttcaatttttcttttttgaaaaaacaaaaaatatattccttaagtttgaatgaaagggcatatttcatattggcaacatttgtttttgttaatccattacgcgtgactttaatacagttgtgctctgacaaaagtagttatagtaatgctacaaaaaaaagaattaattgcagtaaaattgtagaaaaaagttaaagtatttggtaaatcataaattttaaagtaatatgagttgttaagatatattataatgataatgttataatctaatttattataaaatatttttatttttcatatattttatttttttttcaaatataaatatatttgtatgtatttgataaaagttaatttatactatttttatattatattttattaaatgtaaaaaaatcagaaacttaagtacataaaaaaaattctagatattaattgctaatattaaataaaatataaaatatttttttaaaaaaataagagatttaattattatttattttattataattaatttatttaaatatttttatttttctaatatataataaataagtaagtatggtttagtaaaaataaatttattatagtcttttaatcaaaagagttttttctaaaagttaagctggaacagttttaacttttagttgtagtttttctgtaaattatttaaaatgttttattttgactacttatcaaatacaattttattacaattttttcaattagtttttaaccttttcaaaagctgtgtgaaaaggactcttatggcatgtttacttaaagggaatgggaatgaatggtatggtattgattcctataccattgtttactaaattttggaaagggagaaagtagtgggaccacacaaatttgggagaaaacaa

SEQ ID NO: 120876 - DNA, 1761 bp, Cannabis sativa
tttctattttttaaattattatattaaattatatgatatttgatgtttaattagttgtactaataataatattgatatgtagaaagatattaggtaccactgtactttttagtatatttctctaagaaatactaaaagacatccatagcgtgtaataatcttgtaatatgtaatattactattagggcaattcaatatcgaatttcactttaataataaaaaaaactactaactaattataaatcgtcatttcatagtaatttataacaacttatattaaatttgtgtataaattatatgtgtgcacatatcagtaatcttagctatacttgttttgacagaatcataaacaaaacgaaattaccattacaaattcatcaattgatttggttttgaaaatattgtaattcttttacaatgtaatccctattacattgttttatgaataaagacccaactctatatttatataatcacttttcattacttatataaaagtaaaattgccatcatacctttttttatatactcttccatattcaaataaattgaagaaaatttttgtcaatccgccattcattttcattcaaaaaaaaaaaaaattaagctaaaatttacaatatcattttcattatagcattgctattaggaactagacacaaagtctagcactagtaccttgtaaatagttaataatattctataataattattaaattaaattttgtaaaatttgatacttaatttcagtaatagcaatataagtagtgctactgttatcttttaatatttttcttatatgagcatttttattaagtacaataatatctagcaccatttacttatttataccaacagcaatactccgcatttaaacgatactaggcaccattaataccttagtactcccaacaatttctctattctatcatttaaaatacattactaaaatttattttctctaacatacttttacattatacgatacatcaaattcttataaaaaatctcctttaaaatatattatcaaaattttaattttttaaaatgttattatatacacatatcctcatataaaataattattaaaactaaaaataattaataaaatatattttaaataataaataatattatatgaatgtagaacatgaaaaaaaaaaaaaaaaatatagcatttactataaagtgtttttagtaaaattgttttaactttttaaaactattcttaccatttatctagttactattcctatttcaatctaacctcataaatatctttatttgtattattgtaccttttctcacacgtgcaaagattggatcaaaattcagtctcttcttcacatgtttttgtcattgaactgtccttatagtcttaaaacgacaacacaatgtttctacgacacgtgtggagagagaatctatacataaaattccaaattcctacatttttttttttttataaatatataattatgaagtgattttttatattttgtaatttatgattaaatttaagttaataatacattttttctactcaacttataaagtgtaaaatatcaaagtcaatttcttaaaacaagaacataatcaaattattttattttcctactattaattagctttttttaataatttatgaggtagataacacaattcaaaataatcaattactatacatgttaaatgtttaaattttatttttcacatctaaattatttaattttttaaaaaacttacactattataattaat

SEQ ID NO: 120877 - DNA, 1608 bp, Cannabis sativa
  modified_base (136)..(163): a, c, t, g, unknown or other
  modified_base (1582)..(1583): a, c, t, g, unknown or other
ataataaattatgcatgactaggaaagtgatttaggcaattttttggatcgattgtgtctttcaagccatccctgtaattttatcctagttacctttttttagccttaacttattcttaatttttatttaaccaannnnnnnnnnnnnnnnnnnnnnnnnnnncttaactacaatcctcgtgggatcggcctcactcttggtgaatctattacttgtaaacgatacgtgcacttgcgtgtgcaaaatatcacaacagaagcgctccaagttgacatagttgacaacatgtcaacttgggtgctaagtgcatcaccaggtggtccgggcaccgagtgcctaggtgcttcaaacgggaaatgttctgattctgattcaaatgcctctaacatgtttgtgaaaagtcttattcatgtctaagcacaaagtttgagctatttgcactaaggcagactcaaaaattgaaaccctagataggaatgtcaacctgggcgctgggtgaaaatcttaagcatccgggttgacttctaaggtgttgtttcgtcctatttcaaggttcgagcctcaaacttggattcttcttatttcttaattcagatcactgaaagatggtgagttgaaaacaatttggcgggatctaaacactattatggagtttctaaagtcaacttgagcgcaagactcgagacccctcttatgtcgactgctataaaatattattaaaataatcaaatactaaatagtaagaaatatgattagaatactattttaatttttttttgactattttacctaaaaaagttaaaaaaaaaaaaaaaaaatatatgattggaggctctaaaacccttaacatctactatttaattatttttgttgtcaccaaatatttatatgcaattaatcgaaccaaccaacgaggaggtttttcagatagacctaaaagcaaatttgatcttcatcgaatttggggatgggcagcagtaaacaactattaacataaatacaatgtataatatttttcagccatttccgaacaagtttctgcgctcacacgttcaactgaaagtcaaatattgatagtacagaaaagatatagcaataattataattggtatgcactttactgacactttgacataatcttccctatgtactactttttttatggaataattttaactacactcttaccacctcatcccttcactagctaagagagttgttattagacaatttaagctgtctaatattatatggatgaggcttgcttaataattttttattttatttatttaattatatttatgagatttgatattaaattacaatattaagaatatttttaattgtgttataaaagtgagaaatgttactagacatgatgcttaatacttcataaggtaataaggagtaatattaatattggtgtaatttaatataaggtctcacttattttagtttaataaaaattataaagaactgttgaccaattataagacgtaggggtgtttataaaatagccggtcgaattcaatctgcacaatctaatctgcaaagtacggatatccgcacttgtgcggattnnattggattggaaaattcaaaatccg

SEQ ID NO: 120878 - DNA, 1908 bp, Cannabis sativa
tttttaatgaccaaagccgcttccaaaaatctgtattggcatctcggcaccaagcatccttagattcttacaagaatttatatgcacttttaatcgaataattcccgcaagtctcaagttgcctataatgtacatgttaatataatataaatggataatttttggcattggattcgaatcaaactcacaatcccattttactaagaacaccaataattaagggttgtgttcgaaaacatcaaaaaatcagattttagtgtaattaaaagtaactgtaagattattatatttaaaatatgaaacatatatgatcgtgtataaaatataaaataaattaaatatatattcatagtgaataaatgatcgaaatatctccggttatagattttttgagtttcaatccaacgtgagctttaatctacaaatgaaaacaaaactttattagtatgagtattcaggtttccaaactcttaaaactctcttagatagatttattgtgttttaccgaatgagtaataagcttggagactagtatcctatatttataaatgagatatattgtatcagtatttgtgccacactaattgtcaaaatattttaacaattaattttaaaaattaaatttattaattaaatcttattgtaattagaacaattcaattaaatattaactaattaattatattttataaatcaaatcaaataaattactccatataaatttattctaacattaattacatttttggaggtaattaaaagattccaattacaccctttgattctcaagacccgagtgtaattaattatattgtgtaattactaaaaaaaaaattattttaaatattataagctgctaaaaaaatatttttggggcttttttatttttatacttcaaaacagtttttttttttcatttttacgaaattctacacagaatctcctattgcaactagcgatgcaacctaaattgacattcagtataaaaagtgacaaattaaggaagcttaggtagaacgaggctcaatattcacatcaaaattttaattttaaaaaaatataaatcaattaaatattttagtataaattaaaatttaacataatattatatatcaattcaatataatacaatacaatacgatctaaaaacgtattaaacgagtctataagtttaaaattaaaagtctactcaagtatatggtaaataatgtaatttaacgattataatataagaaaaaaaaaagggaaacattgtactcacctccttacaaatcaagctctcctattaattagaacaagaacaatttaacaacattaaatatcaagtttaaataaaataattgtatgacataatttaactctactcataattatgaaaagtaatgcatcattatgatcttagaattaatttcaatatttctcatcgaatcatatattagttgtatatatatttatatatgtttataggctgaatatgatagaattacatgttctataatctatttcatctattttcaagagattataagcttaactaattaatactatatatatttttatacaaacttgtggccatgtgatcacctaattcgattgttcacgtgtcagacaaaacatgttagaacatgctttatatatcacaattcttttacttaaaaaaaacaatcaattagggaatcctcatttcacttgagaaagaaaaaaatgaattcatttaatttatattacttatagatatttccaattatacaataatatttatctatttatgtatttttgacttggaatagctaagattttccaataatattaggaataacaaaaaggcaatttatatagtatggtctaagtatgatttatgaaaaagaagaagaagaaaaaaggattataatgaacacacaatatata

SEQ ID NO: 120879 - DNA, 3672 bp, Cannabis sativa
tcatttcactccagaccaccaccaagaaacccaagatctggccctccctccattcctcgtttattatgtcaagtctgccataaaccaggtcatactgctgcaatttgccattataggttcgacaagaactttgtgactccaagaactggtgattcgaaagtctttctcacagaaatagaagatcaagacaatcctcaagcttactcatctcatactgtgcctgaatttcttgatgattacgattggtacgcggacacaagagccaccaatcatgtagctcaaggcatggaaccacttgactctgaatcaccatacttgggtcctgatgctcttactgtaggtaatggaaagcaacttccaatctctcatgttggtaatacctctctcacctcttctcatctccctttaagattgaattctgtccttaaagtacctaatattactaagaatcttgttagtgtcttacagcttacccaagataaccatgtattcttagaatttcactccacctgttgttttgtcaaggacaaggccacaaggactgttttgctcaaggggagggttaaaaacgggctatacacactgtctcaccgatcatttagcacaccagatgtccatctgcagtgtcaagttgccactaccaatcctagatctactactctttctcttactgattgtacatcagctaaagaaacatcttgtaataacatagctgatacatcaactattacttcttgtaatgattcctctattaataaaatcagtgcttttgagactaattctcttactcctcatatggctcttgttgctaataaaaccagcattaatcaatggcatgttaaattgggacaccctgccccaaaaatacttgccaaaatattagcacaaattaatatttccccaaacttaaaagacctgaaattttgtgaagcctgtaaacagggaaagagccatcgattaccctaccccatctctgctactagagcatctcagccacttgagttagttcatacggacttatggggtccatctcacaccccatctaaagacggatatagatactatattcatttttttagataattttagccgatacacttggatctttccccttaccctaaagtctcaagcctatccaacatttttacagtttaaagtctttgctgaaaaacagtttagtttacctttaaaaagtattcaatctgactggggaggtgagtataggtctttggccaaattcttgcagcaacatggcattcactttcagcacccttaccctcatgatcatgctcaaaatggtcgtgctgaaaggaagtatcgtcatattactgaaacggggttaactttgttggctcaagcaggtcttgacttgtcctattggtggcatgcttttagcactgccacatatgtcattaaccgaatgccatctctggttataggagatatatctcctcttgaatgcctacttcacaaagctccacactatgagtttcttaagccttttggctgtgcatgcgttccatatttacgcccttacaatacacataaaatgagcttcagatctaacaaatgtatctttcttggctactctcttcatcacaaaggatacatttgtgaaaataaagatggtcggatctatgttactagaaatattgatttcaatgaagaggattttcctggatcactcactgcaatcaaatcccaggtatcatctcctcctattattcctatacccactgctactttctctacaccactattgcatactaatgctacaactcttttgcctgaggtaccatctatccaagatcctacaggtcgtaccactgctcctacaccagcagtacctcctgcttcagcagccattcctacaccagaagctgctactgatcaacatctgcctattgcaactgcctcttctacacatactggacataccacaactccatacacacatactcaccctccaaataatcctataccaccaccaatttcctctgatcaggcttcccacaactcccacccaatgcaaaccagatcgaaatctggcattcacaaaccgaaagcctacactgctacttcttaccctttatctgagtgccttttacccaaagaacccacctcccttaaacaggctcttgttgatcccaaatggcatgcatctatgcaaaccgaaaacacagctcttcgcaagaacaacacatggaagcttgttccctatcatccttctatgacacttataggaaataagtgggttcataagataaagctcaaggctgatggttcactagacaaatacaaatctcggttagttgcaaaaggctattctcaaacacctggcattgattttaaagagacatttagtcccgtagttaaaccagccacagtgcggattttactcacccttgtagtgtcattcaattggccgatcactcagctagatgtatctaatgcttttttacatggcacacttgaagaagttgtttacatgcctcaaccaccaggctttgttgatccaaagtatcctcactatgtctgtcaactaaacaaggccttgtatggccttaaacaagctccccgagcttggaaccaaaagctcaaaactactctctacagccacggttttcaactgtcaaaggcagacaattctttgtttatcaaaggctctggtgtcaatcttattgtactcttggtatatgtggatgatattttgattaagggaccaaacaaaaatgctatttctgctatcattgctgctctaaatcaggaatttgatatcgaagatctcggccctctacactattttttgggagttgaagttcacagaaatgcatcaggcatatatctctcacaatcaaaatacatagctgatctacttacaagactcaaaatggagggtgctaaaccttttcctagtcctacaagttcctcatatgttttgtccctcactaatggagagccgtttgatgatcataccttgtacagaagtaccttaggggcgttacaatacttgactttgacaagaccggacattgccttcattgtgaataaattgagccaatttattcatgcccctaccacgattcattgggaggcatgtaagaggttattctgttacctcaaaggcaccattcatgagggacttcacatcaaactagctctgcgattatgtttgcaagcatatttcgatgctgattgggcgagttgtcctgatgaccgtcgctctactggaggctatgctgtatatttagggggcaacctcatttcctggtctgcaaagaagcagccagttgttgcacggtccagcacagagagtgagtttcgtgctcttgcaaacaccgctgctgaactcaaatggctgaactctgttttacatgagcttcaagtgaatcttccagcatcctcaataatctgggttgacaaccaaggggctgcctcgttggctgccaaccatgtcttccatgctagatcaaaacacattgaaattgatcttcactttgtgagagatcaaattctagcaagggaagttgaagttagatacgttccttccatcgatcaaaccacggatattctaaccaaagctctcaccaaagatcgatttttgtatctcaaagccaagctcaatgtgtgttccactccttttcgcttgaggggggatgataaataacaaac

SEQ ID NO: 120880 - DNA, 706 bp, Cannabis sativa
aagggagatgctgttgaaagactaagagtttctttgggctttgaaggtcagttggctgttgatgctattgggagaagtggtggaattgccttactatggaagaataaagaagatgtccatgtcttgagctttacaatcagttatatagatgttagtattcatgttcgtgatcatcctgtgtggcgtttaactggatgctatggtgagcctaatcgaaacaaccgctttaaaacatggaatctgttgagaagtcttgctgaacaatatgattttccttggtgtcttgttggtgatttaaataatgtaacaagtcaagaggacaaaagaggtggaaatccttatcctgattggctaatccaaggtttcaatcgtgctttggctgactccaatctaattgatttcgatcttagtggttactcttacacttgggagaaaggaaggggtagcaataactggattgaagccaggttagatagggccctagtcaatcaaaaatggcttgatatttttaatgatgcgaagctccaaaaccttgagtggtctagttcagatcattgtcctattcttctcattccctgcaataccgaaactgttactgctacaaaggttttcagatttgaaaatgcctggctgagagaaccaatgtgcactcaaattgtgaaggatggctgagacttaacttatggctgcaatattactgacaaga

SEQ ID NO: 120881 - DNA, 1380 bp, Cannabis sativa
  modified_base (296)..(301): a, c, t, g, unknown or other
  modified_base (561)..(566): a, c, t, g, unknown or other
aatataattcctcaattaactcataattatctaattagggttttgctaattcttttcttaattccgggtattacaggattaaattggatctaaaaaataaaatccgcacttagtgcagatcgaatacactatgagtaaaatagtgcggattaaattgaagaaacacccctaatttaaatacttaaactagagtgggcaaaattctcaacacaagatgaccccctaacttctacaagactcgaaagagattaatttaaaaatgggataattacataagacactattttttgtaaaannnnnntatatttttatgtttaaagaatttttattttttttacatttttacagttttccagagaaacaacatgaaagcaacaagaaaactacataaagtaacatgaaaataacatcaaaacaacaataacaaaaataacatacaaacaacaaaaatcaacaacaaattaaaaagagtaaaagataaaaaaatcgtattttctgtaaataaaatcaaaaaatcataaaagtgtttagaatttcgtgaaactatatttttgtaatttnnnnnnttgtttttgtgtatttgtaaaattatttctttaaaaattaattttattaattgttattaattaattaggctcaataatgtcatgaattaattacattgatattataataaatatattattacatttttaacgtacttttttttttttatatatatattatcatagtttcattaacctatttttaattttatattcacattaaacttaataataataaaaacgtataattatagtacataaatgcaaattttttaatacaaataaataataataatccatattttgtaatgtatattaatattgcattctttgttggattgaaaaaatatatacctcttttagtatatatacaatcacataatgtatttaagtatatatatatcttttagtatttatacacaaccatttaaaaatatatatacatataatttaagaattttttcaataatgtacttaaaatataaactatttacaaaaatattttaataaatttcaattacaataataccttgtcacatcattaaaaaatacctttaactccaaaataatatatttgaaaatgagattaatcccaaatttcattttttattatttttcctaggtttttaaaagtaacattttagggctcgtttggtacgtcgtattgtattgtgttggattgtgttgtattatgttattattatttaatacaatacaatattccgtattgacttgcattaattgattgcgtaaagttataatatattttcaatacactcgatcccaacaccaactacgggtccgggtctcaggtctgggtcggagattgatgttg

SEQ ID NO: 120882 - DNA, 1291 bp, Cannabis sativa
gatctctccttgaaaagtgcttgcttccacgtgaggcaagacttaaaaagctatctcctgaaaggttgtagaaccttctcccggaggtagcacagttattcttcttattttgtagacttgattacaaactcaaaacaatacaaaatacataaatacagagtatagaaaataaaaattggaattaacaatctccccctttgacactttgattgattaaatattttataagaagaaaacctgtataaagtgttagaaacaaaacaatagagtatagaaaacactccttctgcatgaaagtatactaacgcataaaacaaaacaactttttcaacgaagaagttcacaaaccacaaacataaacaaacaactcctcttgatgagttcgacacaactattcactctgagtagtggacaacaaagtgcataaatatttctcctcttttttgtctatcaaagaagccaaagataaaaaatagagcacctgtagcagtagaatgcagagacactagaacaataataggggaaccacaagcaggacgcctcaacagacttagggtactcttggttttcaccattgacgatttgaaacttgaaaaccctagaaagaatgctcacactctgaaaaagaataaaactttgaaaaacaaaaagaatgagagattgatagaggagaacttaggtgggggtattatacaagaaagagaagtgtgagaagttaagagaaataagagtaattaaaagaaataacccacaaaatagaaaataaaataaaaacaaaataaaactcttcttacccttatgctccacgaaaagggatagaaaatgaaacaaaaaaaaatccaatcaagtcaattgattctaaaattaaaccaattaagacctaaagaccccacacaatctgcattaacaataaaaaccaattaacttgatctttcttgccttgtacgagaatgccaccaaaaataaaacaaataatacaatttttaattaatacacttgtttcctaaaattacaaaagagaaaataaagacacatcctacaaaaataaaaatgtaccggagaactgtattatcttcttcgtgaagcttcctacagggccggctctggtgaggatcaacaagggtttttcttgttttctctttattcaatctctagtttcaatatctagtttctgctccttctctcctcttttgatgtattaattatgctaacgtcacatttaataatcattaggaaaaaactcctaatttcttctgctcagagactctttaatgctctctctctctctctc

SEQ ID NO: 120883 - DNA, 1030 bp, Cannabis sativa
gactctcgatgaagatgggtccaaataatatatgaaaattaaaaaatatataagaaaaaaaatattaaaataggtctaatgagtctcaccttaaactaaaacccaatactaataaaataatcccaacaaaacatatgcatgaaagactctccgtacaggcgagtatttagattttaaatttaaagactattttctagaaggagggattttatcccaacttatagcacatggaacacctcagcagaacggtgttgcagagaaaagaaatcaaacctttttagatatggttggatttatgatatgttgctcgatactgccactaagctgttggggatacacactttaggcaactacttttgaatgtagtatccttaaaaaacataaacaaaactctaatagaattatagaatgggaaaaaactcagtttcaaatatttctacatttgggattttcctgctcatgttcttaaacccatgactgggaagcttgctcccagaacaaaagtgtgtatgtttgtaggatattaagagaaaaatcaaggtgcctacttatatagtcatcaagacaataaagttgtatcagcaaatgctacttttcttgaacatgactatatgaaagatcacaaaccacatagtcgttatcaagcaaataaaaaaatgattagttttcttaaccatcaactcagtaccattagttgaatgaccaacattggtcaccactattcttgaaaatgaaaccccggtacatcatcgtagtgggagggttgtaagaaaacctatccgctatgaacacgaaacacatgttcttatctctgactcagacaaggacgatcctttgacatacaaagaagaaatggaagaccctgactctgacaaatggaacaatttcatggatcaagaaatggattccttgcacaccaacaaagtctcagtacatgaaactccacttgaagttgttacacccattgggtataattggatttttaaaaagaaaagaaatgttgaatggaaggtagagacctttaaagcta

SEQ ID NO: 120884 - DNA, 666 bp, Cannabis sativa
  modified_base (27)..(28): a, c, t, g, unknown or other
tctttatttactttattatattacatnnacattatactacttgtcgcttataatctagactcactgtcgttggccaaaagtgaggtcaacattttgagagcatagcttttgaactgtgcgagcagatcgtgtattttgctcagatacgttatcatcttttcccccgagcctcatattcttcaaatacatgatttaccaccagctgtgaatcactgcagatctcaatatgttcagccttcatttcccaagctagtcttagaccggcgatcaaagcttcatgttcagcctcattattagatgccttaaatccaaatttgactccagcgtgcatgtgttaccctccatgtgtgacaagggaaatttcccaaatagttgatccgtagccaacccgtccacatgtaatttccaagttggcttgtcttcactgttacttggctgaggtatttgtactggctcggggttattttctgatatgcttccttccttgcccgttcattctactacaaagtcggctaaggcctaacatttaatcgttgtttggggttgaaaggtaatttcatactgacctaattctaccgcccacttgagtaaccgtctagaggcgtccaatttttgcaatatttggcgtaacagttggtcagagtatacccgaacagggtgagcttg

SEQ ID NO: 120885 - DNA, 1348 bp, Cannabis sativa
tatgtatttattaattaaaaataagttatgataataataaaatttaaacataacactgaatattatgatattataattaaaactactaaaaatataaaactaaaactatatattaatttatctataaggtgttacataaaaatttgaatatttataaataaatacttaaattctaataattttaattatatttttatatgatacctattttaaaaaaaaattatataaatctaattgaaactataaaatatacatgtaatttagtaattaacttattaattgtaaaaaaaaaataaaaaaataaaacatgaatttttcgagcctaaatattaaaacgggttgatctttttaaacaaaaaaagctagtacgagcaaaatacgacacgaatccgaatatgacacaaatatactgagcctactggccatgccaaacctaccgtttaaaaatattagcataatacgatacgacacgactcatattttaaaaattatagaaaatataaatcagacccgtacaaatttacaacactactttaaaggcatattgcttcattatgaaatatttggaatgtacatattttatatacaatattttgttatagactctaaaaaatgaaatattatatatagttgtttatctttcttaatattttttaagacatgtttgacaattactacatgtacttcaaataaaatattgaaacacatgataagttttctcaaaaaatatttccatgtactcattttgctttgaaaaaacatataataaaaaatattgcttaacaaagccttaatccatcacctaatactgtactaaaagcaaactacgaagtcccttttctagttgtaattaccatttaacgagaagatgatgaaagaacacatggtgatataaacttatatatatatatatatatatatgtaatttattgtactaattatttaatattttatagatatattattatctttgccaatgattttgcatatgattatgtatcccacaattaaagatcactcttagaacatttggccctataagtggggttggctcttaagtagaccttctaacttttcttgatttctttacttcatataattaattaagctaaataaatatgaagttttcatatatctttcaaggtggtaattaaggtctctatatatatatagtagcattgtttctttttattattataaagaataaaaaatctaaatttcatatgattattctaaacatgttttttcatgtgataatatatatctaaaacccttatattaatgtgaagtttatcactaaactaaatatgctataaattaagaataattatcttttttaccccctgta

SEQ ID NO: 120886 - DNA, 1234 bp, Cannabis sativa
tgtcgatggtgaggggagtgaaacagactcagtagacaatgctcctctagacgaaccattttcctatgaagacttagtctcacgggttaagaagttcgaactaacaacatttgaaaggttaagtttgattcacattgccactttgaagcctatgtcgatgcaacgaccccatcttccctttaccaatcttgtgattattcctactggtggtttcgattcctattatttgctgcggtatcacttttccctttcagtcttttgtaaaggagatcctgattcattacgacgtgtctccgttccagcttacgcccaatatctatcgcataatccttgggttttatgcgatgtatatggaatacactcgacgagaacccacattcaatgattttagctatttttatgatataaaaaatgttggccatgacaatggtttttactgttttagtaaatgggccaattttgaggtcaatggggtagagggtaccatttccaatatgggagattagaaatcaaagtggttctacacattcaaaattcaaggaattataatagacttcaattgtcgaccttgtacgatgtatatctttctacttgatcattatttttttctttttcttttatgaatgctaacatttatctgtgctcataggtagaccagctcgattagtgttggctagagatcatgtagaaattgatgaggttctgagtagtcttgcagtctatgattgtgattggcgtctattgtgtactaccacaaatttgcgagagcacaagttgattctagctgatgccaaacttcaacgagaggcaatttacaaggaaccttccaagaaatagaaagaaaaaatcgacgaacgtctttccaagtaggctctaagacaagtataaagtaatacgtcttcacatatgccaaaaatgtcctgtcggtttgcttgatttctcgatctttaattcttccacttttttgtagatatgaatttcttcaagcaagcctcgacttttaaccacaaaataaaggtttaacattgtaaatccttctactgcgactcctccacaaaagataaaaaacgatgtcttcaataccctagtgattgacttatcgaagagtcaataccccaataatagtcaaagatcctctatagatgatctacatcgaatagggataaatttatagttctacccttcaatgtactttatccttaaaacacttagctatctataaatgatattttag

SEQ ID NO: 120887 - DNA, 573 bp, Cannabis sativa
ttatgacatattatatagtctacaataataattctaacataaacaactcaaattgacgaattaataatgaatcacactagtagcaaaataagcctaatctataaaaacgtcatataaaccagaaaaaaagtaaaacacacggtagaaaacataattacagtcttaaggttatttttgtaaattaaatgtaaaattagctgccaaatgtaaattttcctaccaaatatgtaattattgtaaattatcctaattttaattagtgtaattagtattgaattttatatattttaatttaataataattattaaaaatattagtatacaaggtactttagtatgagagagagaagctcattttgatttcaaataatcttttagggtgtgattggtttaggatttgaaaactattttattttttagggtgtaattaatattgatttatttattttggtgggacttcttctaaaaagtctcttttcatttctatttaggagaattttcatttttttataggttttaatatatgagtttgtaaatatatatggaagagatttcaatggttacatttttatt

SEQ ID NO: 120888 - DNA, 2456 bp, Cannabis sativa
  modified_base (2343)..(2347): a, c, t, g, unknown or other
taacggtcaaaaaagttcagggggaatgatttagtacatgtcaatgttcgggggaaaaattgttaattagcctaaaatatatgtatgcttattattgatgttgattgatctcaattaattagcagtaaaactattttgtatgtgatattgataaatcactccaatgggagcatgggggttggcgtgtgaagaagcccaactgtagcggcccatgtgggctgatgagaaaggacagggtcaagctgagccaatcctatggtgccatgtggcgcacatgttgggggaggagaaggcgccacattggcactgagccggataggcgaaacgaatgaaagagcgccatttggtgctgatggagcagtgggaccggtggtttatgtggcaagtggaataggctgatggacttctcctcttgggcttctttgctcctttcttcttttcatttcaattttgctacttggtttctcatttgttttcctttttcttcttttcttcaacaacaacactaattcttacaaaataacaataaattaaattcaaataaaatatttttaaaataaaaatatatttcattagtttcatgaaaatattaatttaaacttaatttattttaaactttaagaccaataattgtgcatttttcaccattaatcatttgttaactgctattttagtttttcatccagaattttcccaataaatacacatttagtgggattgtttggatctaaaacaacttcctccagttcttcaattaactttaactggtttttctcgtcttggattctaaggtgtagatcctcttctttcttctcgccttcttctgttatgaccgccattaattgatggtttgatcttctattttgaagctctacatgatagcattcgcaagccagcagttgatcacctcgcactacacctactcctactggtgtttggaattttaaagataggtgtttgattgaactgactgcccctagtccaatcaatgcaaggcaacccatcaatatgttataaactgatggtagatcaagaactaagaaatcttgcattaatgttgtggataatggtggctcgcctatagttaattggagtccaatgatgccttggctggagacactatctctggtaaatccgcataagctcaccatgcaaggttttaactttgcattttgtagtcccattttctttagcgtatccctgtaaaggatgtttaccgagcttctattatccaccaacactctttttatcttcttattggcgagttgctttgtaatgacaagaggatcgacgtgtgggtaccttacgtgctttttatcttcctctgagaatacaattggaggttcttctgtcttggctttctttagtggttatggagtaaacaccgatttctcattcttgattttattgacatatctcttctggacattactacactctccagcgagatgcgaccctcccaagataaccaatatatcctcaccctcaatagggagaggttgcattctttggttatctgggttgttgggctgaacatgtcagttttattcattcccttgacgatttaaatattgtccgaaatacccaagagagatcaggctctctatctcgtcctttagttgccgacactcttcagttatatgccctatgtctttatgaaattcacaaaaccttgttaggtctcgtttgtgtcttgcatgtctcattggctcaggcttgaggaatgcaaccatgtgctcattttcaagaaagatattttcccgagtttcattaagcttggtgtaaatggtgtaagttggcacatatttatcgtgctttttttgtttcttcttattttgagattattctctcaagtcatcttttcttttggtgttcgaaccacttggattgtcagcctttgtagagacattacttgatgtggcagtacttgtgctgggtttgtttcttgagccagtcttcagtaacttcatctcatttcttgcttcctctttgcgcacaaacactttcactcttttgttgaattcattaatatttttttactggatgaccttgtaagtcatcctacaacttgcctccagctgttgataggtcggtcgtgatccctacttcaagagcagtaagttgaatactatcattgaagtttctaactttagcagcggttgtactaaagtgactcaagtaagccttaactgactcgcctagttgttgctttatgttagttagggatgatgcctcaggtcgcctatctctagttgccttaaattatttcttaaaatccttggacaactattcccaagaagttatcgaatggtgggtgaatttatctgtaaagaccgcttagtnnnnnttggaaattagcagttaattaagacttaattatgaaattattcatagatatttaaataattatttatgttgttagatttgaattctgaatgcatttttatgtcatatag

SEQ ID NO: 120889 - DNA, 511 bp, Cannabis sativa
aaaaacacagtatttttgaaaagatttccgtgtgacagtatttttgtaaaagttatcccaaattccaatatttttgtaagtttcccatctattatggctattcaaactgatctaggaacttggtctatataatcataagaaattaataacttatgttgataaggaaatttgagaaaatagttgggtatacactctcactcaataaatgtttgggtcatggtaatgagtttgtctaataattcagtttttatggttggatcaaacgattggatgagagcaaatctaacctttttcttttaaataaagtcaaaagaaaaaaaaaaacataataataataagctattattcttgattaaggttttttaattttgtctaatagtaagactatttgttggtattagggttatatatcggtcggtttgggcggtttatcttatatattttctaacccaatctaaagttcaggttgctaaaatttaagtgcaatccgctcaatttaaaaaaaaaaaaa

SEQ ID NO: 120890 - DNA, 2623 bp, Cannabis sativa
ctatgagcatgagtgtcttttaacattaatcatattttttatatttattttttttttctatttatgaaacttatttatctttttattttttctaaatttgtttttattattttatatttaataagaatttttttaacaatgaataacttcattgaaaaaagaatcataatgtcatacaaactttaagaattaagaaactccaacaaaggaagaaatctcatcaaaccatactagttctctatccacccgaagagcatgccgagctaatccatgtgcagccccattagctgtccgccttacatggattagggatactttaggaaaactagacatcaaactagttaaatcctctaataaggaaccaagctcattgaggaaggaagagcattttaaaaacgcatttacaactgctaaacaatcagattcaacaaattataaagaaagacccacagtataagagcccaatccaatgctacaagtaaagccacatactttgcttagataattgagaaataaaccattaatggtttagaaagacaagctactacaaaaccatttgaatctcttattatagctcctattccaatcgtctgagtatgttcatctattgctgcatcaatatttaatttcaaacagcctacagatggagttgaccatgtagcagccaaattatagcctttagtcaaagaggatataggaaattttctaatctgatgatactcatctgaaagaagtttaattcttgagataatcacatttggatgttgcgaatctttttcgtgagttatactgtttctttcaccccatatataccatgccgaaagaataaagaactcaaaatttgactaggaaaacatgtttgaagctctcaacagaacttgttgaaaactcacattcactaataccttttcaataaaactaaagtgcaagagttttcaagtttgttcaaaagcactacaccaaaaaaattgcatggctattatagtatttttatcaaaaccacatagaggacaatctgactgtaaaacaagctttcgctttttcaagccccaagtggtaggtaaaatttcatgaaaatctctccatgcaaaattaagaattttagatggcaagttcaatttctagaaacatttccacaccaagaagaaaagacctctagagggagaaccatctaaagaatcaatggttgaagccacccaataaccactctttactgaataattactattatttgtatagtgccacatccaactatctgcttttgagaacttactagttggaatagagcaaattcactcttgaccaacccgattaaatatagaatccaatgttgataaattccaacctccaattccttgtaacataacatctttaaataacaatttagaattctgccccgctggtgttactggtagaaaagaataaggtctgaatagtcaaggatctttaaatatatggataatatctccatttcctactcgacgatgcaatcctttagtaagtaaagcatgtcgccaaacaatacttttttttagatataactaaaatggtcacccttggaacaaaaacatggaaataaaataaagtattatagtgtctaaaaattaaaatagcaaacaaggattgctcctactaattaaaataattaaataactcttaataaaattgcaactaatcattaggatgaatcaatactattatatatattctatataagtgtggctatgtaacagaattcttggtgtaacgatcctttttgggtttctgtgttaactttaacagaatattctattaattaacaaaatattctttattaaatttataatattattatatatatatttaaaaataaaaattaggtagatattttatataaagaaattttatttatatttaaaatacttaaaatattattttaaatttattagtttaactttaaattagaataaaaaaattcatgtaaatattttatataaactaaatttgattatgtgagttttggatagaatatagtaaattaaaatatatacattatgatatatgttacctagttttgaaaaatttaaaaatttaaaaatacgtatatacataattatatccaaatgacacaccaatgtagcaataattaattttttttcctaaagatcaaaatctcaatattcaaaatttaaaaaaaaaaatgccttacctaattaaaaaaaaaaattaaacatacatgtattgcacttaacattacctaattatacgtgtaatacacataacatatagttcaataaataagtgcaaaactcatttatatatatatatatatatataagcatgttaacctttaacccactatgtttaataagagttatattcgttttaatatgcttaacttttttattttaaaaaaagaatgatcatcttggaagaataagtaaaaaagtcacaataaaaaatgtaaaagaaaaatcagtcggtttgattttaatagattgtgtaaaatagcaaaaatattgtttaactagtaaacaacccgcactttgcggcgaatatttaacaaattttaaattatatatataaaataaatcataacttttatttaatgaaaattaagtaataaattgtatcaaattttaat

SEQ ID NO: 120891 - DNA, 665 bp, Cannabis sativa
atcaatatcaacattatgctcctggaaatgattatgagtaaataccataacattgaactcagagtttacttaaagaataatagcattaattgtgttgtgcaaaattattccaaccctgttctattaatacctttccatcactacttttcatcaatcctatctcccctcttgatccacatggaggctttacttgactcgataaaaagtcacaatatttcacccaaaatgcttttggaatttgctggataagagaagaccataaaaaaaatgttaatggaggataattaccactaaagttaagctaccaaaaaacataactacacataactgtaacctatataaatacatgtattgtatacatacattctcctcatcatacaaattaccttttacatgttgtagaaactatgattagtattataatataggaattgaaaattcaacatatcaaaaagacttaacatgcaggtttacaaacatgtcatcctctaattttggcacattagacaaacttagggtaaaaaaattgccaaaataattacatacatatatataaatactagcaaaaaactacgtgcgaggcacgtatactaaattttatgctaggttttttttatgttatttgaaagtgagattattattactgaatgcaatatattagtgtt

SEQ ID NO: 120892 - DNA, 1339 bp, Cannabis sativa
tgtaattatctctctaatttattacttttttttatatattttagagattctttattttgaaacatctcatgtgatattttaaaaacatgtcttgccctaactcccatgagctcccttctatttttcacaatagatcaacattttttttactttaaattttaatattacatcatacataagtttttttaaaataaatttctaaaattctattttttttaaatttaatatctttttatttattttaaatatatattattaatatttacacatattttcatttaaaaaatataaaacctcaaacaattaataaaagatgtctaaacaataaatagtattatatcaatgtagagtatgaatagtaaatttaaaatagaaatgaagtttagatcatttgatatatcttgttttagtttagttctttaaatttgagagaatttttattttaaaacatctaatgtgagtgtttttacttataaaaataactttttcactgttagattttgtttggtatttaatcataatgtgtatttaatcatgaatgatatgtccgaagagatgctcctcattagctctctctctttgaatcttgaattttcccatttaatttcaatgtattcattttgcatattactttattttttttaactagtttatgttattttttattatagcaaagtgggtaatatatattaatatatatatattatatatataaggattagtctgaattatggaccctaatcgagtctgtaccgtacaaacttaaatgtctcatcgtgatattaatctgtttgtctaattaggttttttgtttttcctctcattataccatggttttaataacgtcttcaccgtttagaagaaaagaaagaaagaaacatcatcttcaccgcatttcaattaggatttttttaagtctctctcattgtgatattaaataaattacaaaaataaagaattttcactaccccatggttgaaccctatagacagccaagttcttcatgagcttttccaatttaagtctaattgacttaagttgggcccttttatttttactacttttatttaacttacataactatgccttcattactaaaaaaattggcctatctcggcggttctttgtgtaactactgatattgattccaatctcgatggttgcacatggaacagccgagattggttatgtttttctaaaaggaaaaaaaattgattttaggacccaatgttggtggttcccttacaaatcagtgtcctatcttggcggtagttcgtaagggaacgacggagattggatccccatgttaaagaaaaaaacacagaacttcaaaaaaaaa

SEQ ID NO: 120893 - DNA, 802 bp, Cannabis sativa
cttcagtccattgttttagcggatgttttcatctaataaaaattattttcattcaataataataataagaatataacaaaaaaatgtaaataaaatatatttttttaaagataattaaattataatttaggggtttatattcaataattcttgttgcatatgcattacataaaactttcacaattatattacaaaattcattcatagttattgggtatcttgtatttttagcaaagtatcacttttataccctttttatttccaatttattttatttgataccctcaattttgataatcatttaaaatggtaccttccactaaattttggtcaacttatttttcataatgaccaaattactcgcagttaattggttttatttgatttttattttctaaaattaaaaaatattaaaggaaataaaaataacttcactaattagtcgttttttttggtacactttgcaagaatactttcaacgttgattgtcttttttgttcacatagccccttcgtgcggtagttattatatctcatgtaaaacaaaaaattattcttgcggtatttcatgattactacatttaaaaccattatcattaccatatctcatttataatgatcattacattgaaagttattgtcatcaaatgtagtagagataagggatttgatgcttggaatggcaataagtgagaaggaaaatcaaggatctcgatggatctagtcgggttgtcgtcttctgttgggattttatgccctaaataaaactcatttcaatttaatctcatttgttatcaatagaa

SEQ ID NO: 120894 - DNA, 770 bp, Cannabis sativa
catgtaccccttaaccccctctggatagcccaagaaaacacactttctggcccattgttccaatttatcaagtctgatgtgagcatatgctaggcatccaaaggttttcaacctgtcatagtctccagttttccatgtccataattctattagagtcttgaagtctattgcagatgatggacacatgtttatcaagtggcaagttgtcatgacagcctctgcccataagtcctttagccttgagtgaattagcaggcatctagctctctccagaatggtcttgttcatcctcttagcaaggccattctgttgagggtttcttagaactgttttatgccttgctattccattctttctgcaaagattggtgaagtcatctgcttaaaactctaggccattatcagatctcagtttcttaatttttcttccagtttgtgtctcaagtaacgttctctaatctttgaaagtattgaatgcatcattcttgtttttgagtatgtgaacccaaacatatcttgaatgatcatcaataaaggttagaaaatatctagcccctcctcgagacattattcttgagggtccccacaaatctgaatgaatataatctagcgttgatttgatgttatgtatgccagttccaaatttaactttggtagattttccataaacacattgttcacaaaaatctaagtccttaattacattctttccaagtaaacatttattgcttaaaacttctaatccctttttactcacatgaccaagtcttt

SEQ ID NO: 120895 - DNA, 1264 bp, Cannabis sativa
aaatgatagattttaaaaaagaaggtaaaaataaaagaagacaatataaaaagggtatagagtgtaatttcctcccccatcttcgatacccaacgtcacataccatgacccacctcaaattcccattgtcgcaaaccactacccatctctgaaggagccctatcaacctcaagtgatcaaggctcaacccaaggcttaccccctacaaattgcgccatggtacataagaagttgcacgttgggaagacgaatatgggtttggaaagaggaaaacgagaagagaagcaaaagactacctaattgacgtgggaaaagatgatctgccaccaactcatgtttgtttgtgtacatgcatagaagagagggcctcttgaatgtaacctgccatggccccaagggtagtggcacactacgtccaaggaggccaagccacaaaaggaatgaaaccctaaatctaaagggtgagaatgattttttttttattctcctcacaactcttttaagaaatgttattaatttttatgtagactatataagatttttatctcccgaactatgatatatgtattattgtactccctaaaattttcatcgcgttaaaaatagttccgaactattcataatgttctaaaataggatttctgttaagttctatcctatgtggcttactgaatgttgatatggctagtcaatgttgtgtcattgtcacgtcaacgtgtgtaatttaatataaaaattaatttaaaattaaagtatatatattttcttattataaattaaagaaaaataaactaaaattaatattttacatattagaaaataaaacaaaaaatttaaacataattagaatgaaaattgaaattagtatagatttttttagcataattgattaagttaacttaatcattaacgtacaccttagaatcccaaacattttattcggaaaaaaaaaatgaacatggaaaggaaaagaacaatttcattctactgattctttaacacagacccaaaaatcatgttttaaagaaaaaaagttcagtgataagacgagattagacttcacggtcattacatataaaagcttctcggtatcgaagagatatccactatacgaaacttcttgtgggtaaacatccactttgccacattgtgggccaaaaagttacaagttcttacaattagggctgtacatcggtcggtttgggcggtttatcctatatattttctaacccaatctaaagttcgggttgctaaaatttaagtg

SEQ ID NO: 120896 - DNA, 612 bp, Cannabis sativa
atcaatacagttttatcaatttaatcagacagttctcagttatatgtaattaaataattaaatttgaatttagaattcataaaattttagatttttgattgctttgataaaattttatcaaaaaaatttgaatttagggtaccaaataagtatgattttaaaatacagggtatcaaataagtattattaaaaatagagagtactcaacttgtatctagataaaacacatggtaccaaatgtatagacacttaaaaaaaactaaaaatatttgaaaacaaaactatttcaatacacaaataaagatgaataattctattttcgtagagttattatattgctaaataaaaaacatgtacaaaatacttagaatagaaaatatttaaggtcttattatcagtagtttatttactttatttaaattccatgtaattgttcaaatatttatattaatgaaaaatgtaggttcaagttattattaataaatttcattcaagttgttgacgcggtttttcgtcaacggatctaagaagatcgtaaaacgagcaaggtgaacacaagcaatagttaatcaaagtaaaccggtttgcaaaaaaaaattcaccaaaaacaaa

SEQ ID NO: 120897 - DNA, 1445 bp, Cannabis sativa
aacgtacatgaatatgaaacaaaaattagactaaaaaattcttctaaatgccgaaacaagtcaaaggggcatcagtacatcccttttaagggggtgtattgtagaattacccttattattataaaaaactgtgttaatgtcattacatagtattgatattattattttttttaaaaaaattaaaaataaataaatagtataacaatatttataattaaaataaatattatattaaataataatgtgtgagattataattatatcattcttaaaatgtgttatactattaaagtatttttaaaattaagagtgcaaaaataatgtgaaaaagagataaaataaaatattatatttttagatgatatgaagatttttagacttttaaaaaatgtcatgtttagcaataggactttagtatacatatgtgtatattatttaaggctaattaagatttttactctatgaactttttcatgtatcaaatcatgtcttttgaatttttttaacagttaaatttttttccaggattatcgaaattgtttgatttaaagacttttatcaaattttattcgattttaccaattttgtgattgttcatgtactaaattatgctctctaaattttaatatctatcaaatcatctcctcgaatttcgacatgtaccaaattatgtccctgaactttcattcatactagatttttcttactaaaattgaaaaaaaaaaaatccttatatctaataatctcaattgtttagggggatttttaatggttttaaaaatttaagaaacataatttaatatatgtcaaagttcgggaacaaaaattttaattagcgattatttaataattgtgtgattaatttgtattttagctaaaattgaacggcagagccgattgaatatgacatataataataatgattataataatacaagcttaaacatttgttaacatatgtatagatatagatttatcatctacttttttgttttatccattttcctcatttattaattttttaaattattagacatatttatttatttttatttcgaccttctctattagtttgtatttatattaaatacaaataattataacacaaatatattatatatctatctgtctatattaataaataccaagttgaggttacatttcctatatattagtttgtatttctattaattttattatttctttttatatatatatccgtatcttatttatatgccactatatattaaaaatcattattattattaccctacattatcaaaatttataaaataaaatctttatttatggatgttaccacattattacgtaatatattaatatgtatgtggcattactcttagggttcgtttggaacgccgtattaggtcgtattgtactgtattgtattatattgaattgaattatatatcatatttttatat

SEQ ID NO: 120898 - DNA, 1840 bp, Cannabis sativa
atttcgggacgaaatttctataaggaggggataatagtaatatcctaagattaagaaaacggattatcgaaccctaactagtaaaatgtgtaattatatgaaattatattatgatataattaaatatttattaattatactgataaatgatatgttaagacccgttggtgagccatgggtattttcataattttgacccgagaagggtaaaactgtaattttaatattattgcatgcttatggactatattattatatagtatatttattttgtccttctgcaagtattttctgtcaagtcggcgcggtatagtcacaatcagatatttcaggccgaattgggggttcgaggtcaaatacacatttttttggaattttattttggcattttataattgattgattaatctgaaatttattcgagtaattcgtggtgtgattaaatgatatttttgcccttgaattgtgcatatgctatgttatggccctaagggcattttggtcttttcgatcatttgagttattttcaacaaattggaattttaagtaaaaggaaatgcatttttttggttttttccagctcttaaccgacccatctacgtctctctattctcctctcttccatttttataatctttgtgaattgaaccttgtatcaagcttgtgttgtgaagattttggtgcttgggattttaaggaacttgaggtagccttctctaccattttgatttgaatttatgctgctgaaattaagttgaacaaacatgctttatttgtgattttgctcatgtatgcatgtgtgtagaaagttggtttgatcttgatattattagcataattgtgttgttgagttgtggataattttcttggtaattttagatgagattttaaggttttgtttgtgtatgaaatttgattataggctttgaattttattgttgtttgtaagctgaaatatgatttaggtatttaagctcttgaatatgagattgtggtgatttttgctcaagtgttaagctaattttcaatattgttaaatctgattttgtgatgcctatttgctgaggattaaagcttgtatttggtatttttactctctgcggttatggctttaatctatggaatatgattttgaggtatatgcatgtttggggtgaattaggtgtgttttgggcttgtgtttcgaagctagaaaatggggtttcctgggtttggaacccaagcgccgcagcgcccaccccactaactgggcgctgcggcctgcccctgtgtaaattctgagttttcaacccaggttctgcggccccatgtggggagtgccgcggctcgcccttcgattttgggcagttttgaatgcaatattcaaatgctcgtaactttgtgatccagactctgttttgggtgttccgagtatcgttggaaagctcattccgagctctatatgtttatatggatttgaatgcaaattttattatgtatgtgaaagtggatttagggattaaccctatttgtgaatcctaaaaattgtgactaggattatcggcacttggtcacgagcacccggggattttggaatctccatatttgcgggacatcaagtaagatagtagttaggacatagaggtaagcacggtggcgctcatgttgaatattatatttgtaattaattaaaaatcaagtttagggttattacccttaaaagagtggttttgtggcctagggtttttaccctagtgattgttgatgtttaaatgctatgtcatgctttatatgttgatttaaagaattatgcattcaagacataatttggttggactcagtaattagaaccgagatgaac

SEQ ID NO: 120899 - DNA, 1156 bp, Cannabis sativa
aaagtttaaattctgtgctaatctcattagtaatcccgtttaggggattagggtttcataagtatcttgggtagcgtgcctaattatttagggtgttacattatggcactcaattattgtgaaaaatttgactaacgaccgagaatgaatcagaattggataagcagagcaccaggccatttatcaacttgggtgctgagtgcttatttcagagcttctgagacgtcattttaatacttcaaatgttctagaacttgaggacaaggtcacctaccctatttttgaccattctagagagaatgcttggagcagaattagcatttgaatgatcgaaaccagtgcaccagatcgattgttaacctgagcgctaggcccaacaccaggttaacctatgcgataggctctgtttccaggccaacccgagtttttttgagaattcccaatacactttttctgagaatctgaatggaaaaggcccacgttgacaatatgtcaacctaggcgctggattccagttttggccccttggaagttctatttggtctctaaaaatagttgaatcttaatatttgctaaaacagagaatatgcctgacaaagttctcggaaaagatcatcaaaattagcccacgttgacaaattgtcaacctgggcattgagccttgctttcggcacccatgaagtgttgtttcttccccgaaagtacctatttctctatttttgataaagacgaagatgatgtaaaagttgaatcaccaatttaatacttggaagtcacccaaattgacaaattctcaacttgtgcgctgggtgctcgagtgctcaaaactgaacttctttgaatttgattatgatggctcaaatatgtctatggtatgtctagttcatatcttaatgcaaagtttgacccatttgcagtaagacagtcccagaaatttgaaaccctagttagggatgtcaagtagctgggtgctgggtgaaaccctaggtgccaagttgacttgtagggtgtaggttcatgtaatttaagctctcaaggcctagattcggttgctttatggtacaaaataccgaaagatagtgagttggaaatatgttattgaagtctaaacttccatctcggagttcccgaagtcaacctaggcgtagggctaagg

SEQ ID NO: 120900 - DNA, 591 bp, Cannabis sativa
  modified_base (488)..(496): a, c, t, g, unknown or other
tgtaaaaaaaaatattctttgaatttaaaaatataaatattttacaaaaaatagtgcattatgtaattattccaataattgagaaaaacttctatccatgggcgattgcccaattttattttatttgttaattctttcttcaacttatcttttgagcattaggcattcctaacacgatgtacacataataaggaatttatataatttgtggaatttatataatttgtggaatttaataattaattgcaacaatgacaaaatcaagttgtggtatttgatattttatttaagagtaagtataaaatccaaataattgaaaaaatcgtttaaatcgacttactgaatactgttagaaccgaaatcgaaaaaactaaaaatcggaaaaactgctaacggttaaaatcatcattgaacgatcggttttatttagtaataaacagactgaaaaaactgaaaccggctgttatatattaatttattaagttttnnnnnnnnntattatagttactaataatatattattttttattaatattaaagtataaagaataagataattagttttttaacaattaatttatatgtttgtag

SEQ ID NO: 120901 - DNA, 2247 bp, Cannabis sativa
tggtaaaataatttccaatagttgctgagtgtaagcttattgatatggaattgagaggttatccgttcacctgggagaaggggaagggcactgataactgggttgaagttcgtttggaccgggcattgatttctcaggagtggcaagtgttgtttcctacggcttcattgcatatctagaggtctcggtttttgaccattgtcctatttggattaatcttactgtgagtaaacatgtcccgtctcaaaagaagttccgttacgaaaatgcatggtctcgggaacctatgtgtcgcatgattgttcaagctaattgggatatggaggcgcatggttctttggatagaaagctaagttcttgcagcacgactcttggtgtttggggaagagatatcacaggcaattttaacaacaagatcaaccggtgcaataaggttctcaagagactgaaaggaagaagagattcagagtccatttcaatgtacaaagagacacaatctcaactctttgaagttctctctaagaaagagatttattggaggcaaaggtctaaacaattgtggttacaagccggggaccaaaacaccaaatattttcactcatgtgcaagtagtagaaagcgtagcaatcaaattatttgtttgaagaatgatgatggcacttgggtcgattgggatagtggtcttcgagatgtgatggcaaagtactacacggagttattctctacttcaaattcgaattggcaccgtgtcattgattgtgttcatggcattgttttggaagatcaaaacagagacatgttacttcctgttgaggaggccgaggtgagaaaagctctttttcaaatgcacccagataaatctccaggtcctgatggttttaatcccaggttttaccaaaagcattgggatattgtgggaaaggatgtcacgagaatggttcaacatttcttcattgttggtgagtttcctgatcatttaatccatactaatattgtcttagtcccgaaaaagactcaccccgaaagcatgagtgatttgcagcctattgccttatgtaatgtactttataagattgcgtcgaaagttttggcaaatagactcaagggatgcctccctagtgttatttatgagactcagagtgctttcttaccagggcgccttattactgataatattttggttttgtatgagataatgcattatcttaagcggaaacaaaaaggtaagcaaggtttcatggctttgaaaatggacatgagtaaggcgtatgatagaattgagtggggctttctggaagctatgttgagaaagttgggatttcaagcacattgtattcggcttctattaaaatgtgtttgcttagtttcttataagtttgttgctgggggacaagaagtagggccgattgttcctactagaggtttgaggcaaggtgatctattgtcaccttatctcttcatcttgtgtgctgaaggattctcgacattgttaaatgactatgagataaggggagttatctgaggatgtaaagttgcgaggggtgcacctttggtgtctcatatgctctttgcagatgatagttatatctattgtcaagcgacagaggagggtgctagaaatgtgatggaactcttacattgttttcaagaagcctcgggacagcaagtgaatcatcaaaagtccactattttcttcagtctaaatactgcccagaatgtcaaaaatacaatttgttctttgatgggaattgctgaagctggggagaatagcttttatttgggtcttccaaacactttgggccgcaataagacatctatgcttggattcttgaaagataaaatgaggaaaagaattcagagctgggaaggaaaattcttgtctaaagcagggaaagagttgctaattaaatctgtggctcaatcattaccaagctatgccatgaatgtttccttttaccagtggaaacttgtcaggaaatggagcaactaatgtgcaaattctggtggcaagcttcaacaaagaataataaagggatacattggaagagttgggagaagttaacagtacataagtctaagggtggaatggggtttagaaatctgcgagattttaacttgagcctccttagcaaacaaggttggcgtttattaagtcagcctaattccttggtgagtcgtatcttcaaagctcgttattatagaagtggtagttttctatccgcagatttggggtgtaatccgagcttt

SEQ ID NO: 120902 - DNA, 1255 bp, Cannabis sativa
aactgctaatttccaaatttaactaagcggtctttacaacatagtggtgccgatgtacactcgcagtagtgaccctatcactgtaggtgtttaggggtcccgggatacaaagctcgtgtcttggaatactattattgtgtttggttattttgtaatgaatattgcaatcattttttttatttgacttgtatgacaattgaatgaaataattagtgtattgaattatttttcaatattaataaaaaaattatttaatttattattaaataaaatacataaaaataatgaaagataaatattaatatgaataataactttcattccattccaaatatgataacaccaaaccaaacgggctattcgtgtatccatttcatttggagacacatgtttatttgttgtacttttattcaatgacatcacaataaaatattttaatatgagatttagatatttggttatttgttgctacatgtgagaggtttatgtgcatatttgttgatgttttggaaaaagtatatttaatatatgttacattttgaatttttcaaatcaaatttaaccaaaccataacctaatcgcccatttggtttgttcaaattacgtcttccaagggaaaatttaaccaaaccgcccattttgttgggtttgttgaaattacatttttcaagggattgataaaatcagcttcatttttagaaatatcagcccctgttaagtcatatcacaatttgttaatattatttattattattttttatattgtgacaagactacacatcacaatcacatccacaagtactatatatatatcctttttacctctctttccaccttcacaccttaattttttattatttttttcttgcctagagaagttagtcgccatctatagatgtatgtatagggataaaataataaaatatgtattgttgttgcagtgaagtaaagaggtgtaaaaataaggattggtatgtactacatccgtgttttgtagctgcatccaatgaattttaacaatccaataaatcatttcataaatatttcaggtattacctaaactctttttagctttttagttgaacgctctattattagtttttttttttaaaaaaaaattagcccaatgtactatctattttaattttagtttatttttgtaacgccctgtccaacagggacgccacgtgtgtgcactttatttaaaaaaaaaacaataattatataaaatgtaattatactaaaagtgtgggta

SEQ ID NO: 120903 - DNA, 1431 bp, Cannabis sativa
attttaaattttgtataatttatttctgttatcgttttgtcacacgtctatattctattttaataacagatattaaaaaaaaaatattaggaaatgaaaaacacaattttttcactaaccttatttcaccataacttacaagacaatagaaaacctcagagttaaacgactaacaattttaggataactcattaatgaaccaaactccataaaaaaaataatgattacgtgaacatgaaggatcggtcatcaaaggggaaatacattttttagttagattttaattattaaagttagttgaagattttgtttttacatgagaaacatcatcctattctcgaaaataaaaaaagtcaatgaaactggtaaatcgatttactgtaattaatcacaactttctataattaccgtgtaaagacataaactagtgtggaaccttttgattgatattttcgtgtttatcaattattattatttgttttattttaacttgggttggttatattaatatcaagaggattcgaagtaacctttggttgatatatatatatttttttttttgaagaaaggtaaaaattaagctatatttagttcagaaaatggttttattatatctttacatcaatttttattattttatcattgtgctaaaatacattatatataattattaattttaatataaaatttagtatatcattaaacttaaattttaaaaaaaattaatataataacaatataaattatttaatgtaaatgaatttgtctatccaaatttaataataaaatattaaaaatagcatgatagtaaatataaaacataacatttattgtaatataaattttactttatgctatattatgatataaatttggatcactttttgttatgtgacatatttgcatcgtaatttgacacattattagagtagatgttgaacaaaaaatgagctatattttgcatttgcatcacttatttgcatctttattggagatgttcttagatcattattattggtattagtgcagcacagtactttcactataaaaaaaatcttattttgttgtgattaatataaataaaataattgtgactaattataaattatcatttttatgttgtgatttaaagtttataactaaaacgtattagttaaaaaaaatgataatttgttgtgactaaatgtgtttttagtcacagcacttgttatgactaaaactaaattagtaaaatttatatctaaatattatattttagtcacaagtaacttttgttgtgagtaaaagttatattttattcttaaaatttatgttgtgaataaaaagttatagtattaatttgagcattactattaggcaccagtggtgcctagcacctttgcgacatgtcgcgttgcgattggctagcgatactccctaaaaactattata

SEQ ID NO: 120904 - DNA, 3332 bp, Cannabis sativa
  modified_base (3244)..(3258): a, c, t, g, unknown or other
ttttctatctaagtattcggctagcattgattataaacagtaaatggtaacttttcagtcggagggcgaagatccatttgtttatgttggatctattcaggggtctcgtatctgagtgatttcagttttaagggccggagatttactacacagtggatgtgtaggatttttagcagttgtgattgactccaggaaacctaaaaaatttgggcctgaggtagttagggttgtaaactaatttctcgacatatttccttaggagttgcaaggattaccacaacaacgagaaatatattttgtgattgatttggcacacggagcagaacctattttaaaagggccatatagaatggctccagcggaaatcaaggagctaaaaatacaacttagagggatgcttgatttaggatttacctgaccctgtgtatcgcccaggggagctccggttctatttctaaaaaagaaggatggttccctcagaatgtgtattgattaacgagaattaaacaagatgatgacgaagaacaagtattcgttgctcgggattgatgatttgtttgattaggttcaggggaagactgtattttcaaagattgatctacgatctagttatcattagctcagaattcaggaagaagatataccaacgactgcattctgaaccagatgtgggcactatgagtttttgttaatgtcatttggattgagaaatgctccaacagccgttatggatctcatgaacagattattcaaggatttcctcaataattgtgttatagtgtttatcgacgatatccttgtatattctcaaatagaagaggagcatgagcatcatctctaaatggtattacagcaactcaaggatcataagttgtatgcaaaattcaaaaagtgtgaattctagttatcagaggtgtcctttccaaggcacattcccaaaaaagacagaatcatggttgatctgggaaagtttgagtcagtgaaaaatttgccgaggccaagaactatgacagaattgcaaagttttctcgggttaaaagggtattatcgacatttttttcgaaggattctctaagatttctatgccattaaccgagttaactaagaagaaccaacgattcatatggtcaaacaagtgtgaggcaagttttcataagttgaaatagtgattgattacagcaccggttctagctttgccatcatatcaagaaaagtttattgtttattgtgatgcatccaaacagggtccggcatgtgttctgatgtaagctgacagagttatagcctatgcctcccatcaactgaaggattatgagcagctctatccaacgcatgatttagagctttcttcggtggtatttgctctaaaattatggcgacactacctctatggttataatgcgagatttacactaatcataagagcctcaagtacttcttcactcagaaagatttaaatatgaggcagagacagtggctggaattggttaaagattacgattgcgagattctgtatgaccatgggaaagccaatgttgtggtagatgctttaattagaagaggtcttgggcaggttttcagcaccgtgatttgggcccaagctttggctagtatgtcttccatagtcctgcaatgatattttgttaattctttataaaggtcagaatgtaccattaggcctttttggaaggctgcgattatcgtgtccacgttgcatgaggtcatggatactttctttgtgttgaacctagcaacataatctcgcagcgattcacccatcctttgtcgatcctgtaaatatcgtcagacaatttctctaatttcttgctactagcaaatttctccacaaatatgtcagttaattgagcaaatgaagaaatagaattgttaggtaggtttgtgtaccactggaaggctggccctaccagactagaaccaaaccccttacacatacaagcctctcataattcacgagggatggtgattgtgaacattctttatttgtaactcgctatgtgatcgttagggttcgttgttccatcatacatctttatcgattggaagaacttttttggcatatccacaagagctatagcatccactaatggggagttggcgaagctacttggtaagctccttttgataggtacggggacttctgggattctgtgaatcatagcctccatgccttcaagcttccttggaaccattttttaatcatctcctcaagtgttattgtgacggcttgacctgcagatggaacaataggagcattagatatcaaaacacttggagggattgggccggaggtcctgagttgtccttcttgagcacatggcatgggaatgcttctgtctggaaccgatgtgacctaggcatcggtcatagtttcgtcacctaccaaagggggtccatgtatttgagtagatacccctgttatcgatccatctactccagtagtcgttgtagttgatcgttggtgtatttttttctttgttggcattcttgtgaccgctggacgttggcctaagtttgtagtcaaagtggaatcaagggattgaatggatggaattggaacacaaaaccttgattgagactccgtcgtgttacgttgatcagactttagtatctccacctttgatttcagcagagcattttcttcttggaatgctttattctcctcttgtaccattctgaggctttcattggtttcccccatttgagacataagagtagctatctaggattgaacttcgatatctccttctaaattttccatggtattggatacgtgtcccttgctcctgattcagtttgtcaaggacccacagtgggtgctaaattgtaaagggaaaaatctacaatgatcggaatggaaggatcgcgggcactgacaacctgtagaataaaggaaaaaggactgttgagaccttgggacaccgggatagtaccgactgaagggactctgatgatcaagtcagaaaataattcgaataaagaataattgaaggtaaataaagaaaatagaaaataaatatttccaccgtagagtgatgtagaaggactggtaataataataatagtaacgtatttcgtgaattattaagtgagtattcagtgagtgcagatgagatgatcctttaggactcctgggttctccttttatagagcccctgacggtcaaattcatctattttgaagaacaaacgtggaaagtggtcttgttgggttttatgccttaaannnnnnnnnnnnnnntataataagatttacttattaatgtagatcagaaataacatttaatgttgcatggttcacacgatttatttcat

SEQ ID NO: 120905 - DNA, 1489 bp, Cannabis sativa
  modified_base (1295)..(1302): a, c, t, g, unknown or other
ctacccatcgtctaggtagaccctctcggagatgacaaatctaatattattcttttagaatgataaactctaggagtgattaagatggggtgtctcgtagtgtgggtcccattgccactgacttcctcctgaactagcacgtattttcggacaaattctaggcaacatgatacttactagttttaatggcaatctggatgaattcctcaccaagaatctatgataccaagggtctgatatgtagtgtgaccttattttctaaaaaatggtggaaaaaattcaaagaaaaaataagagagacaacgagggcattaaaaaaatagaggaaaattgaaagggccatcggagtgtttctctgaaagttgttaaaaatagtgaagtagaacaatgaagatggaagtaaatgagaaaataaaaaatgcccacttataatctgtctcgcaagcactgtttgatcattaatgatgatcaataaatggtgattaacacagatgtcagttgaaaagattgctttaattaaccacagaggttttctcaaaaataaaaacttactcattacgtataaaaggatgactcacttcccaagacagtgagtaaaaagtcatttcaaatcaaaagtactttttaaggggtaatttttatagtcataattcgaacaatagattatgggtctggctacatgatgcgtgtacaataaaaggaataaattaactcggttaattaaaagactaagagtcaatagcctccttgcaatatgaagctcgtacattttctactctacataagctgatactttcaacattaaatgcgagatgctcattacactcacaatatgcaactgaggaagctaagcttgtgaaggcattcatgaatattactggtgtcactactacaaagtcagaatacgcaacggtcctaaaaacactttttttgggggatcgtcgctaaaaaaattaagtaactgtttaaaagcattgggaaaaattagtattctcgactgtttataacagtaattacaggaatatgcgacgatttaaattagaattcgtaaaatttattgggcccttataggtgacgatttaaaaccgttgcctatagtataggcgacggttttaaattgtcgggtataagagcccaataaaaaatcgttacctacttctcgccacatttcccacgtgtccacctacctttttctatttctcacatgcccacctattttttctcacctatttattctctatttcccacaccctaaaacgaaaaatcttaactctccaaaaccccacccacacctnnnnnnnntcgccctcctctctcgccgtctttatccctctctcaatctccctttcttctcgtctctctagtccatcgatctccaaccacccctcctccagtcagtatccctctcctctccgtcgcatacatcggaccaccaccacctcccgtcagtgtccctctcatcttcatctcatacgtcggaccaccacca

SEQ ID NO: 120906 - DNA, 1393 bp, Cannabis sativa
atcaagcaggttctgtaattagactttcaattcctttaattttgtcggtgcgcttctatacagggccttagaatttggctcatctcctggcactaattcaatctcaaagtcagttgctctgtttaggggtagtcctggtaactcttccaaaaatacatctagaaatccacatactacatgaatgttctccagtctttgaggtgtatcttttgtggtatctaataaaccagttaggtatcccatacatccttctcgtaataatttcctggtcttaagtgtatattattagaatcttagatcccagaatctttcccataaaaacaaatggggtttcaccctctggttcaacaatcaccatcttcatcttacaatctataatagcatgtacttagtcaacaaatccattcccaaaattccattaaaatctcctaaatctaatccattcaaatccactgacaattcttctccttctactaacaccgggagagaacttcccacctgctatagatgaccacttccgcagtaggtaacaaggtaccaaatccactggacatgatatcacatggtctactaaattttcaatgattctactagaattatatgaatatgtggcacacgaataaataaaaatagtaaacataatacaactaatagatatctcaattttaacagttgaaggactggcctcggcatctgcttgggtcaaagcaaatatccttgcaggacccatagggctctttttcttggtcttaggattcaataactgtgggcagttatttcttaaatttcctaatactccacattaaaagaaggccttagactaacatttgcccaagtggcatttcttgcactttggaccttcggggtaagactaccaagcttcgtttctgcctcaatgaaaaccctagttaccttgaaaccttttgtttggacccataaccggttgcccatttggtttcttttttcgatcattagggttaaaacccttactcattctactactagacgatgttttccacacatccttcctatgattactcttttgacgaatcaagcttttagccccctcaacagtgagagctaaatccacaatttgaggattggtgtaacgccccgacccaaaaagacgacacgtgtatgcttttacaaattaatttataagtaatctattagtttaggaaaagtatggtttaattaaaactttttaattaaactaaattgtaacttttatataaaatacgaagatcccttcattataaattcttttacaactagtttcaaaactaacattacaatagaagagttacatttcaaaacatagtaaaatggttgatcctatcccatggaagtcgaaacaccgcggttgatatgtacatcaccgtgttggaaatat

SEQ ID NO: 120907 - DNA, 1365 bp, Cannabis sativa
ttacacttttattaatatttggtacttatccctctaaaaataaataatttagtctataccaactcaaatatgtgtgtgtaaatatttttgtccacacataaatttggcaactaatttctctcaattggcacaccattcgtggcaataatataggctttaacacatatcataccagcataaaataaataaaaagtggtccacccaaactaattcattaatgtttataaaatataagaaaaatattattataataatagactctttccctataataataataatatcaggaaaatattattcaatttttacatgtaatataaattattattttatattttaaaacaaattataaaattgttgagaaatatatatataaaaattaaattataatctaaaaattagttaaattaaattattacctttaactatataccttaataaatataatatgttttttttttgctttgatttttctagaaaaggccttaggtcatgcaacttccttttgaacgaggcgaatttgagattggtgggccttcttattgacaaggagtatacttgtgattataactttcccaagtattcttcttggcagtaggtgacagttctagaggaggataagacttggaatcacgtggctctagcacagtatcttcaaaacactgctgctcgggaagccggtgaaggagtgtcccgaggtaatcaatatggttggtctctcacagtacttagggctgaacgtaacacattaatcaccttccaagacaccccccttaatttttatatttgggattcccttctagtaaagcaaggtgctcataagtttgacagctggtaccctagattccacgtccagattaactgtcacgagtcatattattgtatagctgagaaatacgacactatggaagatagggcatgtcatatagacgcgagctaggatttagaaccaatcaagccttttgatatattcaagattacaggctaaaggaattttagtggctattatggtccttctaccccctcgtctagtgatagtttggcttctagtgacttcgctaaatcccttaggtggaaaattgtacttctccctgctcctctttcatttgcctttttattaattgtaacactttattttgtattgcagacttgggaggttttgaagatatcattgatcggaaaaggaacaaatgccgaggttggacctcccaaaaggcaaaggaaaaccactgtcgacaaaaacaagtcattgtccgagcctattaacctcaaggtctttgatatcgagacccaagaacaagttcctcctccagttgtttccaacaccaatgctcctcctcctgagacagctcatgcttctgcctc

SEQ ID NO: 120908 - DNA, 1712 bp, Cannabis sativa
agttcggagaaactcattgagaacgctattaaatattcattgacgttaaacttgattagtaacagtgaaagtctcccataggtagaacaccacttttgaaaaacaaatacattgaaagtggcctattggaataaatacaaacacctatctatcaaattgatctagaagaaaacaagcacctaatgctcagacaccaattaattaatccaagagaatcttgatgatgttgtggatgtgaaatgatgagttgactaaagaccccattaatgaacacacaaaagattgaagtaagtgtgaatggatctcatgtactgacttgactaataacaattaattgcccattaaaaaacaaaatgaatgttccactgaactttcctatatagctatagcttacattactgtatctatatatatactaagcgagttggccagagttaatatagccacttacttatatctctacttaataatattgaagttttgagtaatatatatatatattattaaagttatagaaattgagatgatgatgaagatttcatcggtagtgttggtggtgatggtggcattattggtggttacagcgccaatggtgaaagcagtgactacaaatcagtgcaaaaatgagaggactcagttggtgaacgagtgcaggccagtgatatttgggcaagacccctccaacaactgctgccaacgtgtgagggtcatccacgtggagtgcatctgcccctatctcactccaaagtttgctaatctcattaatcttgcacgaacagccaaacaaatccgaagttgtggaagaaacattcctcacaacttcaaatgtggcagtcagtatatatacacttattaattttcttatatctatttattctacgatctttattcgcttgtctttatttatatatttaattgatatattaatgctgtttatataatttttcctgttgcaggtgccacttttccatgatgatcaagaaaatgccccagatccaacctcttaagctttgctttcaaatttattatgtctgataccaatgatcatgttattgggttttgtacgtctgtactgtgttgtaataagaattggacaattgccttctcttaagtatatttataaattcaagtaaaatatgcataatattttacttcatttatctttttcactggtcttttattattaaattattaatattatagggcatggtatatatatgtatgttgcaagggggtctctccatgttatcattttattattcaaagatctacattaattgatttttgttttagattaaacatcatgaatttcattaataaggcatgaaagtcaaatacagaataaaacaagcaaatatcatcactattcacttaacgggcataaacatatatgttggtaagtggtaacccatgccaccatgaccttggctgaagagccaatttggccaaggggaaccattccatcacactcctgtgaatgatttccgcctataatcattgctattgatacattttaatactcaagctgactttttatttaattgaaattattaaactacacacttagagctatgttgaatgacagtctacttacaatcacctactatttataaattataaaacataaagaattcgtttgttacgctgtattatatcctattatattgtatagtattatattagattgtattttatgcaatatttttatgtaa

SEQ ID NO: 120909 - DNA, 2007 bp, Cannabis sativa
ccttccatatattttagttagctacattcaacaattgcccaggaaaaattagcaactctactcaaaactaggaatcactacaatacccacccagaagatatacagacaaatgaaagtcatttataaaaattacacagaaagtaataaaattaaaaacacttacctctctgctcactaatatttgctctggcacccaatgttttcaatctctgaacaacctcgtcagctatactctgcttcaaatgttgggggagttcactaatcatcacttcactggaaagctccttttcaagtttcttcaccttttgcccattacaacgtgttagtcaatagataaaactaaaaatagcaacaacgtctcaaagtacacatattccaaaaagctcaataaaatacagatctatccccaatcatttccccaaaatcctggacaaaagcttaccaatttaagaagctccaatggttcggctgctcttcgaatttgaattgattcttccatcatcctaatctgatccggggtgtaattaacaactaaaaataagaaggaaaaaaaaatccttaatcgaagatcattcatttacccgaaaagtaccaagtgggctatcgaaagaaaaaaaaaaaacattgacaaaatctgcctcaaaattcgttaaaggaaattcctttacagaaacacagaaatgggttcataattcggaagcgaaagaagaaaaagaagattggattagacaaacctggacgtgaatagggatcggaatagatatatagagaagcgtagagagaacgaagaacgaaaagagcaactacaatgttgatgaggcaaactattagagtggttctcttgtacgaacatccccattttcctctcccttgatatccccactctcccctcgccatctccccttttcctcaacctcatcccaccaccatatccctctttctctccctctctctctttctctctcagatcaaccaaatagatagatcaggcaaaccaccaatctgcaccagtttcagtcgacaaacacaaaacccaaaaagaagcaacttttgcgtttcaccagtcacttaaacacactctttctctctatatctctctccctatatacaaatacaaatacatataatattatatatatattaatgatgtttgcactgagcacgagctacttctataattagaattagcaaataggaattgttaacaccaagaacgacacaggatttgataataactagctatggcggtttgtttgggaggagtgagcaatgaagatcccctctgtttttctttttcttttctttctttttttctttttatgggtaaggaacagggtcgtgtggtggtgcactttatcttgcactctacgcttcgaactaacttgcgctacgggtggtgcaatgctccatgtcaccctaatctaatttcattaattacaaaagttactttttcataggtggtaataatctaaaaatacctataaaaaaaatgctacaaaaaaaaaaatatacctatgaaaaaatgaatccaaaatattaaatattgtgtttcaaaaaaaaatattaaatattatttttttaaaaaaatttaataaatattattgaaaacataaaaagctaaatttgtatttttaataaaatagtagttattgataaaagttatccatcaaaatatattgtatttttttttttattttattgcacacttttatattacatcatataataattttttttaaaatatactatcaaaatatttttaaaaaatttattatattttatcaattttaaatatatatattattaatatatatgtatatctccatataaaaataattattaaaacataaaaaaattaataaaatatatttagaataataaataattctataaatgtaacgtatttttagttatattcatctttataactattgaataatttcatttaataaaaatatttgaatctaaaatattgaatatacatgatttcaaattaatattaaataa

SEQ ID NO: 120910 - DNA, 1105 bp, Cannabis sativa
  modified_base (1069)..(1070): a, c, t, g, unknown or other
taacactacgtggcttggcacgtaacaatcacctagtatataaactaaatatctaaccctacatcaatttattttaaaagatatctctgaactaaaaatatcaaaaccattttgattattttcttattttatttattttaataattctaactaatgcttatttaaaggctctaatccaattctagtatatcgttatttttttcttattggcattttcttttctctcaagcctcatttgatatactgtactatgttagattgtattgtattattttgtattgtattagtattatttaacacaataatatgcttgatattgacttgtattaataaattctgtaaaattataatatatttttaataaactagaccccaacaccgacttcaagtcgggtttgggtctggatcaaagtttgggtcgggtctctgtcccaagcttgcatctacgtttgggtctaggtccgcattcaagtccgcagccaggttctagtctggtttgggtcccagatcgaagagattggagttgaccctagatcctttgtaaatattataatacaagataatactaaccctttgttatgtattaaataatacaacttacattgtattaaaaaattgtcgtaataattaatacaataaatcgttatatccaaacatagtgttatttattatttaatgcaatacaatcattatacgaattaccaaacaagccctcatatattttttttgtcttagcactaagccaaaacattgaacacacaaatatatatatgcatgaatatgtatgtaaaatatatattctaattttagtgtaattttttttctttttattctcataccatattttttaaggtaaataccattttggatcctgtgttttgcaaaaattaccaattggaccatcaattttgttaaatgataaaatagaccctgtattttctaaaatggtacaaataggaccctgaactgattttttatcaaaataaaatttaataataactgatctagaggtgttatgacataactgtttacattttctgtatctattcgtgttaggaattgtcttcannttggttatattaaaaaaaaaaaaagttgtcaaaaa

SEQ ID NO: 120911 - DNA, 1513 bp, Cannabis sativa
  modified_base (1102)..(1105): a, c, t, g, unknown or other
tttaatattcaaaatatttttagtattaagttgtaattctattatttttatgtgtaataaaaaaaagttgtattttgttgtcctaacaaaaaaaaaatatttttagtgtaaataaaaattttgaaattattatacatgcagcacgaagtgcggctttgttcactagttaaaaatataatgaagaacttatcagtaatatttatcgttgaaagcatgtaatcgttgctttgatattcatcactactgccactatttattccaactttgtaaacatgacatcgttgatagcttagatagaaaagtggttgttcttaattttaacactatcccatttgagggtctgatcatcatcaccaacctcctcgcctatctcatcatcatcgccacctttgcacaaactacgccgtaccgtaatatagttctctctctctatctctcttcccattgtcactatctctctcttgctggcactggaagttctctccggcgttaatggcgggccacagatgactaccacattagttcgaaagatagtcaccgtggacagatctaggctccctcacagtctctcttcgtttcacctttgcatgcagttcctcttcgtcgttaatggcgggtcgccgtctagaccggtggttcagatgtttctcatacactccataggcatagagatctctctgcgtgaaactcggcttgatcgatctccgtcatctccaattgtctccgactgcaagtatgttcatccggcaaacgctttcgactgggttagttggttagttgattattgatccaagcgagagcaggaaagaatggggtcaagagagcaaatcgcgattgcaattgattgatttttcataatcagatggagatagaaagaaagaaacaagaaatttgttttgatgatatgttgttttaacagaaaattgcattagtctcttctttgattatttgaatatcgtaatcaaatattaatggaatttgttttatttttattttattattttattatatataaataatatattttattattttattatatataaataaaaagtcactcataaatttcttataaactaaaaattcagttatataggcacannnnatatagaatagatatatatacattgatgggttgtttatagttaaaattatcatgatggaaagtcttacatttttcattattaatacatatattgatagttgtataataataaaataacacatgtattaataaaataatattcaaatttaaagttattgctctttgtcaaagaaaaatatgtataataattagatgaaaaattttgcactagaaaaaatctgaataatctcgattaccgttgatctcatctaaatttgatctcaacctaagggcgagttcgtctggtcggtgggagacaactacttgatagagaaacttgttggatgcttatattgaatgatggtatatgctttatgagtatatatgtaatgaccgctctagtaatgtggattagtaaaggcaattagc

SEQ ID NO: 120912 - DNA, 575 bp, Cannabis sativa
  modified_base (530)..(550): a, c, t, g, unknown or other
acaatacttgttgtgactaaaactaaatcagtgagaacttgtagctaaatactatattttagtcgcaagtaattttttgttgtgactaaaactaacattaagtcacaaaaattatattgtgactaaaagttaccactaaaaagtaactgttttttgtagtgtttgtagcttctgccacttctaatttggtttctttagataagcatacttttctcgtttggcttgcttcagttatggaaatcatctggttacggaggaatagaattgggcatggtgtttttgaatctgttaatttgatcaatactctcttacttgaagttaaaaaaagatttctggaaaacaaaccttcttttgctcttaaagggatctccccttgtggatcccagttacctttttttggcttaatttgaactgaggttcattttcaaaaaataaaatattggtttggtaacaagtcgaagtaactttgctatcaaactccaaagggtacgtaatgaacaactttaaactcactacaagaaatgtcactnnnnnnnnnnnnnnnnnnnnntgcgctggtaaaagtaacttttacc

SEQ ID NO: 120913 - DNA, 755 bp, Cannabis sativa
cacaccacacacacacactctacctccagtcgaacctcccattgccggagctagtcttgttcagccgccttacactacggaaatttgaaactaaagctccaagaaagaaactcctttaaaaaataatgggtatgttatttttttagtaattattgtttgatttagttgtattttatgttgatatgaatagatctacacatatctttgtttttatgcaccatttttgtgaatgaaacacgaaatgcagtgattctacgtttttttagtttttttgcgattttagcaatattttacgatgtcataagcgacatttagcgataaaagagtgggtgtgaggttagggatgaagttttgcaattttgtagtgatgcgtcgcgatgtatgtcgcaacatactgcagttttgtgtcatgttgacgattttttcaattttgtcgatattatttgtgatgtttgtcgatatatttagacgtagtgtctcggccagtcccaaatgaaatttatcgacattttatttctcgacattatgtgacattttgcgatgctgtttgcgatattttgcgacatattatttatcttaattaatttttttttatcatttttgtttgcagattcaacagtgtttgtggctgtacggtatatgatggggcttggacagttgaaggtttcaactggatattcaataacccaaaaagtaagatgttaatgtttgaggttgacactactttacaaaagatgcatgaaattttgtatgaa

SEQ ID NO: 120914 - DNA, 840 bp, Cannabis sativa
  modified_base (731)..(755): a, c, t, g, unknown or other
tttttaaaaactttttatcccactcgcatatatcccggttttcattttagcgaaaaccgggataaaaggccttaaaaaccgggattaaaagcctttgtttgtagtagtgtgccaaattaagtctcaaggacccgactaccacactcttgtcatatctatagacaagacaaatttagcaagtgtgtgagctaaagagttaacagaatgattacaaaaaaaaaattaaaaacattaacacgattaaaaatagtataaatatttttaaaaatcaagccaaactcagccaagaacaaatatcttttctacaagtcataaataacatgttgacaatttgattcgactctacattgttgaagtcaagacgcaaatagagaagtatgctattgcaatttttttgttaatttcactaattttaatatttgtcacaatattactatttttttatatattttaaaaatagtaaattacatttctattttgtacacttttactttgtttatagtatacacataaatatattttaaattgtatcataaaaaataaaaaaaaaattataaaaattaagcaacaccgcgcgaatcgcaacttaattccctagtaatctataaaagaaaaactttaataaataataatactaaaacatgatggattggacttttatagttttgagaaaagtgatactttatagtttaagagaaaagtaggggaaattagtgcatgtttggcatcannnnnnnnnnnnnnnnnnnnnnnnntaaaaacagaaaattgttttttgtcaaaaaataatttggcttgtttggccttgttttttgaaaacagttttcagaaaacaaagtt

SEQ ID NO: 120915 - DNA, 1548 bp, Cannabis sativa
tatatatatatatatcttgtttttgataatgttttcttttccatcttaggagtggagtcaatgcaagcaaaccaagttttgaagatatgatggagcgggggccaaggcaaggcaccgaccagtaccacaattgggtcagggcgtgccatagaagaagacacaaacagagtattaataactacatttataccctcttcactcactcctcaccttttttctaatttctttcattcttctattctatacacctttcttcactttttatatatacttatatactttcagaacgtgtgtgccaccttcatctttctttcttttttttttttttcaaaaaaagaaaagttacacctaagaatcagtaatgactccgtgtgttctctaacaagaactaaataaactgctaacttttatcaaaagaatatataaataaatttaaaaatagggtttgctttttgccattggttttgcaaagtaggcttctttttaagctatatatgctagttggccaactctaatttgtccccaactagttaataaaaacctaggaccaccaacaacaaccaccaccaccaccagtccaccaatcccttctgtctatttttggtgttttggtatgaattaatatgaagttaattataagacataacattcatgcatttaagatgttgacatatcttttattttctatttagatcaagtttggatgacattgatgataaaatttaatcacatataacattttatagtagtgcacttagaattcaatcattatataagttagtttctcaaagggttaattggaggaatccaggtcatatcatatatactaattaattagagattaatcattataataaaatatatatattaattcatatcctatatattattactagagattatgcaattctgatcattaaaccttttgagtacaccaaaatgtacaataattaaagaaacactagagacaatatatagagaatattgagaatctatttaattacaccgccccatccatgcatcaatgattaccaacattataatgtgtacttattttttttcttattttacaaaactttttatatatccttgtattacggtatagctagccaaaagaattaaaagtataaaagtctttgtattttctttgaacaattatataagtctttgtttgtgtgctactatattctctaaaaactttaaacagtctgatccattgctactatattgaaattgaactcttcatctctagctcaaattattcattcattcattaattatattttatcacataaatgcatatacatattatatgtcttaaacttggtaatccaataatatcatagcaataagacttagtggtgttgttacgtaaccttatcaacatatatataccataacaacttttttaaactctctgcacacaaaaaaaaaatgcaaataacattttaggtataatataatttttttttgagtaaatataatttttagtcacaataaaaaattatttgcgattaaaatattgtatttaaatacaagttgttacta

SEQ ID NO: 120916 - DNA, 2040 bp, Cannabis sativa
  modified_base (1963)..(1963): a, c, t, g, unknown or other
tggttctttgacaacctccagccacttcgacggttctccgacaacccccaaccacctcgacgacgcttctctctcccttggtgctctcgtaagtcctctcctctcctcatttctctttatcaaaattgttgttttatttttccagatctaggtgttttgtgatttggaaaaatacatattttggtttaagaaactatattttggtgttttgtaatctgtattattctttctgttttaggtgagctttgattggttttatgtggtggtggtagttttggtgaggtgttggtggttttctggtggagagagagagagttgactataaatgaaaaaactaaaaagaaaaaagaaacagacgaaagaaaagaaaaaaaaaaagaaagaaaaaaaaattatttttttatttataattttttaaaattttaaattaattttatttttatttttttaaataattttttacgtggacaaataaaattgtgccacgtgtatactgtgtccagtccaacatgacacttaacacctaaaatgaactgaaatattaaattgctaacagaataggagtattggaggttttactgcccaaatttgagttttagagattaagtgaaactaaaataaaagtttaaaaaattttgccgtcatttacccattatataattgatctaatggtattaatcattatatatcaaactaagcatacagtacattaactaaaaaaaattcaacattaattttattagattatctcaaattgtgtaaattttgtactaaatttggttacaatggatcaatctatatttagcccaaattttataattatgttccaatacactaagaattaaataaacttcatttaaattaatagaaagtgataaaaaatcaagaaaaacaaaaacatttttttttttttttgaagaaaaagaattccattaaaaaggcacaaagccaaaaattaaatagagcaatacaagaaattaaaaattggtatccaggaagaagacctggccactaaatttgataaacatctaaagatagagcatacaagcaagagaatgtgccatactattactattatatgaacacttaaaatgagaaagagtaataatagaaaaagaggaccagatatggttaatatctttgacagtagaaccaaattcagtagaacaaatttcaatactcaaaatagcttgcactaaacaaagacaaccaaagaaaactataagacttgtgtaacccaaatgaagacagagcagtaggccttgcaacatggccgccgcctccgccacatgaggaacataagcagcaaacatcggcgatgcacctgagcagaggaacactctcaactggttcgacaccacggccccaaggccatgttctacccttctgcatgaattccaacatccacaaataagttaatatccccgaacactatctcatgagtcccatggttagtagacggaccaattaccctaggaacactctggaccaccgacatagaaaacaaaccctgagcgtcttgataccgccaaagaaaattcaaagaccattagttgaccatcgtatctgagagtaatttatgatcataaacaaatgtattctacctatgccaaatcctccaccaaagaacaacaaacatttcatttttattgaaagtatataaaaacatttaatttacaatttagaaaagagtatttaaacattccatttcactcacagcaatacaaaataaaaaaattatttcacacttgtataaaataaaaaaattacttgtacaacaaacaatttgaatcctgttttttgtgttaatttttttttttttgaatttctcaaattttacaaaataatttaaataattacaacttattggaccatgaaaaaattgaactaaaaaattcgtcaaaatgccaaaacaagtccatagaattttcctataattacataaggcactattttttgtaanaaaaaattacatttttacgtttgaagaattttttttacatttttacggtttttcataaaagtaacacaaaaataaca

SEQ ID NO: 120917 - DNA, 694 bp, Cannabis sativa
aaaaaaaaaaaatatatagttctctcaataattgtcactatatatataaaagaaattctatttaaatattaagtgaaaagaaatagatcaactagtcaaacataatttctaatttcaaacttaattcacttcttttttttagttaaatcacatgatcatttattttttagattaacttaaaacacactatgataattgtcaacacagaagaactttcagctgttatccgtattttcggacgaaagatatgtggcctgaaaagagaagtacaactttaaatagtcactagacaagtccccctgtttggactaagtcacagagaagctttgctgatccaggaacagatcaagaccaaaggacatacgaagatttatcctgtcttattatgccatccaggatacggaaggcttactatccctttgggattcggaaatgattaggttcaaagtgtgcacaaacgatacctggaaggttactcgaaggggctatcatgaatgttgactgcccaaaaaagacacggatgtctaccttcatgaagaacccagatcacccaatgacagttatgctttttctgacacaagatcagatctttttccctatgtcagaccatagtagtgtgtacaccccatacacctttttgtcagatggttatttcaggcatttactttgcaaggtgaaatcttttggtgacacg

SEQ ID NO: 120918 - DNA, 1657 bp, Cannabis sativa
cacatttaatccatatgggacaatattctccaataattacaaactatagatgcactttttttttttttttgtcgtagatcattttgcataataataataaaaattaatttgtaataactctctaggacaacaaaaaaaaaaatttgtgatcaatcatcaaaaaaggaaatattaagaagtgttccataaatatattattacaaggaatagtgctacattctcctttccaagtaagattgtcatcaaacttatatatatattatttttcttcacaaataagataaataatgtttattattagcttacaaagtgactgattaaaaattgttcgtttttgtatcccaaaatcctctcccttgatggaataagattcaattaaatcatgatgttgaatctgccaaccccaattaaatgtaacacctttcttatccttaaaactatagccaagccaaccataatttttttaaaggtaaagggaaatttatattaacaggtaaatctatattatttaaaaaatattatttgttgagcagaaataacaaaaaaattattcattaattgccttgtgtgccaactaaatgtagaaaattattcacatttgttttttgagtaagagttttcaattaaggtacttgaaaaggtacaacactgattggagcaaatggattgatgagaaaaaggcgaagaacacttttgataaagccttattatgctgggattgtgtattgtatttggtttagggtaaatggcggcaaaatttcccaaaatttttattttagtttcacttaacccctaaaacctaaatttgagcagtaaaactcctaatactcgcgttcggttagcaatttaacattttcgtccattttaagtgttaagtgctgtgttggactattcatgtgtgcatctacgtggatacagtgtacacatggcacaattctattggtccatgtaaaaattatttaaaaaattaaaaaattaaattaaaattaatttgaaataaaaaaaattgtaaataaaaaaatattttttcttttttttttttcgtttctaattttttatttacagttctctctctctcccccctaaatctctctctctctcccccagaaaccaccatcacctaaccaaaaccaccagcatctcaccaaaaccaccaccacagaatcccaatcaaagctcacctgaaacaaaaaaaaaaaatgcaaatcacaaaatacaaccccattttgccgtccctgaacttgcaaccccccaaaaggaccagaaccccattttcctcaacattgatttcagagaaagaagctaaatttctcaaaaccccaactgcagaagcttggaatcaggtgttcccccttgacaaatcttcaatagagatgattggatgaaatcccagctctcgaaatcacagccacggtcttctctttcatttcaaccgagctcgaatccattaacctaaccaaaacagaaccacaccttgagcaacgatgatcatcacgtccttatcgtcttcctagagaaggctcaaaagcgagtccatccccgtgtttctcgacttgctgctcctgatctgtaacagagtggctgccaagggttttgaaaaccctaaatcgggactaaaggggggagagagagagagagagatcgagagagagagaga

SEQ ID NO: 120919 - DNA, 856 bp, Cannabis sativa
aaattgggacttgattttttttataacaaattagaggatattcttgaattaagtattcttaaatagaggttctactgtaatatgcaatagaaatgaatacataaaaaaaattacattaaaagattcttcgaaatattaatctgaattaattaaaatgataagatatcatatctgaagattcttcgaaatactagtatgatcaatcaatcatattaattgatgatgaaagaaagaaagttaattattctttagttccaaaatatggttaaaatcattagttaagtttaggtttaaaaatggttaagaaaataaaaattatttgaagaaatactatttttcaaactatataaggttcataaataaattccaagcacatggctttagcatctataatatattttccacaagagaatttcaaaatattcgccgaccatatacaaaattgtctataaatatatatatattaagaaaaatttaattaaatgcactcaaaatcaaaaaccatacttgtacgatttatcactatcataatcataggtcaatttagattttttttaatatttatttatatgaaaatttatataggataaatattattttaaatattgtattttataaaaattgttaatttgactatctattttgttaaacaataaaatgaaccttaaattttttaaaatagtacaaatatgattttgaactgattttttttattaaaataaaactcaataataacatgatcttgaagtgttatgacaaaattgacgacattttttgcatttattcgtgttaggtattatcttaaagctagttatattaaaaaaaaatgttgaaaaattgagttcagagtcttatt

SEQ ID NO: 120920 - DNA, 2291 bp, Cannabis sativa
  modified_base (1734)..(1740): a, c, t, g, unknown or other
agggcataaagcccaacacctatctccatggctctaggcaaactgatctgggtttgccatcaaaaagcttattagctgctattggagctgctcgtccaggttcttcccaatgtatacacactttgtgggatttccttggtcgagaataacctcttccaatccctcgattggtttcaataggttactcccatcttgaactcgggggtcaagatctttgtctttcttcccattttcttctgccaagattgccatcaaataatcaaaattcggctgtacatcagaaattgacacgtgtcaatctcgtggaatgtgaaccaacagatattattaaatatggaattaatagagtatattcataagtcgctgactgtacagtcgtaggagagactaggatacactaactatcaattcatgtattgaagaaaaaacatcttgctttggaaagcataatctcaagggagccacagataatgcatagcgagacatccacatcactacatataaggaagtatcaatgaggcgaattggatatgggaacagttaacgtataattcacgttataatgactaagtgcaatagcttgaaaacatagaggacatgattgtctagtattgaaggccttatggtgaaagagtagcttttagtttgctcagtacactggtggtcatgccattactggaataaatatcaactatgtcattcatctatgaacaaagcgagatgcctataatgaggtgcttgtatccacgtccttgtcccctacttcaaagataagaataacaaacaattatgaaatttttagctatacacgtgttaacatgggacgtggttaaagcccacattttcgtgaaaatagttatgtatttcatatgcaaatgtaaattattgccaacctatattcctataaataggggcagattatacagaaaaagggacgaaaaatcttggagagaaaaaagatcactgattgtaaaacaataattctgtatccagaaatatcttaataagatagactcgtggaatatgtagagttaactgcaaaaccacataaaaaaacttgtgtcattattattctcaaattgcttatagtttcgctgtctaatttattacgataaagacttattaattagttgacaaaaatttgcgttaacattattttctctaaaataatatattttgcttctcttcttatctctttaatattatttaataatcatattttatttaagtaattaatattgttttatctaataaaactaaatagttaaatattattagttattcaattcataattgccataattaattaaaacaatgattttataaattactattttgctcttaagagtttatttcctatggaaattaattcgtacccaaaattcattcatcaaataaactttcgcctgtacagtaatgtataaagttgtcttgagggctatggacctatatttcaaagctctaataaactaaagattacaatcaatctcatcaacaaaataatctagtttatcaactcaattgttaccctaatataaatatggcattaaactctttgaatatatagaattacatttatagaattcttacttgtagtcattgattaatcaatataagtagtcttccctccaattattagtttataattagagttggtcaaaatacaacttaatacttctaatatcttttgatttcttatttattattaattcaatgtgaacagttaatctatannnnnnnatagatttggatccaactgttagcactcccagaattaacactttaagggaactaatatttgatccattaggaagcttagatttcacaattgtataacatgttcccaagcaatcatgttattaagcaaccaaaatagaagttgtaagaatcatcttctctaagaaactttcacgagtgaatcaaaaaactctatgaacacaaaaaggagttcatgtatactcaagattctagtagatctactaatgatcattatagttatatgataaacacttttcatggtaaacgacaagtaatgaaagatatttattatatatcgatctactcatggataatctaattatacaaaatatatttactacatgtttatctacatatgtgatccgaatcaaaatcacacacactataagtgttaccccaattttcgcactctgacgtggcatcgcatgaatggcgaaacgtggaatccactcgaagcatctgctcgggaagcatagtccgagcagaatgcctcgctggcatgcccagagcaaggcaatcaacaatccgcgcag

SEQ ID NO: 120921 - DNA, 776 bp, Cannabis sativa
aaaaaaaaaaaaaattattttttgttatttttatatttttactctcatatttttttcacatttgtactttattattaagtttttaaaaatattgtgttaaaattttaaaattataaaaaaaaaattaattattgaacataacaatatgaaaacaactataaaataacaaaaagataactacaaattaaacaacaaaaaaataacaagacactgacctcgttaaaatatgcaaacaatattaactcatcagcttatttttatattacgaattttttttactaattagttttgacaacttaatttatctttttgtattactacattattttttttttatgaaatttgttgttataacttcataattttaactttttctttttctctttcttttggagttagtgacagttgaatagacaatttattttctacactactacaaatttgggcttcaaaagcgggttttaataaggcctttcagtgtcgattttggagaaacttgctaccgatcctgatccagccgacgctatagggtcgaacacaattgacaccaaaatgtaccctatggagctggttatttgataataaccaatgttatagggtacattatggcgtcgattatatactaataactgacgctatatgcactaataattgacgtcaaaggattaaaaattgacgctaaattcttaataatttattttatttttccagtttaaaacctattataaattcaaatatttaatttatttaaattatatatttattaatttataata

SEQ ID NO: 120922 - DNA, 3202 bp, Cannabis sativa
  modified_base (2795)..(2802): a, c, t, g, unknown or other
  modified_base (2955)..(2969): a, c, t, g, unknown or other
gagctttgtctttgtatttataaatgtggttatttgtaagctttgtcttatgatctttccatttatctccagcagtttttaggactaagtgcttatcctctggtttcaacttaaacatagaccgtaataattatgaatgataattagaattacatcaaatattaaatttcatatcctatatagaatcagtttcataatattaccataatgtaagtctataagtcatctttattttctcctggcattaaatgccaatttttgtacgccaatggaaaatttcttcttgcatagaggccaatatcgctaacaatttgagtcccattcttaccatataattagctcaattggttgaactcgacttccttttttttttgttggtccaatcctttatatgtttcttgcctttatatgctccccttcctttttttctttggttgaggttttggttatggttctacttcaacttcaactagatcatgttcaggttgtggttctccgccaatggattgaccccaaagggaaaaaacgtcatcataatcatcgtcatccataatcaacgaacctacaaataaaaacaaaacaaatcaaatattgtagtaccacaaaattttttgactgatttaaaaaaatacaaattaatagacaaacaaactaatatttgtggattgataattcaatcaatccataatccttcgctgtcttcacgggatgatatgatttcatccacgatggtgtcaaccataggtggtggattgattttaaatgtttgattatcaagtgttagatcttcactagactctttgcaattataatcttttggttgtgttgttaggacaactgaccaacgagcatctagtggatcactcatataacacacttgaatggcttgagatgccattataaatcgatctgacttgtgtcctattcaattcaagtcaactaacttgaatccaaactcatcgtctttgactccattatcactcctcacccaatcacaaagaaaaattaggattcttaaactaatgtaatctaactctcaaatttctttgattacaccgtaaaaggtcatatcacattcaataggattttcatcttttgaacaagctatttggtatgtcctagcaacaatcattacacagctattttttgtttttctagcatcatcaagatcattgctgttgaattgagtactatatatgtagtatgattgatactttagtacactgaataaatgaaaacgtgatatcaaaagtagtgagtgagatacattatttaaggactccctcgtttcagaaatcacgtaacataaatgaagtttattaacaataaagtaaatttttaaagaaaatatagccactctgcaaaatagcataattatattaccttttcctttaaccatgtataaaaatttcgataatgttcatcttgcacccatttctagtttctcaacttactagcataagtggtcttgatccaatcaaaatgtttccttcaagatatatttttaaatcattacaatttcattttgaaattttttatttcaatcaaatattaaaatctaagctatacttactcaatgtacggttgaacctcgtcaatattttccaaaacgagtcgatgtgtttcatctcgatcatctcgacttacgtcgcaaacagaaacacccctaccccctttacttatttcattatcaactcgaggacagcacaacccaatgcttacaacatttgacaagtagtctgaacaaaattctactgccctttcaataatgtaagattcaataattgaaccctcgggcctacttctatttcttacataaccttttaggatttttatgtgctgttcaaatggataaattcatcttaaatatacaggtccacacaatcttacctctctcaccagatgaacagtcaagtgaataattatatcaaaaaaggacggggcaaaaattgttccaagtaggacggggcaaaaattgttccaagtaacacaagacttcaatgatttctaaatggagattttccaactttgacacatctaccactttgcaacaaagagatttgaagaataaacataacctagttatagcatatcgaactttcttaggtaaagcagaacgaatactcacgggcataatatgttgaatcaatatatgatgatcatgagacttcaacccgctttaaattaatatgtcggtatataccaaactcgagatatttgaggaatacccttcaggtactttcacctgagacaaagaactacacaaagagcgtttttcttccttaattagggcataacacgccggtggtaaaaaagttcattcaccaacaacctttgggtgtaaatttgctctaatccctaacttttttaaatctagacgggatttaattccatccttactccgaccaggaatactaaacactgtattagtcaggctatcagagacatttttctcaatatgcatcacatctaagttctgacgcaaaaccaaatgcttggcacaagaatgaaatgtgagaaaacaaaaacaatacacgacaacaagaatgggaatgtaaagatcaaagtttacccccactacttgctggttggcagcatgggcaagggtgaagcgtcggtactgctacaagttgcccatgtctctaggggaaacttggaagcattactagccccttgatcaacgagttcagcagcaaagggtgcaacctgttagaattattttaccaggatttagatttactaccatgtatgttatttaacgtcctaatatgaatttctaaaacaataaaaataannnnnnnnaaagtttcagaaaaccttacattgagtgcagcggaattaaatgactccttccgctcagatctctaacccttgcatcctttctgtagcagagtatcaccaagatctgagcccgatgatctccttctcttgaattggattcttcacagtcttacnnnnnnnnnnnnnnnaccacttgatgtgtgtgggcacatactctatcactatagggttcaaaatattgaagagagaaagagagaggaaggattcaaaaatagagagaagagatggctcaaaaatttctgaaggcaagtgaattcgtcatctttcaatttgagggcatcactatctatttataggaatccaactaggtttaggtttgaattatttggcattaaaaaattgataaaataaatggtaaaat

SEQ ID NO: 120923 - DNA, 2084 bp, Cannabis sativa
ttttctatcaaatcggcatgtcgattagttaaaggcaatacagagactactacgctttcttcaacatggaaaacaatctggaattccaaggtgcatcaacgtttgaagttcctatggtggcaacttgttcgagattcttttccaacaaggggtaagctgtcaacctttatgaatctcccttctaatttttgccctctatgtgaccaacaaatagagactactatacatttattctggaagtgtaatttagccaaagcaatctggtttaatacccgatggggaattcggactgaatgtgttatggtggataattggaacgattgggaactctggtttctcatggatggaaatcgaccacatgacgtatcctttgaggaattcatgacaacaactctctgtattctggaaacgatttggaaggaaagaaataaaaagatacatggagcttctacaacaccattagttcaacttaatgaggagatccacagaaaagtggtggatcacgagatggtgaccacaaattgtatgagggagctgactgcttggaagccgcccccagttggatgggtctgcagcaactcggatgtagcagtctctaacgacagttccttcttggcagcagtgatccggaatgataagggggaagtgtgtgccattaaaactggtacaaacacggttacaaacccggagattggtgaagccttggccctttccatggcggttgaacttgtgaactcattgggttataaccaggcattatttcattgtgataatttgattgtcaccaatgtgatgcaacctcgggcagcagcaacttctcacttcaaactggagacagcaaaggatcgattcatcaattgttgtagtaaccttaggagctgggatctcatccacactccaagagcctgcaattttattgcccataacgttgcaaaatgggctcgattctcaaacactgttgggagtattaatccactaactttggagacaaatattctggatgattatgtggagtggagccatgataacggatgatgttaggcgggttctctgagtttgtttttattgctgctttatttttcgtttagtccttgctttgtttctttcgtttttttgttcttgttgtttggtttgtttagactcttatgtacgtgttgtttgttcaatgaattgggtgctggggcaccctaccttttatcaaaaaaaaaaaaaaaagattataaaaaactaaaagttaaattttaattgaaaatattaaaaacatactgaatttaagttttattagatacagttctatttatttcattattatttattgataactatatataaagggtgagtagttagctcattgtttttatttatatatataaatacaggataaatttactgtaggacttagtgtctttacttcataataaagggaaataaattaattcaatcaaagttaaaagaaatagattgtatagaacttttgctttttgcatgtgtagaagattattatattaattatactatataaaatattattgtattattattttttattttctgtaaaagttataaatatattaacagttggattttaggtttttggttttaacactaatatattgcatatatgtaattttaatttttttaatgaaaaatataatataatagtactttaagcaggaaaaaaacaatgaattagtttttttcttataaaattactttttaaaaattatttaagttccttaatttaatttgagtcataattatcaatttttttatcacataaaacaaagttttcataaactcaaaattaactcttgggggcacatgactccactcaactttttaaaatttattttttgtatatatttgtatttttacccatataaatttaatatttattttaattttaccatcacatatgataattttgcccatataaatttgtatttttttttatttttatcttcacatattttcatatttattctcataatctactctaatctttgtaaaatttatatttttttataataaaaataatattttttataaatattttgtccccctaatatttgtggcgggctccg

SEQ ID NO: 120924 - DNA, 1792 bp, Cannabis sativa
ataccaccctcaccatccagcatctctcacaccccaacagccgcacactcaaataccacaaaccagcagccacaccagcaaccgcaatcaccccaacaacagccacctcgtcagtctcatccaatggttacacgctcaaaggctggtattttcaaacctcgcactttccttacctcacttttgcaaaatccccacataccagccctctccctcaccacaccaacctcagctgaaattgcattaactattcctgcttggaaacatgccatggatgatgaatactatgcccttaaaaagaataagacttggtaccttgtccctcgtttgcctcatatgcatgttgttgataacaagtggatctttcgccataaattcaactccgatggttctcatcaacgttgtaaagcgcgtcttgtggccaagggatttcaacaacaacccagtttggacttctttgatacatttagtctggttgttaagccttccaccattcgagttatcctttctcttgctgtcaccaatgattaggatgtccaacaaatcgacatcaacaatgcattcctcaatggcaccttggaagaagaagtttatatgtcttaaccaactggttatgttgatcccaacttccctacagccgtgtgcaagctcaatcgtgccatctatggcctcaaacaagccccccgggcatggttcgacacacttcgacaagctcttttacgtcttggcttgagaaactcagtctcagatacctcacttttcttccttgctgaaggtgatgctcgactctatgtacttgtttacgttgatgacattttgctttactggtaacagctccactcgtgtacttcacataatttcccaattgaaccaacaattctcactcaagacactcggatcagtcacatatttccttggttttgagacaagtagggggcaagatggtcttcacttatctcaaaccaagtattcacttgatctacttcaaagaacacacatgctggaagctaaaccaagcccaacacccatgattcaaagtaacaaactccacctacaagacagtccacctttcgaagatattactcaatataggagtgtgattggagcattgcaatatctcacattaagcagacccgatattgccttttcggtcaacaagctaagccaatttctccaagccccaactcaaaaccattggcttgcttgcaagagaatactaaggtacattgcagggagcattggtgaaggcattcaatttaccaaagcaactaatcctatcattgaaagcttctgcgactcggattgggccagctctattgatgaccggaagtccacatctggtatatgtgtctattttggtggaaatttaatcaaatggagttcaaggaaacaaaaatagtcgctcgatcaagcaccgaagccgagtacagatcattggcacaagcttgcaccaaagtcacttggttgcaatcgctcttcactgaaattggaatagagcacaaccacacagccgtgatctggtgtgataattcaggggctcgtcaactcgcttccaatcccgtcttccactcaagaactaaacatatcgaaattgatgttcacttcatacgagacaaagtgatgaacaaatctgttgaagttcgatacataccaaccgaggaacaaattgacgatatattgacaaagtcgctgcctataacaacctttcattatctcaaagacaagcttactgtgtgtcattcaacacagcacagcttgagggggcatgttgaaataaaaggcccaaaggcagccc

SEQ ID NO: 120925 - DNA, 948 bp, Cannabis sativa
aaccaattatcacaaaaagcaaacatgaaatcgtcccccaaatcattttcaacttcacaaataatcccaataaaaaaataaagaaaagaaaagagactctattcaaagtgaataaaggtattttaatcttacctatagtttttcttttttgaaagaaggttagaagcattatttattatttatttttcaatcgaatatctttacatttttatttgtacttagaaaaaagaaaaataaaatatttcgtactataatagcaagacacaaatggagcccaattttcctgtattatttcattattttttttttcttttctaaaaaaaaaagtaaaaagaaaaaggaaaaaccatttattgaccaaattccctttattattttatttcttaatgctcacaaattaaaacttattgattggaaaattttatgacacgtcactaaaattggatgtacctatttgttttgtgtttttgacatttaaatgttttaatattaatttttttatatatatatatacaaattttttaaaaatttagaataactttacgtattaaaataaagttcaaacaatatgttgtatgtagcgttggacatccgattcaattcaataattttctactcatttgatccaatccaattagtaattggatttgaaaaaattatcatccgatctaatctaattagacctcaaaatctaatctaatctaatctgatccaattgctaatctaattaaattggatcaattttttaattggatattcaattacacgccaaatttataatattaacttaaaaatatgaaaaaaaaatatataaaaattaaatatcacaatttatttaagttcaatactccataaaaatatcatctttacaagtgtaatgtaaccaaaagaaaaataactaaaacaacaacattaccaattaataaaatagaataaaatatcatgaaa

SEQ ID NO: 120926 - DNA, 1334 bp, Cannabis sativa
attaagcatcacggtatcagtgaaaactacataaaagtaacaaaaaataacatcaaaacaacataaaaataatataaaaaaaaaaacaaaaaatccatacaaaatactaagagttcaacataaaatatatcaaaagaccgtattttatgtaaataaaatataaaacaccgtaaaaatattaataatttagtacagactgcattcttgaatttcttttgtgtttttttgaattatcccaaataactttgtgatgtatttctatcaatttatagcatttttttttggtaaatcagtgtaattccttacttcaacaatttatagcattgctaccagtgcataattgcaaaattatatgaagcaaaatttaatgttttatattaaaaatataaatatattattttctcaatttttttattatataaaacaataaaaaaatataaatacaattttatgttatagctaaatatactaatataataataattaaaatggcataaaaattagtttatttatagtattgtaaattttgcatcatagcaaatgtttttgcataatatttgctacgtgccaaattttcatcactttttgactcattcttacaacatattttatcataagtgatctatattgtagctttgtatctccatcaaaaatactctttacaatattatatctattagagttaaattttatgaagataaactaaaacaatacatatatacaccacttttagcactccattacacacatatatatatactagtatcattataactgaattggatcgcaatgatatataagacccactatgatcaacaactaagttgagatgatcttatccagtgctctctttttaaattactaagggtgcatactgtaacattttttaattaattttttattttattatttagaaaatactactacaaaaatctcatttagcgtcggttttgaagtgacacataaagattaaagattttcctcggttggttaaactgacactatagccttagacgcaaatattgatatttttgcttcactcattaactgacgccaaaattttttgcttcaattcataacggaagcaaatagtaatgaactgacgccaaaagatttttgctctgccaccacactccatcaaacaaatactgctaccacaccccatcggactaccacaacaacccatagaatcaacaaaagcatcacattgaaccaccaccatcccatcgtacaacaccacatgtttataccgcttgcaaagaaaaatcgaagagaaaaagagagagatcaaaggagatggagagagagagcctagagagagagagagagagaga

SEQ ID NO: 120927 - DNA, 1680 bp, Cannabis sativa
  modified_base (315)..(330): a, c, t, g, unknown or other
taattttattgtaatggcatagatgtaataattcaacaacattatgtctaattattaagtacatatacactaatctcaaaagatgacatttgtcacttatttatcaagagagtgtaaaagagagtccttagcactcctctttcataattaaaaaaaaaaaaaactctttacctactaatcaacatactcttgagatttgagttgttgagacactttcctaaatatgcaagtaaggttacaagacagctaagattcccaaaccctaaatccacacaaaaatacaacttccaaaagaatttattattattattattnnnnnnnnnnnnnnnnttattattattattattatctataactttaaaaaaggacaaggtgtgttgtggcttctaaattattttttcaagttgtatgagattcgatatttaattatactaatagcggtatgacatcgaggaaggtgctagacaccagtggtgacttttagtaattctcatttttatacctattttaattttaggataattatataaaacactatttttgtaaattttttacattaattttacgtttaaagattttttttttcttacatttttacggtgttttataaaaataacgagaaaactacataaaaataattagaaaataacattcaaacaatattaaaacaacaacaaaagataataaaaaatcaacaacaaattaacaagagtacagtataaaaatacatcaaaagaagactgtattttttgtaaataaaatcataaaaatcgtaaaaatcgtaaaaatatttaaaatttcgtacaaccatattatttttgtgtatttgtaaaataatacttttaatttttttccatttaaaccaaaaaaaaaaaaaaactttttttctttctagaaagaaactggtcaatcaatattcttcacaaactatgcaaaaatggcatattctatttcctttgaagaaaaaaaaaattaaaaaaaaaaggcatattctaatggatttccaaaaaccctagaggggacaaagataagaaaattatctttttatttttatatgttaaaagcatgtgatctattttgagatccattgttcaataaattattacttttggattaacaaatgactaatgtatccaaatatattaatctttattctaaaaccaagatttcattaatgattatgagagttaaagttagatttttccaaatattatatttatattaaggacacataaaaaaaaattatatcattaatattataattaaaattagttacatgttaataaatatatttttgtaattagtagtctcagtagtaccattatgaagcgacattttgccaatgatagttttttttttataaattattaaattaaaatatataaaacttaatacttaattacattgatattagtaaaacagttcatattaaacatattaataaatataattttttaattacaattttaaaaatatcatttttactaggcatagttttattcaatgccttagcaataattaataatttaattattaaattaaatatataaaactcaatataattaaattaatttacaataattttaataagagcattgctattaggcaccagtggtgcctagcacccttaagacgtgtcgctttgcgattggttaccgatactccctaaaagctattata

SEQ ID NO: 120928 - DNA, 571 bp, Cannabis sativa
tttgcagcaaaacccttgctctttaatgaactcgactgcttcgaaccaccgggtacacacattgacaaatctttgtcacttgcaccacaatcagataatggcaacggagaaggagagctagacgatcaaaggatcgccattacaactaacaggaaacaagattattgaatatcaaaaccctaaccctaatattagctccaaagctttgaaaacttttgaaatgaaaaagaaaaattaaatgaaaaaactgaacagaaaacttttgaaatgaaaaatgaaatgaaagctttgctcagcctacgtgattgacgtgttgtaggctgtagcagctcagcctcacgtcacgcacgcacgtgtacaaagaaggggttttttaaaaaattgggccgaaaaagtcgggaatacaaagcccaatatagaaaacgttaaaaataaaaaactaccgaaaaacgacaactatatatactgaaacttaacataacaaaaagaacgtcatttttgaaaataattacccaatttaggtggcccatgaaaatttccctatttaaattgactaggttgctaaaataaa

SEQ ID NO: 120929 - DNA, 1031 bp, Cannabis sativa
actactccactcattggcaattaattttgaaataaaaccccataattctcaacaaaccctatttcttttattttcaaatggcaatactgtacaaacaatatgtgagcatgtttgggccacaacactgaacatgataatactttcccgaatgcaccattaaagttattactttcacatttttgtcatgtacttagtgattgaataaatcagacttgagcagctatatagacttttctataacatggactcatcaacgtacgtggtttagatgcattaattgcggtggcataataataataataataattttttgagtacaattaataatataataataatttaattgagtgctaaagatgtggatgttgtcacatattttaattttattataactcagagctcaaaatgatcacttgctcacacaatttaatttcctatccttttttatagaggttcatataatgttttttgtttataatgattttttttccaagtttataatgactattcaaagatgatgtactataattaaggggcctaccaaactgggcaccagaaaacgttcttttttgtttgtttttcttttttttttttctaaacttgttgagttttatcacgtgaaacaaaaaaacgcaaagatgggacatgggagatatgttagtctgtacagagttttcaagaaacgtttatagttaattgcaataaataaaaaaaaaaaaaaaatagatgaatatgaagaacaagaacccattccttgttcacaattacaaatatttaataactttcttgtggtgctattctagcctttttggctctgctattgataccatgaaatatggtgattggatcagagacaacgtgaatagtagggagaagacgattaagcttgtttcagccaaagaaatgtttgagcttggattcttcactcccaagggcagtcctagtgagaaacgatatattgggatatggtactacaacctcagtccaaagacggttgtttgggttgccaaccgagaaaatccactagtcac

SEQ ID NO: 120930 - DNA, 1424 bp, Cannabis sativa
catgaaaatagtatttttgtaaaataaggcaaaatatcggggcgttatagtatatggaccattactatattagcaaaattgaatgaattagataaaagtctttaaatttaataatttcaatagtttaaagagaatttttaacaacttaaaaagtttaatttaatacatgtcaaagttcgaaagataaaaattctaaacctaaaaacaaataacaatatgaaacatgttcttactgttttagtcaataagtttctatctaatacaacattagcattaattgtgggttcagaatggtaataaaaatgacaaagaaattattagttatggcatgtgataaaagtgacaaattaagaaagtacttcaaattaaacatgacaaagaaagtagttgggcttctttataaaaagacaaacaagttagctagatcaagaagttttgcaatatgtcacataaaactcatttcttatttattttttgagcacgcctattgattatgattttaacaaaaaaaaaaaaattgtgctaatattgcttaatggtgtattgaaagaatatattatttattatatttcttaattaatgttatttttaattaaaaataaacataaagctaatatactatagatacatcacataaatatataatataatcaacaataatttaattaagtaattaatatagaaatttgaatgttctattttttttattagtttaattacacgatacttacgagattaataattttgatactattgtttcaattttataatagatgaaattgtaaatgtctaacatatctcaattttatttaaatttataaatttctattatttattttaaattccaaaaccaaatgaaattaaaaataacaagagatcgagagatgtaatttgaaatgaaaaattaatgagatggatctaatttggaagtttttatgaacaattggttgggatttctttgagtatatcctcaatggttttaaactgtcggggccaaatactcaataaaagatctccccaaatttttaagtgactatattaaacgatcggggattctttacaactgtttaaaactattagaaatacccaattatatagtcgacgagacgaaacgatcacatattttttaatagcgatagcttttaaaaattgtgaattttaatctgtcaagaattgtgatttttgtagtagtatcagttaatttggggattctttcagttgagctctttttttttttcaatcctatgtatggttgataaaaaaaaaagtttttcttcctattcattaatcatttgtgcaaaacttagaaagagacatatatacttgggttgagagagtcactacaagaaatgttatttttgccagcacatttttgtgctggcaaaaattggtattgcgctggtaaaatagaatttacctatgat

SEQ ID NO: 120931 - DNA, 1084 bp, Cannabis sativa
accatgcaacataaaatgttattcctgatctttattaatcagtaaatctgattataatcagtaaatctgattatattaaatgggttttatttagggcacaaaacccaacaccaataggggcgggccgcggcctctgggtttcaaacccaggaaaccccaaattcagctatatgaattcaagcacaaacccatcaaaactcactcaaaagcatgcacaaactcaaaaactgaaaacatctagtataacattcacaatagggattttagagcacaaagataacccctgtccaacaacaattaagcatacaaagtaacaattcttaaccatcaaaataagctcacacctgagctaaaattctaacaattcctcaatcaaaaatatgatcacaaaaccatattttcagttatatcaaaataataatcaataccaaaattaggtttaaactcaaagccacatttcaaatagcacatcaaaaatatttctaaaggcaatacccatgaattaacaacacaaccttacatactatatcaaaactaaatcaattaccatactcatgcaactcaagaacataaagcaacctaaacatgctttttcactcatcaatcacatcaacaattttaaagttcaagtggtagaaacactacctcaagcttcacccaaaaccaagcaccaaaatcaccaaagttcctagcttgatccgaaaattatgaagaatatatgcaatttgtgagatgagaattggagagggtgagggattcggtagggcttgaaagaaataagcagaaaatgaaattcaataatgccaaaaacccatctttgttgtaacataattcaattggtcaaatgaccaaaatgcccctagggccatataaaagcatatgcacaaatctagggtaataaagtcatttccatcataaaccacatttaaataaacttcacgttattcaatcaatcataaaataccaatataaaatcttgaacatgtatttcggccccgaacccagttcggcccaaatacccgattgtgactatatcgcgccgacttgtcagaaaatatctaaaaaaggacacaacaagtatact

SEQ ID NO: 120932 - DNA, 1311 bp, Cannabis sativa
ttgtagctgattgtttgggagtcatcacagcgctgcaatcttcttctctccctaattttgactggggtatggtggctctggatattcaattgcttcagcaacactttaatattgtacagttttcctttgtatatagagagtgtaatgatgtggctaatgccttagcaatttagagtcgaatgactcaatcctgtaatttgttgacagatgttttgcccgattgtgctgctgccaagttgctggcagttacgcctctagtggacgtttaataaattcgtatttttctcaaaaaaaaaaaaaggtaaaaattaaataatcaatttaaacttcttaaaagaaaagctaagttagattagagcaaaaaggaagagtcattagattctcttttaaaagactatctataagtttatcaaattaaataaaattagctaaaaaaatttaaaaataaatatgatcacataaataatgattctatctaaaaaaatgtaattaataaatatattaaattatatttataccaaaaaatataaatgttatataaaaaatgagtaagtacaaattaaatgtacaataatattaccacaaccaaaaaataggtaaaaaaataaaaaactaaataaaaagaaattatcaattaatgttattaaagattaaaaaaatcaaacaatatttcaaatgaaaactaatgacatttttcaatcatattaatattattaattaaaaaaattacccttaataaaatatgaatatcattaatattaataattaatactataaaagatagttgattaaaaactaattaaaaacaaaatattaaataaacatatataattgttttcatacataaaatgaaattaaataatattattattaaaataaaataaaataaaaacaaaaaaaaattaaaatagttaagaacttttaaataaataactaactttttttttctttggagttaacctaatagctcttataaaatgaaatagagaaggtgaaaagttgacaaataaaactattaagtaataataaaaaaaataaaaaaaaataatgaaaaaccatgaaaaaatggcatgaaatgcgaatcatcactctaattactattcattgctagcacaactacatcgtcggtgaccgaaatgacttcaccagttcactatattggcagagatgctgaagaagatctaaacttaaaacatagcaaatacaaatttaagacaataaaaataaaaatatataaatagaaatatatcataagaaatcaatgatattgaaaaccataaatcacatctaatattaacaactcaaacccaa

SEQ ID NO: 120933 - DNA, 1595 bp, Cannabis sativa
gcctccttgagcattaactactccatttttgaaattttgctgcctccttggaggtgctctaataattaaatatatatatataacttgtatttatataagatataagatagctgtggaagatagggtaataataatatagtgtatttgttgtgatatttatatattaaaataaataaataaataatttagatatataatgaagaataaatatgaaatttactaccaccctaaagagatttgccatatgaattattattatatttttccctaaaagaatatttcatcgaattatagaaataattataaatttacttattcaaattgtaatctattcattttttatagataatttattattatgattatgagtcttacacgagagtttatttagctcacttaagctagctaaaattaagataataaaccttaaaaacattcaaacattattaattttaaaaatatgtacacatccatatttgattgttaaagtacaattctatacaattatttgagtctgaattcttgaattacaatagattagctcctagattagtcttacatcaaaaaattatttacaaaaataaataaaatgtagttgaacaatttacacttatctttatagttcgaagataacctcttacaaaaaataattcatgaagcaaattataattccaaaggtaaaaattcttttgttctaaaataattgttaaaggacgataatagaatatcataaagtgttatatctattttaatattaaatgtagttatgtaataaattttttaatttaatggtattttttagttttgtatattaattttaataaaatatactattacttaatagaatattttttttaatttatttataatattattatatataaaaaaatcatataaatattttatataaaaaattttaattttagtttaaaatacttaaaatattgtagacatttttaattacatttttaattttattggtttaactttaaattaaaataagagacaattttacgtaattggtcacacaatgattcaccatgatatctcacttgagttttattgtacatataaaataagtatatataatcatatccaaagggcacatgaccaatgtagccgcaatagctaaaaaagatccttaaatcaaaatctcaaatctcatttcaaaaattaaaaaaaaaatacattacttaattaaaaaaaaaattaaacatacatgtagatatttttaaccacattttaactttattggtttaactttgaattaaaataaaataattcaccacgacatctcacttgagttttattgtacacataatatatatatatatatatatatataatcatatctaaatggtataccaatatagcaacaataactaaaaaaatctttaaagatcaaaatctcacatgccatttcaaaaattaaaaaaaaaacattattatctaattaaaaaaattttaatatgcatgtattgatttaatatctgtgacaattagtagtctcgtgatctacaagggaaaataccaagtaaattgtgcaatctcatattgcatggagaagatcaagtgtaattgtaacaccctaacta

SEQ ID NO: 120934 - DNA, 1926 bp, Cannabis sativa
ctctttaattatatgaataataccacacaaataaaaataccctttatataaggtaagagtatatgaaaattaaattatgtctattatatatatagtatgatttatattttgaaacaacatttcatattaaatacaaccaatcaattttacaactaactaactagtgcacaagtcatcatccctcctatattatattatttccaatctaaatatctttaacaattgaaagaagagaacaattacttaagtgtattaagacaaaaaagttaaatgtccactaaattaaaaacccaaaaggaagaacaaaaaaaaacaaaaaagaaaaagaaaataatgaggttcaaaaagaagcaagataataaaaaggatggagaatataaaaggaacaaagtaagagtatctttaagtgtgcactatttaattagattaacttcaaatttttttataccatttcatatactaaataaatattcactaaattacatgttattaatgatgttagattttaaatgtacacactatattaatgtgtaattttacttttttctttcttctaacctttagtataattttttttcctaaattttaacatgtactaaatcgtacctcctgaacttttttagccgttaaaaatttcctccgaactattgaaattgttaaatttaaggatttttttgtttaatttcattcaattatattatttcaattattatttatgtactaaatcatactccccaaactttgatatctaccaaatcatgcccatcaaacttcgatatgtactaaatcatgctccttgaactttcatccatgttaaattttttttactaaaattagacaaaaatccttaatctaaccatctcaatagtgcagggagaatttttaacggcaaaaaaaaattcaagggttatgatttggtacatgtcaaagttcaagagaaaaaattactaattaaccaattattaccgtcaacgttgtactatgaatgttcattaaactaaatctaatgtttttaaatttatttagatttgattatatattgaatgttagattaaattgattgattctattaaatatattttatatatatcttttaaattggttagaatttaatcaataatctaaacttaatttgaaatgaatcgagtctatggaatgttttagttctagcaaaactaatggagattggctgtgtttttaaacttatgaaactcttaaaccacttttgttgttgatttagcaattattaaattttaaattcttaactctaaaaattaaagaaaaaaacaaaaaaaaaacaaaaactcagccaaacaaaaccgaaataaggcatatatgagtgatgagtcacatgaccacatcctcaccctacgtctctagtctttttctttttattaaattgttgcttaaagccaaccccaccttgccacatctcactcactcacttttttttttttcttacttttcttttaataattatttccccctttttcaacttttaatttaaaaaatactaattaaattttttaacatatactaaaatatacttatcaaaaatttaaagacttatggtcaatattgaacactaaattttaatacatactaaactttgttaccaaattggagacttatgttcaatattgaacactaaattttaatacatactaaactttgttaccaaatttttacatgtactaaattttatcttttaatagtaaaattagaagcacaaaaagtttggagacaaaaatttaaattattctaataaaaaagatataaaaaaattctacaatacacattttaaaaaaagatgtaccgatacactcttatctattttggcatctaattttttttaatctatttttttttataattatgtattttgtagttatttaaaataggataaataccattttggaccctatg

SEQ ID NO: 120935 - DNA, 3702 bp, Cannabis sativa
  modified_base (3646)..(3664): a, c, t, g, unknown or other
acaagtcaatacaaaacatagtatgtaataaagaatattaatgcaatgcaatagaatccaacacattacttataacgtccccacttcaagactccattgaccttcgttcacgaactattgactcttatacatgggtacatcactcttggctacttcatagaataacactgaccctgcagaccaacacgagtctttctaatgcactttgtgctcattggtccacttatatggaacacttctcaggaagtcagtcatcttgaaattaccccacattaagcacgcttaactttagagttcttttatgatgggctaccaaaaagtagatgaatcttgttgatataaatagtacaaatcaattcatttaagtgctcttcaactgtgtagtctcatacatacacagtttcagaattatcatcacacttgaccttccccaggcgatgtagaattgtacaactctcaatctttccccctgcgaatcacgagactctaacttaaataatcacctcctttgggggtctgacgtcctcatcaaccacatttttggctgggtcaagactctaatatcatttgtaatgttcccgcttcaagcctcattgggccttcccttacagaggtacatcactctggctgcttcatggaatgacgactggccctgcagaccaacacgtccacaactgtctcgctcttaaatgcctagatatggatctggtcaatcttctcagtcaatgggttttcagcatcaacagtcgcagcagactcctctttcatttcagcaactgttacaacatcctcaacaaatttcaataatttcagatgcttcagacattcatacagattatgtcacagtcgttgtcaccaaatagcccacaaataatgatgcagataatgatgcagtcgcctcagacgtctcaagtctcacaacctcggatgccacaaatgatgccagcacaacaaatgtcacagatgtcacagactttttagatgatgtcgacaccacaagggaaacaatatgggcagcagagatcgcatataaagacaccacatgggcaacagacttctcaaatgatgacgagtttgcagatttcgccatactatccacagatgtcaaatgttcctcaaccacaaattttgagagatgctaatgatgatgatgacgacgctactacaaatttcttttagtatttttatttaagttttatgaattatcggttttatatttatttatgttttatgaacgctcgcttttaatatttattattgttatttaacagtattgttagatttgacttttaatatttgatatgaaaatatttagtttgttattatgttctaatcttaatttaattattttgtatattgtttaattaaaaaatatttaatataaattaattagttaattaaaaataaatgtttaatataaattaatttttataaaaatataaaatggaattataatttttttttttaaaaaaaaatagaggaatcaattgtcattgatatgattctcgagtaaaaagaatttttttttaaaaaaagtacatattattactaatgactttgttgttggtgatgctgattttcaccaataactttaaatgtcgtcggtaatactacctattactaacaaggtatactattaatgactttttactaacgacatgttgccattaataaccattactaacaaaaaaattcactgacgaaatttatcctcattaaaaggtatgattcttgtagtgaaactttaattgctaatgtatttctcaaattgaatttacattctaggaggatttactaattgttctagcctatcactttgtacatattcatttcttattttattcaatttattgcttaatttgggttttgtagtagtatatatatactcgcatttgcacttttccttttaaactttacttgataagtacagctagcttatagagcttgtattaaaaaaaaaatagttgtgcattgttgtccttaaattaattaagttcaagcattgttaagtacgatccagtaagtaagcttcattggagccatcgactacattgaagatcagataagacatagcacatcgatattatctctctagaaatgcgtgtatatatatatatagatatacttgaataatataccatgctccatgtatagctagctctttcattctggctataaactaattgaggggataatacatatattatatatacatattttgtatacttatcttctttcattgttaacgaaaatgaggatcagggatgtgttattgggtgcattggtgagctatctgatcatacaaaacgtttgtgtaacaaatgcatcgagggttttacaaaagtcacagttttttgccaactttttgcaatctaataataatgtgattagtaataatgggaccaaatgggcagttcttgttgctggctccaatggctggggtaactacaggcatcaggtatttaatgggacaccataaacacgggagggagtatatataaatatacatatatatattacaaatatggatgattgctatatagaacccgtactagtgtctaatattcactatattgagcattactatttagtacattgaggtatattatttattaaattaaaataggtgggaatcatattaaattaattcataactatatgcaacctttctcatatatatataaatatatatcagagtcttgtatattctatggaatttatgaatgcatattaagttataataataatagtaattcatatataaaactggtgttttggcactaatattgtttaagaatatctggtatgtacgtaaaatccataatgtttaagaattaatattggactattcgtaaataataacatggggtcaatacaataatgatatgagcatattgttttttggtatccgtaatgttttcacttttaagaaaaattacattgtaattgattaatacttcttaaaaattacattaaattatatactatcattcaaaatattatcttaattaattcactaatgacaattaatattaactagtagaagtgtgcttgactttaacatttctcaaattatatatattctaattaattcatcatttgctttgatttattacttaaatataaaagataagacaaaataatatatggatgatgctaattaaatatataaaattatacaggctgatgtgtgtcacgcatatcaaatactgaaaaaatcaggaatgaaagatgaaaacattattgtgttcatgtacgacgatattgccaacagccctgaaaatcctcaccctggaatcatcatcaacagccctaatggctcagatgtttaccatggagttcccaaggtactatttatatcatcatctctctagcttttcgacattcacgacacatgcatcttaactttatatatatatatttcatgcctatatatatatatatgtatatgtgtaggattatacaggagagaacgttactgtaaataacctttttgctgcaatcctcggaaacaaaagtggcatcactggaggaagtggcaaggttgtggagagtggtcctgatgattatattttcatatactatactgaccatggtggtcctggagtagtcggtacagacctatctaatatatatatatatatannnnnnnnnnnnnnnnnnnattaaaagtgcctatctaacgacatttcttggtttaac

SEQ ID NO: 120936 - DNA, 2054 bp, Cannabis sativa
tgttactcggatggttggaaggctgaccttggcttatagaagtcaaggtgccgcacgggtgttccgctgcctgaaaaggtgagcccgtgacacttggcatggtccaaagataagtgaaccctaaaaaaagtgggccaaagaaagttttaataaattaaaaaaaatggtccttttgtatatgtaatttttttatgtgattttaaatataatttaaactaatatttagtaatataaatacattccaaactaataaatcattacataacttataaatttcaatatattattgttatagtacaaattttttgcctaaaaatacgagtacacgctcgtataaaaatgacacgtggacccagttaccgatagaaaggatgatgtgttaataaaatagctccagtagagctaacctcgcttgatgtgaacttggaagaagatgcgagcgagacaaggtctagtcgcatactatgcatcgcatagctgaaagaataagcaggactgggaggagttaatactagtcgcgcatatatcgattatttgcgatgaccaagtaaacctctcttacgactagtaaagattatttctttacataagtttggtttgaatgactaatgtgttcaacgactcgttagggactcgcgtgttccacgttgtcaatgcatggaatgtccgattatgcgatcatgatgagcgtagacattcaaacgataggttcaaacgccatttttcgagtacagcaccgtagagcctgcaagatcttatgttggaatatgaacggacaacttgcgaaatataaagtcgcatacgttgttgcacttaattcaagaatggatgaaattgttctttatttatcccttaaatgtttattttgatttaatattatcatttattgtaaaaacagttctaaatcgatcagctatataatcttaagggcttaagggacacttgctctctatataaaagagtgatccaaatcaaataaactaagtagaaatcattaccaaaattgaactaagcagaccaaactttgactgaaccactataattctcttgtcttctttatttctgcttttatttttgtctatttagtatcctgtatcttgagtgctcgctattctaggtgagtactcgcacatctgcatttaagtgttctaattttatttgaatagtcacatattttgttgttgtccaatttcctctgataacatttggcgctatctgtggaaagaagtatttctaaagatttttagaggagaattgagatggctatagatcagacaaacatgaacaacaacaatggatctttcaacgttgggactcttaatgttcttatttctagtagaggaacagcccctattgaggtcgttatatgaggagtagggcgtaccaatgtcactcctctcaatctatttcttgaaatagcaggacatgctggagaaacctctacatctgcggctactgtagcacattttccaccaattacacttgtcattgcatccaagggtatcattcaactcacaacctcacagtatatgactatgcaggaacaaatgcagacattacaggtagaaatagcaagaagagaccaaattcaagcctaacgtccaccatgaatcccaaatcgacgttgcaatgataatcaagtaactgatgatactaaatgtcataatgaatgtcctaacaatactcgtaattgcaaggaacatttagatgagaatgggcaggaaggactcaacctgaactaacccatttgtgactctacacatggtagaggtcccgttgcacctgatgcaagtcgacagcctggtcaaagggaggaaagattacaagaagaggaagaccctgaacgacacaacccgcgtagtcgtgcacaaccacgaactaaggtaaatgatgatcaatctcactctttttcctcaagaagtgatagtcatacccccagtatttataccatgttaggaacagtctttacaaggataggaggaaggtatcatgtaacaccctaactagcctaggcgtgttatgtgattttgaaacgtactgtgcagctcgttgct

SEQ ID NO: 120937 - DNA, 939 bp, Cannabis sativa
tgctgtctttaaaaatgaggaaggtaaaatctttcacatagccactaaacagtttacttactctgaatctcttccagttgaagtggctactatggtgtggggtgctgaagacgctcttactcaaggaatccgcaatgtcattttcctgatgactcggcggatgcagtgaagtcggttctttgtaagcagttgcagggtcagcctaccactctgcatcataatgtgcaggacttgattaaaaggttccataacaatgctaatcggcttggtctatgggaagcttcttggattcctagaagcatcaatggtgtggctcactctgtagccaaatgggcactcgatacaaaccagtttgggagtattgacctgtccaattttgacagttcccttctcaatagtggagtagatggctgttttagttctttctctgttcgtttatttcagttcgttgtagtgttcctttagttctagtttgtttgttagttagttgttcttttagctttgcctgttgttgccccagccggggttggtttagacttttgctggttttggctgtttgtttctcggtttgtttttcctcgttgctcttttgtttggtgctcttgtgaagcccagtcataaaaaaaattgtatattatttactagttcatgcatgattttatgaataatctaattgatgtaaataattaattttatatctaaaattttaaatatattgaacattataatcttgaaaaataaaattaattaatataatatgataaaattttaaaactattaaattaattaaaatcataaattaaatataagtaaagaaaagaaaacaaaatattacttgtaaagtattgaactcatgacattttaattattttaagagtgattattataaaattattataagttgaatatgtttagtttttttataagtataattattgt

SEQ ID NO: 120938 - DNA, 1315 bp, Cannabis sativa
aaaaaaaattgatccattccattccatttcattacttttaaccaaacgccaactaagtactcgctcaaatagtaacacatggtatatttatagagctacgctttcactcaaataaataaaataaagcaattgtctaccaaaattgtctaaagaatgttttgctatatgtattatttttctaaaaatgggtttttttttgacattttatgttttgtgtcttatttgaaaaatattttttttttatccattaattaaaaatactctcatattatgttttttattaaaatatattcactttttttaagtgagttgtctaatataccacacacttacattaacttaagggatctaacaaggtcatcatctataaaataagtatatctaaaaaaatatgtaaattaaggtatataaaaattaaaacaaataaaataacgtcgctatataatataattttctctaaaattattacatggaaataacacataagagttttaagttctttaaaacaaatgtgaattctaaatatttttcactaactttttacaataatttatcaaattcttgtgttcaaccgatactataattcaattaagaaagttaagtcaagttttaagtttgactaaaatggtacattactcaaacaatagttacaaagtattagattaaatattaaaatgaaagttttaagatttatacttgcattactttatttcaaatttaattttaagaataaaaattaggaatactttatagtgctctctgtatgtatgtaatataccttttaggtaacgtttggttgaagagaataaaatagaataaaatggaaatgaaataacttttattttatttattttttggttttattttaaagtatcgaaatgtcattcttattctagtaatgttttgattcctttcaatcaaatgccacctaataaggtgcttgttatgtgagtttgagttgaagagagtaaagttggagagagtagacttggagggaatatgaaactcatgtatttgaggggattaacattgccatcatcattttaatttaaaaattgagactaatttggaaacacaaaccccttgtcattcaaatttaatttaaattttatattctcatccctatcaagtctaaatctcataccaaatgctccattaattagtgtttttgttatttggatatttaatataatatcaatttttctatgataatgtactattggagaaccttgtcccacatggattaaatgtaaaaatattgagctatatataaaaacatgtgctactccattcatcactaattggttttgagatg

SEQ ID NO: 120939 - DNA, 1610 bp, Cannabis sativa
aaaaaaaaaaaaaaagttacactacaaaaaaattataggctttttttaaaacttttattaagtagtcgtaggcccattttttctagtgccagctctaagtctaggggtccaaaaaattatcctcttttcaaaatacacattttttttttaatttattttgtaaaatattaattataatattttttaaaataaaagccaaaaaatattttttccatatgactattagatttttaggaccaattctgaatatgatattaaagaaagtgctagacagcggagggaaggggcgcatatggagtcatttgcccccttaattttttattcatataaattttatatataattttttaggtattttatattttgactccataaaatttttttgttttctttgttcttacatatttttatatttatctccgtaaaatttatattttttatttttatttttacgtatatttacttttattctcataaaatttatatttttttaataaaatttataatttttattaatactttcaaaataaatattttttaccccactaaaatattaggctggctccgccacaacaataatatttattgcaaaatgataatatgataaggcaatgagaagagaagatgatgtaacaaaaacgacaacaatgaatattgattggtcgacctctttagtctttagtcttctttaccttgccaccaacaacaacaacttcctttcattgtatgaacattgagcatttattatatataaacgacacccagccgactttacatgtgaacttactagagtagacaacaccagtcggtttgtgttttgctgctgctgccgtcaaatttcgaggtgaaattgaccctgttgttgctgaggcgttgtcaatgaaagagactttgagttgagttgaatcatgttgggaagaaggcagggttgctgagaatttttgtccttcagcggtgattatggagtcggattgtctcttgttagttaatgctatcaatagcaagagccaagttctttgtcctcttggtcttattattttggattgtatttatcttatacggtcctttactagttttcatatttcagttcagtttgttaaacgatctgggaaccaagcggctaactagttagctcgttcttctggttcatgtcttgatcgtattttcagtaggggatctgtcccttctgatttggaagctattttgttagctgatttgctttaatgaaagttgcaatctttgtttaaaaaaatttaagactctttaattgcatcatcaactaattaaaacttccactaaatcccataaattataaatattgtagagaaactccttatacaataattaatttgccaaaactttaattaaacgacatctaagtagttgccgtttgtacaattataatattaggttacaataaactatcaccaacctacccaataaatgtatgtcattgaatactaatagggcacacattccaacccctcacaaaaaacggcttgatgacatttaaatttttttaaattgtaataattaaaaaatatatatatatttttacactttaaaactgttttttttttttttttcatttttatgaaattctacctaga

SEQ ID NO: 120940 - DNA, 2670 bp, Cannabis sativa
aattgcttgcatgcataacttataaaaaaaaaacacttaaagatttgaataatttaatatcatgtttttattattcttcaacaaaaaaattgaaaatgataatagtaaaaatgtagctctctaatctatgccattggatcacaataactcatattagaaaaactatcattattcatgtcattaaataaaaggattttatgataattaataagaagactaatgatatttttgtaatttattatgaaagccgaaaagagtattctctttttatatagttatagattatagattatcttattaattctataatgctttctcttttttttttttttttttcactaattgttttattattttaaattttttgaaaaacgaaatatttatccaatcacacgtacatcaatgcataagtctatatttttttaaaaaaatatttttatatctaatacaaattaataaatctataaataaatattattgactaaactgaaacacaaatacttatactattttctttattttttatataaagaaacactaaaatatatatatatcatctatatctctatatatcaatttatatatcactccaaaactatttttctcttctttccttaattccttcaattttaatattttattaaaacataaatttataaattgatattttactattattataataatttttctataaaaaaaaggcataaatctaaatattgatattttactattattttaataactttttctataaaaatataaaatatttaaaaaaaaagttagaaaattaaaaataaattctaaaaaagtattaaaacttaaatcaaatataattaatcgtaaattttatttatatacatacataaaatatcaatcaatatatataccttaacgtttttagtttttttttttttaaaaaaaagatataataataataaaagaatcaggtgtacgtgatacttaaaaaaatatttcaattgctttttaccacatttaaactttttattaaaaatattaattaatttctaacaaaagcctactttatgtgtctttttgaaatgataattttaatgtcaagtatcacataagtataactaaagagcattcttattaggcacgagtggtgcccaatgcctttcttaggtggaaccttacgattggttagcaatattccataattttttttttttttaagttatatgggacctactacttaattaccaatagtggtatgatactaaggagagtttccttttagcatttcttataactaaaatatcacatttttttatatatttttttaattaagatatttaaaaataattatcactttttttaaaacatgttagttaataataacagaacaaactaatgaattttctttaatgtcttaaaaatattaaaaatatatttaaaattcgggatgaaatctaaaattaagatatagatttgagaaatacaatagtgatgactacaagtgaaatacggtaatgacaacgggtgagatacggtaatgaaaataagtgagatacaataataacaatagttttgaataatcgagatataaaaataatgcattatggggaataccgtaatttttttctacaccaccctatttatttatttttataaaaataatttcttttaacaaaataattgaaaatactacatataataaattttaaatttcttaataaataattccaaataataattaataaaattgtacaattagtttttaataaataaaattattaataatgatatatgaaataagataatatatttataattttactatatattagaattatatttttaagtaactatttattataatactaaaaaaaagataaattagccgcgcaaagggcaactatattgcctagtttagatataaattatcactaatttagttttaaacacaacacatattatgacttaaaacacatttaatcacaataaattgtgacttttgtgactaagacctttagtcacgaatcttttagttacaacataagaatattaatttatagttaattagttacaatttttttacttttagttataagttttatagagattaaaagtacaaaaatttgtactgtcatctgtcatgttgtttaaatgtaagctcatgattttttgcaccattatatactaataaaacaacacagaaataataatataatatataataaggtcatgtttggtttgatgtaatagatattgtaacgaaatcaaaattactattataatcttcagttttcttttaaaagtaaggtaatgcgattacaatgtataatggtaattacattacacaatagaatctttattacattagaaaagctatatgtaatgagaattacatcacaaatattaaataaataaaagtaaaataactcaaatattattttttatattagaataaaaattaaagtaggaataattttgtgaatgtataatttattccaacaagaaataaatatcgtaatccattttctttaccatttttatttcattacgttactattaatattccaccaaaataaacttcatctaagcttgtataatttttacactattatttactaataagagaataagaagacactacaagaattccccccaatagcggcgggcgtattagcggcggagctcctccgc

SEQ ID NO: 120941 - DNA, 1021 bp, Cannabis sativa
  modified_base (36)..(61): a, c, t, g, unknown or other
  modified_base (994)..(996): a, c, t, g, unknown or other
gtacataaacaatcactgaaacagtaaaattgaatnnnnnnnnnnnnnnnnnnnnnnnnnnaacaatctcaatagttcaggggaatttttattagtagccaaaaaaagttaggggacatgattttgtacatgtcaaagtccgggggaaaaaattcctaattagcctattatatttatcaacttttatttatgttaaagtcaaattattttactacaacattaaattcagttttttggtgacctatgtaattttatttctttttaaaatttattgtgaccattaatcaattttattttataagattaagtcaattttaatattactattttttgttgggtaagttattttagcattcattgtattactttttctaatttttttctttatttgcacaattattttcatttgtataattgcattttttaaatgcattttgtgtattaatttatattaagtacttttgttgtgcttattttatgaaacatgtttggtttgttttcttggatcatttttaagtaaattggtatgtggcaatctttcattagttcaggccactaaatttttattttttttttaaaaaaaaaaatagtttaaatataccaataagaaaataacatgtagataatgacttgatatttaacggacatatataaacagaagttccaaaaatataacttatgtattattattgccaaaaataaaacctaagtatttatttgtaattaggagttaaatttaagtatttatactgcgaattactcatttttatgtattttaaactttattccattctatttttatttctattctcattctcatttttatgttttcattccttccaaccaaacgtttcattacagaactataataattataacaataacaataatattaaataactacagttaccttatagattgagaaagagtaatttgcggcataaatacctgagtttgatttgaagttgcaaataaatagctaagtttaattttnnnccataataatacttaagttatattt

SEQ ID NO: 120942 - DNA, 3870 bp, Cannabis sativa
  modified_base (1999)..(2006): a, c, t, g, unknown or other
aagcatcccctgaagctgtaacttaagctccttgaattctgctggagccatcctatatggtgctttagaaaaaggtttggctcccggtgccagatcaatcaaaaagtcaatttctcgttgcggcagtaatcctgacaactcctcgagaaatacgtcgagaaagtctttaaccactttgactactttagggccaaatgtttgaggtctgctagagtcaatcaccattgctaaaaatcctacacatccattgtgtagtagatccttagcccttagcacagaaataaccgggatccgagacccctgaactgatccaacataaagaaatggatcttcaccttctcgctgaaaagtcaccattttttgcttagaatctatactggccgaatacttggacagaaaatccatcctaaatatgatatccctatcttcgatcctaactggaatagacctaatgtgcctattagagataactaactccccgttagtcattagggttccaaaccctcattcaagaatatcacaaggcctacccaaaagataaattacccgtgtagccacatatgagcttgtagctctcgaatcaaataacacaatatacaaggagttgttgactagaagctgacttgacaccaccgaaggactggctgtagcatcagcttgggtgatagcaaacaccccaacaggtacaggttttgtctttgacttcagctcttctttctttgcctaagggaaatctttcttcaaatgcctcaccatgctgcactgaaagcatgtcttccagttgcactctcccgaatgatgtttcttacaacgtgggcactcagggtaagagtaaacctggcgtccacctctgccttagttcccacagaactgcttgctctaccccgaaccaccagatgccggggtaactttcctcttctgatcagcggtggaatcacaaccatccctaccataaacatgagaaggagggccttctcaaccgtttctgcatatgatgttgcttcattggtagtaaacaccaaatcacgtctaatcttcacattcaaacctggcaatgtacttttctttcttactgaaatctattggcacaaacctgaggcaaatttggccaaacgatcgaactttgtggtatactcagtgactgacatcccctcagtttggaataactcagtgaactctttcgacttaccattgtggacggcttcattataatacttggcgttgaataactctcaaaattcttcccaggtcataataataacatctcgggtgaggacaccaattcccaccaaactagggcgtctttctggaactgaaatgtagtgcaagtcacccgatcattaccagccacccccatgaaattcaaaattttctcaatcacagtgagccactactaagccttcatcacatctagacctcccataaacattggaggtgcttgcttaaggaatctttcgtataacagctccatacggttgccagcaataggttgttttgttggtaccgctcgagctaccacgacctgagcttgttgtggaggcacggcaggagaccctgctgccttaacctcaaaatttcttcatcttgtcggtggattcaatcttgcatttctgcaaacctctgctcccaatctagaagagcttgtggtggatttataggacgaccaccttgagctctgccacgaccacggccgcgaccacagagattgtagtgaatttgatatccctaagtgcctccggtctaagccatattaccttgacttcttgtattttgatgggcatccatttaataggacttagcctgcgaacccataagctaggcaggttagacaacgatcatagaacttaataccgctcttatggatttaaaggcaacacacttaaaataaataatcataatctaatatgcttcctaacatactttaataacaacatataattctaaaaaagtacgggcttactgaaccgtgaaccgagctttctctggtgaagattgtacnnnnnnnngcaagctccggtagacaaacctggcggctctgataccaaaattgtaatgccctaatactaaggcacgctatagttctttttcaattatagtgctatctctgctaaacaaaaaattttcccaaaaaatgtttcaattaaaacttttataataaatattaaactttatagtttacatagtcttttacaaacaccgggatccaatttctaaactcttatacaaatgtaccaaatacataactaggtcgcacaatgactacaaaatactaaaccccagatatctcgagactgaaaactccagctcgcggtgccacgacatgtacaacctcatctcagccagggtcactcctattcagctttcgcctttcctttacctacacatggaagcagaactatgagtcaatagactcagtcagaaaatcatataacatatcatataatactgacttgtatctaggcgcccatacacctatttataaggcttaagagatgagtaagaacgttccatactaggatacagccactataccacatacactacgtaccttgatgtacgagtgttggtcgagtttgattcgtacatcgagtaccactgagtgatataacacaggcaccttgactttcccgtacttgtgctggtatcgctctaatgtactcttaaacaatattcactataccaatgaactttgtaccataattgtacatgtgttggtagtgcaactaacatataagcatgcatatacacttaacatatacatacactcagatattcatattacatattatacaatgttcttaccttcttttcaagttcaagtgtgttggctgacttgaacagaaagccttgtgctaaatggatgccctaatcacataatgaaactaggtaaatcacacaatctctaggttctgctatactctctagggattatactaactcgagaagtagggaaacacccaactatggcactgaaatggatgagaattgagaaaacgagacactcagggaaccctgccaaaaccgtctaaccagttttacaggtactggtaaaattggctagccggtttatactagttctcccaaaaatcccatattttgctcaaaactccaccaaatgcaaccaaactttctagagtacctaattagggtatacagaatatattccagccagtaaataaaagaaaaacacactaaatcaaattataccattaaagatcaaagcttaggtttctaaatttaaacttgcataactccaatcccatacaccaaaaccaactccaagaagttatattcaactcaaattaagcttagcattcgaattacaatataacctaaccctaacaacccctatatctcaaaatgacaacttgaaatcaaagcaaaagcttcaaaatacaaaatcataggttctagggttaccttagctccaagaacacctaaattcctagctgaattctagaaaataaagatgaaaaacttggtttgcttctagtgttgtctcagccgaaagagaagaagagagacagttctctattttgtgattttttggcttttcctttatatttctctaaatgaaaaaggatttcctaattaatcctttgctgaaattaaatggccatgtgtcactcacctaggaagccacaaaaccaccattttaaattactaaaatacccttttaggctataacctaggcatttctcaaaactagcggtaaaatggtcaaattccataaccccgcttcaccgtggtattttattttctcaaatatgtatcccactaagaaataaggttctaaacttacccatgtgatcgtactagccatccattgcatttttcgttgtcgctgagcaaaaattaaaaaaataacat

SEQ ID NO: 120943 - DNA, 1680 bp, Cannabis sativa
catctgtactatgaccaactaagatattttctagtgttattgatccatgatcaagtgagtcaaagcttgaatgtgatgagtttgtgtcatttacctattttggtgaagttgctgctgtaggagttgaatcatgagaagcttgagatggtacatgagagtttgtattttggggtgcataactgagatgcttgaagtggatattagggagctgtgaccaggattcattgtgaatggcaagttatttttctaaagcttgagtgtttagaaaaccagactgaaagggaaacatattttcattaaaaacaacatttcgagatgtaaactcatcctgttgtactcaaacatttgtagcccttataagaatcattgtatcccaaattcatacaccttagtgagtgaaattgaaatttatggttttgatatggtcgcatgcaaggataacatgcaactccaaaagttttaatatgtttataatctggttttatgtagtatagtgtctcaaaaggtgttttgttgtgtaaaataggtgttggcagcctattaattaggtacactgagttttgaaaagcatcaactcagaatttgagtggcatactattttgagtaaggagtgttaaccccatctcaactatgttcccatgttttctttcatctctcccattttgagcagacgtgtgaggacatgagtgctaaaagtgaattccattggttctcactagtttctcaaacacttgatactctccaccccaatcacattttatgcttttgattttagtataaaattgattttcaacaaaggctttgaaatcagtgaaggcatttagtagatcagatttttgtttcaaagactataggcatgtacgtgcacctactaaaatcatcaataaaatgtatgtaagatctgaaattagtgtttgatgcaactcaggcaggcccccgcagatcagtgtggattaattcaagcaccttagaggctctacaagaagacaatttagagggtaatgcatgagattttccaaactgacaagcttcatagaaattttctatttcattctttggaatttttacattgtttgactcacagacaagcttaagaactctagtggatggatggcctagacgtctatgccacaatcattcttggaatgatgaacattggttgtgttaacatcacttgatttagacaaactcgaaacaccagggaaaaattgagtgattttgactaagggctagtttgttagtgaactgatagcgaccatccctaaccactccttccaacaacagcttctttgtgatgttttccttcacaaaacaacaatcagggtgaaatttaacaaatacaccattatcaaatgtcaaacttgaaaaacttaataaattttttgcaatattaggggcaagaaggaaattatttagtagcaagggtgtagacagggtattggtttttaatttaccataaccaagatgagagatatgtagtttattacaatcattaatgattaagttttccttaccaccatacccctgtttctgcagcatgttcttttcatcaattgtcacagtgttacttgctccattgtccacgaaccaagtgattggagaagcttataagcctaaatgaccatttcaactacctttaccctaagcctaacattacaagcctagaaagaccttctgatt

SEQ ID NO: 120944 - DNA, 2940 bp, Cannabis sativa
gtcaactgtctaataaaggggctcacaccaattaggtttaaattcctgattagcaaactcaatgtgttacttcctcatttcatttgaggggtaaagttaaagaaaatggatgaatttctattgatgataatggtgacatcactgatgataaggaataaggattgcattacggatgaatgaggcaatcttgagaagatcttttttgctatttctttttgcttccttgtttaactttgggaatattctctttgttagttttgcaatgtgtaagccttctataagcctttcttttcttctctgtattcctctcctaatataaatgaaatgttatgcagcctcagtattatttagctgagttttattcacaatatatttctctcaaaattaactcttatgacaaggaaataacgatgggctggacagaatacaggaccgatcttcacttaaagcccaatttttctcatttagccgatttctatcacttttatcatttatgtgattttcttttagttaactacaaaacatattggttgagtcttgtgacctccaacactaacaatgacattttattaattttatagcaatgacattcttatgaaaggagtgaccattttttcttcttcttaatatagataaaattaaatagaatttttgcctccaaattgttaaaagtacctacttgaataattcgtacatttcatgataaatataaatttgagtgtcacgattatattagttatgctgtatgatagtgacattagaaattgttcaagtctctcccttgtgcatatatgcaaaatcatatataacctttggcatcggttattttgaaaactcgttatatgaaaaaggaagtaagaaaaaaaaaatcagtagtgaggttgtagattgagcagtcatcgtcctttccgtccataatccattgtttataatcagtagaatacagctactaaacaacagtcatatcatgacagcacacattgaaattagtgattaatacaatcttaatttatccctaaacaaaatatttgcaaagaatcgcaacttcactattgaaagagtaaacttcttctagctaatatggatcaaaaaagaaaaagacaaacaaacaaaagtcatctaaacaaacaccataagtcgtttgaaaagcaatcatataaactgaattgttttaaataaataataaaacaagagttaacctagtcagaccactccctaatagtaggcaaacaatgtttatatatactacagaacagttacctttagttacctaatatgagttgcaatatggattatctcatccagatatttcaaatcacctatatatagtccactgttgtggaaataaaatgaattatatctaccacaaggtcaatataaaagggtgtgttgttattggtaacaacaacattttcagagatgaccttaaagagcttcaaaagagaaaaattatgtaaatttaacaatgatttccttcccaacatagttgttttcacatattaattttgtgacattgtcacaggttaatgtcaaccacattttacactcatttgtgttagatagcaacctgtcatacaatgagctatgagttttgaagaaaatgagctaagtttcatgcattaaaccacattacaatctataattttactttcagatcacaatatggtgaaaagatatgaagagaaagtcatctcattgatattccaaaagcttaagccttattctctcatctcagttctattttcacaacaatgaaattgaaaactcacagactggcagattgaggcaacgacactaaataatcaacaacgacaacactttccaaatgctccttaaccttttccttctgcagcttcaccaactcctcatccgaatccaaagtctccaattcgctctgaccaggaaaaacagcaattgacgcaatcgaataccccttggctctccctggtgagaaattctccccacaagtgagctgagaaatctgcccaaaactattcttaatccctttaattacccccaaaatctcagatttcttctcttcctccagattctccttcaatttcaaaaaagtcaccctcaacgccgagcccggagatagggaagctggaccttgaagatcctcggcaacccaatcgacggccatgatgtcttcgcagattgggaggaccgattccttaactacgctcatatgattagggtgctgagagtaagcgttaaggtcgtctttcgagctgtaacggctatggagcatgtgagtaaagttgagcgtggacgatcggttccggagaagtggtccggcagtgatgtggaggacttgatcgagcgatttgaggctgctgagtccgttaaccatggcgtttaccttagacgggtcggtgtcgtctttgaccttaaagaggacgatgtgctcgatggtttgggttggggaagaagacattgttatcttggaggagtaatacgaggtggaagagtgagagtggggtgtgaaggaaagagagggtttggggttgagtttgaggaggtgtttggaagccgagaaagggagagaaagtgtggtattgggtcggattctaaaacacatcgtcatattattattattattatcccaaataaaaagaagaaaaagggggagtaaagagcagagcacagaggaagctatatgcggctgaggtagtttgatagtgatgggagagaggttggtggcactgtcacaattaatgggccgaacccaacaaatatgggccgaacggcctgtaatgaactgcgctagtccttaatttttggggaatttttaatagaggaaattacctagaatatggcattttttcattaaatttcatagatatagaaaaattagagatttacttaacttatggcttttttacaatttaagttagttgtatggaaaaatatttccatatttttaagtttttattaaat

SEQ ID NO: 120945 - DNA, 839 bp, Cannabis sativa
  modified_base (73)..(81): a, c, t, g, unknown or other
aaaaacagttttatagaacatgtttttgaaaaaaaaaatttcacttttctacttttaaaaacagaaaactgannnnnnnnntgttaccaaacgccacctaagttcatcgataaattatttttaatgataataattatgtttattaataatttacatgaacaacaatcaaactaagaagtaagaaccttaaacccttttatacaaatctatatatatatatgagtaattagcggtaaaatttttcaacttacttgtaaaaaattatcaaacctcatattttagtaggaaaattctctaaagtactgttccgtttacatttttaaaattacatctgtccaacttcgttaaatcttaattttacctatgtggcaagacaggtcattcaattattggccaacatggccacatttacgctcacacatcgaagggtcataccactctcaaaatttacacccacccacttgctgtcaaaaaaaaagttttatttataaacatttatttaaaatctcatattgttagattgggtgtaattctctctatatataagcaccaacaaaaatctacatcatttcaaaatagatagagagttagagacatacaaatatcctccaaacttgtataaatatgtgcccccaatttttttgggattttttcaataatatacctaaaattaattttatttataaaaatacctttaagaaaattatttgcacaaataccgtcgtgacacgtcaacatgcataccgaaattcaaaacaattaccgaaaatggaaaaaattggaaaaatctcgtttctagaaatttttcgcttttggggagatttgaaaaaagcaaccat

SEQ ID NO: 120946 - DNA, 1705 bp, Cannabis sativa
aatgcaaaagggtgtaggcactagaatatatatgtggtaatatatatatacatatatttatatttattaaactcatcgtagccgtgtggtatatatatatatatatacacattgagaatgcatgaaaactttaagtttgggatgtagaaaaatatctcaagacctgttgatctagccataacaatgttttaagagttattaaatactttaaatgtgttccacaccctccaaatataaggtcctacacatgcctaaatatgtagataactagtattaaacttccttgacatagtaaaagcttgaaagaatcgaaagagagaaagattgagatcaaaaaagtgaatctcattactgaatcatgtaagagaacaaactgaaatatatacaagctagaaaggagaagagcaaagctgactaacaaccaagctagcctaatagaaaccgaacatggttacaacaaaacagttaaagctaactaactttcataactattttcagggccgatccaagcgatttaggagctttgggcaaaaaattaaaattaagctttttattagaaaaaaaattatcaattaatatttcataacttcaaatttttttttaaacaaatacttcataaattctaaaataggtaaaatttttaaaataatgtgcattgggaccacaagattttatcattttttttataagtgctaaatgcatatttactaacatttattatgtatactatacattataaaaaaaaatatttattatatatatttatataaagggatgataaaaaagggggccttttaatataaggagtcttgtgcaatagcccaagctgtatgcttgggccgaccctaattgttttaacatcatttgtattcttaacacttccccgcaaactgagaattgaagcatcttcaattcgaagtttgtttttgaatagagaaatctggttgcttaaaatttctttggttaaacaatcagctatttgatcaatggttgacacatattttacctcaacaagctgttgtagaactttctctcttacaaaatataaatcaagttcaatatgctttgttctagcatgaagaattggatttgcaatgagtaagactgtgctcaagttatcacaccacacgacaagaggtctaggaattacaatgtgcaactctgagagcaatgagtggagccaagtgacctctacaactgtaacgccctaatgattaggcccgctacagtgattttctaattgtagtgcacccctttgctaaccaaaggatttttttgaaaatcgtgataaattaaaattttgatttaactttaaacttttataaatatatacatattttcatacataaagtcggtcctatttttaaactttacatccaaattcaaaatatattctacaaacatgacacacatcgactacaaaatgaagcccaagtggtcctgagaccaaactcttcaggtcgcaccatctcgacatgtacaatcattcatgagctctagactcactgttgttcagctttggccttccctttacctatacataaaagcaatatttgtgagtcaacaaactcattaaaaaaagcatataacatacaatatattttcgacttgtgtttaggcgcccatacacctatccacaaggcttatcagataataaagaacgttcttaactaagatacgaccaccgtaccacatgcactacgta

SEQ ID NO: 120947 - DNA, 2344 bp, Cannabis sativa
accgtaaaaatgtaaaaaaaacaatctttgaacgtaaaaatgtaaatattttacaaaaaattgtgtcttatgtaattattcctatttttatttaaaccttaaaaatttataaacacactttattttaataataaaggaaatttaattttgtagacatattttaagagttaattggttaagaaaacaaatactatacctaattgttaaaaaacaacaagaatgagggttactttatatatgtggtgtgtatgtaacttatttttttttggatttcagttaatgaactttgttgttttaatttttttttgtattacaaataatgaaatatataaatatatatatttaaaaaaacacataaataattttaaaaataaaaaaatatatattagaaagtgtcataaaaagtatattatgttcataagaatgtgttagtaggtgcaatttatgatatttggctaaactaaaatttgtgtataaagaaaaaaaaaaattgtgagttgtatagattgtgttaggttattttttgttaatttagttgtcaaaatattatttaatttttattgttcaattaaagtaattttttgtgttaattcgtggctttgattgctctttttctttaaagaaaattttagtattttttgtttaggaaacttatcttacaagatgaggaattctgtttatggaaagttgcctattttttaaaaatttgacttttttttttctaattattaaaatcgattttgccttgtttatagaagattagataattttttatgacagaaaataaaatccaaaacgtgatcttagaattatttaaaaagtttcctatttcggccacatttgcctatgcagattccaatcttgtcgctacaaatcagagattattttagaattttttttacagttgtgaaaacgtgtatgtggttgtctttagggtttctatgatctataaataagacctagagagcacccaaacgttctcacctctttgaccttcatttttcatatttttatctttatgaggagagaattttttttgtgaaaacctacagtgttcaactagattttagtctttgtttattgttcttagaataggttgaagaacttcattgaacaagagaagggtcttcgggagaaagtaagcactcatatatcaaaagacgaaggaatttcgttgtttggtggtgtttagaaatcatggaaaagtaaatattaaaggattgcagcaaagctttagagggagtctaaacttatttaagtcaactgtattttataattgtttgaaactttactaattgatttcattctctgggtgtggtccggtggactaggtgtttttgaaagaacattgataccatgtataattctcttgtatcaagtttttatattctgcactgttaattttattctgttactacaaatctatgttcagcagtaataagtttccattttattaatgcagatcataacagttgtgttttaaattactggaatttaattaatatattggcatttgcaaaaacacaatttttcagatagtcgcattaaggagagcttcaaaagtagacttaatcttgtacaggaaaggatgttgtctaacatagataaaattgttcttaaaaatgtaaaagagttgtaagtttatctttttaaggagaatccccttgtggatgtaactagctcattttgattaataaaaattatatttcttgataaaaataaaatcaataaagcaaattaatttaaaagataattatgatagtgttgggttttgtgccttaaataaaattcattttaatataatcaaatttactaatcaataaaagatcataaatcattttatgttgcatggtttacatgatttatttcatgattatatgtttaatatataaattatattaaatccagaacatatagttattcttgattacagtgttttcaatgcagtggaatataatcatgaatatatgttcaaaagtttaagtcccatgatttgtcagtacactggatttagactgacatgataatcagcgctaatgtatacttacacattggataagtattatgtcatttccagggtattggcaaaatatgccagtatcagatgcatggagtatacattggattggaccgacattgaacctagataagatatcataaacttactattatatctttcgtagtcaatatcactggttgatcttgggtctatagattttaatcctgagatggataggttcgatctcaattgtattatttatattcttagagttgtttgttaaagtcgggtcggctgaacacttacatcttgggaacatgataattcaattgagtggtagcgcta

SEQ ID NO: 120948 - DNA, 1970 bp, Cannabis sativa
aacattgctgatgacaagaagaacttggagttcctctcatatttcggagaagctgaagatctcatttctaaattaataagtaaagatcctaaatcgaggtaacgctatcatcatttatcttttcaaacattaaatgttggaagcatattattcgaaaaatttacacaaaatagtgtttttgataaaattttaataaatttacgcttaaataatttttgtttgtattcattaaattctacatcaaaaataaaaagagtaatttgcggtatatatacttaagtttaacaaataaatacctaagtttaatttttgacagtaataatacttaaattatatttttaaattattcacatgtcattttcttattgatatatttaaactaatatttttttaaacaataaaaatttaacgagctgtaccaatcaggaattacgcgacaataacttacttaacaattaagaatcaagtacttacagaagtttcataattataacttaagtattattctattattttgtctaaattaatattatctatatataatttgccttacaaatgtaggccaactgcagccgaagtgttgctccatccaatgctatggaattccaatgtgagaaactcttttttatatgacataagcaatagattggtaaaattgggtaggaactctgaattttcaaaagcattggagagaattgccatatttgatgatttggatagaaagatcttgcttataccaattataacttatagttatgaattttcgaaaacattgaagacaatgggaggaacacttcaaagctacgatcttcgttcgaaaaggcttttgctaacgatagacgagagcaaaaatatttcacaagagcaactcgaaaataatttggcgaattacggttacgatcactttcgcgaatggaattttatagacttgttgcaatctctaggaactttgactcacatcaatattgaaggaaatattattgaggtatgtatgtcccttaatttaattattaagcaatattgttgttagagtactcacaataactaatgtaaaataatattttttaaaaaaatatatatatttaaaaactaaacaaaaaatattttacattttacattattagatgttgtaaactattattttatttttaattttttatttaaaatttactattttttactctatgtttatagaataataatacctaaacatgttttattaattattttagtaatttgtaaaatgataaattttaactaaacattacaaactaaaagtaaaaaagttaagactaattataaatcatcatttctattgtgaccaaaaaatctgtggctaaatacaaaaatcacaattttgttttgactaaatgtatttttaatcacactatttattgtgactaaaactaaattagtagtaacttgtatccatatactatgttttagtcacaagtagtttttttattgtaactaaatgttatatttagtcacaaaaatttatgttgtgattaaaaaaattgttgctaaaagtatttttatagtaaaagtattctgaagatataaagtatataaattgttagagcactcacaacaattaatgtaaaatagtatttttttaaaaatatatatatttaaataaccaaactaaaaatattttacgttagatgttgtacactgttattttattttaaatcttttatttaaaatttactattttttactctattagtaataatatttattactctaaacatgttgtattaattattttaatatttttatttcaaaaaatatattttagtatattgtaatgataaatgataagttttaagtaaacactacagaaaattttacttttagtcacaacaaaacttactaaaagtaaaaaaagttaagattaattataaatcatcattcctattgtgactaaaaagtttgtagttaaatgtattagtcacaaaaataacaat

SEQ ID NO: 120949 - DNA, 824 bp, Cannabis sativa
aatcactgaaatagtaaaattgaatgaaattaaacaaaagtccttaaatctaacaaactcaatagttcaagaagaattttcaacggtcaaaaaagttcaaaaggcatgatttgacacaggtcaaaatttgaggggtaaaaatcttaattagccttattaatttatataactcaaaactgaatctccaaatttcatttcattattcaaattcaacttttcttgttttttttctttttttcatcacaaaaacaataattactactactagtgttgcattcattctacaaaaatctctaccaattagtggttcatattctgatcattgtatcactgtcagtttcacatggaccttaccccaagtttttgtgtaaagatttatacttggaatcaattatttgtaaagcttttatttttattatctcagtcaaatttatgctcaaccatgatgaagattctttggtattttgacagggtccttgttcatggtaatgaagaataagataatattcctccccactcagtgacagaatcttagagcccatcctgagctttttcaagaaaagattataataaaatctgtcttcacatatagaaaggtaaaggttaattaatataattatcagacctaactagcttagataccctttgattcattttctaagcctactactactactattgctgacaagtgaaaaaataggttctttttgtgaaaagtaggtttgattggtatggttacatttcaccaacacacctataagaagatcttgttccaccatggcatataatttcaatggtgacataacacaagagtggccttcttc

SEQ ID NO: 120950 - DNA, 1903 bp, Cannabis sativa
aaatctaaaatttaattttatacatataaaaattttctttctcttattttttttacatttaaaataaaaaatattaaaaataaacacaaactttttacaaaagatgttattgtaatcaagtattgtcatacaggttcctacataaattttactatatataattacttattttgaaaaaaaattattatgtaattgtctaattaatttgttaattcatttcaacaaaaataatatatttaatttaacttttacatgtatcttatacatgtacactataaaacaaaaacaaactaaataaatttataaaaaaaatattaataaatataattaattataaacaatataaataagacaaaaacttaaaaaaacaaaaaaaataaataaataaaattacatataattaaacaaaaagtaaaaattctaattaaagtgaacaaatacatgtacatattaataaaaaaaaaattaattgaagtgccaaacaccgaaagtggtgacatgccgttattagggcattttcatatcagatctctcaacttttaatttaataaataatatgagaaatcagtatttatatatataaaaaatactaataacaattcattattgacaatataaataagataacaataaagaaagaactaaaaaaaattatatataattaaatagaatgttaaaattctaattaaatgaataaatatatgcacttattaataaggaattcgctaatgaatctatttttcatgatattataaaaattattcataaaaaaatcattgataaaaacacaaaaataattgaccagcaaaaaaaatagaacaaaagatcagttaataataataataataataataataataaaagaaaagaatagaaaaaaaaactattgttaccgatgacccaattaagacagacagagatataaggtaaaaaaataaaaaattaaataaaaaagataaaagtaaaaaaagattccaaaggtaaaagtaaaaaataaataaaaagataaaaaatcaaaatcaaaaaataaaatataaataaaaaaaatacaaaggtgaaaataaaaaataaaataaaatcacaaaagataaaaattagttttttttttttcgttttattttatagtggacatctattcttctattattgatgttattaatatttatatatttatataaatatagtagtgaggggacaattctttgactaaaataattcatttacactaaaaataaaaataatatcacaaagttatatgatagaattttttttttggaaaattattttatgtactttttttaatatttttattttaatttttatttttttacggtttaggttgttctagtaatttttttttttgataaattaattgaattgtattgcacaaactagctttttacaacctataagcaccccaataagggccaagaatctatatacattctgtatatattcggctaaaagctatacatgacatctatattttcattacaaagcaagaaaccaatctctatcaatgctcttaactttcctaggcatgaacataataattgaggtcttgagtgtccattttacttcaattattctgccaggatcaaccattgcttttttttttttccaaatcaaggcatttctagccttccacaggttgtataccaaggctgcaattgcagaagccatcacttgctttcgaaatttcgaaactcttcctgatccacctgtttagttgttgcagatcacatgtttgagcatgaacattcagccacttcttcacctccagctgacatagaccctacagttttacactaaaaaaaaagatgctggcatgtttcagattgcagttcgcataggcaacagataccactcacctgaactgttataaattattttaccaggatct

SEQ ID NO: 120951 - DNA, 2134 bp, Cannabis sativa
tcaacccttccaaacatggccgccgccgccgccgccacctaaggcaaagccgtcgacaacccaacctaatccacccgcatcactccagatgctagcgaaccaccgtgaccctccacagtcaatttttttttttttgtgcgttatacacagtactaaagtcggaaaggtgagtttggttgttgaactatagatgaagttgtctcaagctattaagaggcttaaagaaaattttgcagagcagcaacaaaaacaaatcacatattgttaacaaacaacattaaatcattttctcttttagacaaattggatacattaatgttccgcactttggcctttataaccaacttcacttgatgactaacggccactgtcgagccacaataaccttcaaagtagctgttattacaccgcaccaaataaatcacagcagccatcaaagccactgttagtttctccgcaacacttattggagttttcaaatccatgttcaacaaatcagccacctgctcaggctaattaacaggaccaaaccaacaagtaatttctgttatcactctctttgtgaaaatacacttgaagaagagatgggaatgagactcttcttctatcccacaaacaggacacaatatagaattgatgggtataaattttctaatcaaatctctagttagaagataactgttaacaacatgccaaaagataaatttatgttttgggatgatgaacctgtgccagaccattttatggtacttttgtccttttaaataaaagagagatagaaatacttcaccttatacctttcagacttgtcagcatcaagaagcgcttgcttatcaatgctatctctaagcttaattagttttttgaaataccaactagggttagcattaggattaagattcactaaccagaaatcaatattcttcaaatatagacaacattaacccatcgaacccataggctatctaaaaatggcccataaatactttgtcatcatggctatgatccacttcttccatattctcgaaaacccaaactgccatagtccttgggtaagcacacttgttcgcaagaactaaggtgtaacttgctacgatttccattgcttccccataaaaaataatgacacatcttatcaattgcaggtgtaattttttgaggaagaatgaagattcccatacaataattgcgcatgcccaataatattgagtgaatgagttgagcccgacccgtaaataaaagatgtctggtggcccaaccatgtaaactcttcttaatcttgttgagaataccctcacaatttgtagctttctatttagtaggaagaagattcacactcgatattttagagaaaaggaaccttcaactatcttagaaatttcgagcaattcctgtttttgatcacaactaacactaccaacgtaaattgaagacttcaccatattaacagttaacctcgtacaatcacaaaagtcatcaaaagtttcttggataattctcaaagaagacacattgtctccacagaagataactaggtcatctgcagttaacctaatatggttgcttggatagccaaatcaattacacttatatatttgtttgatccctaaagaagagaacgcgtgcatggtggataattttaggcctattagtctttgcaacttcgcctacaagatcatttcaaaaataatcgctaccagactcaaaagtgttattgacaagatggtctctcccctacaatctgctttcatcccaggaagatggattgcggaatcatctatcttaactcaagagttggttcacacgattaacacaaagaaaggcaaaggtggattgatggctattaaacttgatatgcataaggcttttgatagaatagaatggggcttccttgagaaagtccttcggtgcaatggtttcgacagtcaagttagcggtttaattatgatatgtgtctccacggtctcttactcggttctcctaaatggggtccctcaaaagaagctctatccaaagcgaggcctccgtcaaggggaccctctctcccctttcctattccttttatgccacgaggttttttccttaaaggttgtaacaaccttgctggtctctgatgttcagccttaatctgctg

SEQ ID NO: 120952 - DNA, 1428 bp, Cannabis sativa
  modified_base (1364)..(1364): a, c, t, g, unknown or other
actatccctctctttctgtctctcttcttccgtttttcaccattccagaccctccgcttaccccgtgcacaccagagtcgtgaaacccacatgcacatttgtcgcctgggcatcgagattcgtcgctacgggctcaatgttcaccaccccattcgttctctctttctctctcttgctctctcttccaagaatggtaactttctgtgtgggggaagaatggagagaatggttatgggtgaatttttggaaaattctaaatagtttataatgtcaaaagtagagttccttatattttagtttacaccagcatccacgttgattgaactattgacaattgcacaatcaacgtgaatgctagtgttcggggtatattagagggttctggggtgggtattctggtgtgaaatgataggggtaatgttgagtttgcttctagtcggtggtgttcgatgaatagctctctattagtggttgaactgtgtgcaattcaggatggcattcaggtgggattaaagaggaaccttcatgcgtttggagtggaatctgactgtagagaggcagtgcaactggtgctgaacaaagatcaaagttgtcatgaaactgatggtttgttgtttcagattcggcggctattgatgaattttgcagtcacgggactctcttttgtgtatcggaaagctaatagagcggcccatttgttagccaattatgctttagattgtaaagcgagtgttatgtggattggggtagtaccctcttgtgctaatcatgctattgtgcatgatttgccaaatccttgtaatgtttaatttgtattaatgcatcgagtttcaaaaaaaaaaagtacttcttaaaaaaataaataaataaataaaacttaagtaactgtgtataagtatactttctcggccaaaaggaaatgggagattttatttgcatcccaaaaatttataaataccctctatttcaataatttttattttacataaaatataaaaatttagttcctcattaaagttatgtttcttcatttttttttaattgcttagaaaatttatttacaaaaaaacctatctattcattaaatatataatacgatataccatagaaactaataaatcctaatcaattaatttagttctcgtaattatccaaaaaagaagaccaaaattattacaaaaatatagtaattttaacacggatttaaagtttttttatcttttataaaattatgaacggtttatttttaagctatttacactttttttttaatgttaatgctacatttacattatgttgtttttatattgttttttataaaaatataaataaaaaatagttttttacacttcaaaataattttnttttttacatttttacggaattagacatagaaacctctagtgcaactagcgctgcaaccacttt

SEQ ID NO: 120953 - DNA, 1418 bp, Cannabis sativa
cggtctcggcattcctgctgaaccgctcttccgtattattattattaattaaaaaaccaataacacaaatattaaatttaaaaattaaattgtaattaattaattatccttcattagtaaataatattaaaaaaatagagaaaattaaataaatttaaaataatgagagaatagagaagattaaatataatgcgtacaaaatgttacatgacacttacattgtatttttctttctagaagattattattattattattattattattaaataaaagaaaaagaatataaactcttgtgtattattaatttttattatttacttttagaataaaataaattcaaagaggaatagtttagaagataaataaattttttaagggtttttttatttttactttttaaatcatttttttttcatttttacaaaatttcatattaaaaccgctatagcaactaacgcggcaacttaaatcgcaaaaaagcaacccacatagaaattaccgaagaaaccaccagagaaactcaatccataaatttgaaaaaaaaaaaaagttaaaaaatagtatatgagataaaatcctttttttagtatattttattattagttttaaatgtgttaaattatattaaatggcaaatagatagtaaataattaaaatttattaagaaattaaaaagtaatgaatacacgagaatgcaaaaaattgaaaggaaactcatatacggtgccacattactactctaggaaattaaactgtactttgcgtgattgtctagattttgttaaaaaatatataaaaatatgtataaaatgtcacggtatcatttttttttatatataaatacgtctgtaaattatatttttatattattttgttgggattttctttttttttttttttgagagaaaagctattagtattaatgaacaagttcatttacaataatagcttcaatggggcttggacaaacaaccctccaaacaatatcagtatccactcgtaaggcatatctagctagaccatgagcagtagagttgacactccgatgaacataactaataaagataccgaggaaagaagacatctgatagataatatcattaactaagtcattgaatcgccataatgatgttgaggattattaatattttgagagtcagtgagagcatcactttcaatgagatgaattgggcagctaatgtgcttcaactaattaaggcagtaggagatggcttttgcttctatctatttgacagtaagattctccttaattggcaaagaaattgcagcaataacttgaccatacgagttgcgaacaacaccaccaattcccatcatttgattattaacatccaaagtagcatcaatattgagtttacacataccgtgaggggggggggggggctaccatggtt

SEQ ID NO: 120954 - DNA, 978 bp, Cannabis sativa
gagaaagagaaggtagagagaataatgggttaaaactttgggttaaaactttggggagttaagatgagttttgttatgttctaatgtcattttgattttattggataattttttttatctatgtttgtagtaacttcttgcttaagagaatggttggacacaaaaagggagtgaagaaacatatatttttattaatttagtttattatttatgtttagaatattattaaagactaaataaaaaataatctaattttctctaaatattaattattatatactgttgaaacggttttttgtcaactgatctaagaagatcgtaaaaataaagaggactgcgacaaattaatttgactaaataaaatcgcaataaataaatggacaccagggatttatagtagttcaccctcatgtcgcagtagtaataaggctatgtctacttttgtttttattaaatagatccaacacacagagttatgttctcaagagtgtgtagataaaaatataataatagacttctaggtaaaatctttattgagacttatgaacacaagactcatgggagactcaatattcacaaatttaatcaaagttggtggttgtaaggttcttagaaacaataaaccaataaaagtaagaaaagagaatggtccctgttcttggaaactgtgtatgtcaatggtgtttgagttgtagaggcttggtgtcgatagagtatggaagacttaggaaaaagatgaaggaatggaagtaatgttcttagcaaccatctaataagcaagcaaacagtctctatcctttaccctagcttattaccttctttatgtaagtattaatgtttgttaatgatccccacatgtcggggtgtcccattaacaaatcttgtatttcatcctcaataatgaataaaaaattacaaataaataaacatctacaaaaatctccttatttctaggccaaaattccacaaatattggga

SEQ ID NO: 120955 - DNA, 1202 bp, Cannabis sativa
tatatatatatcatttatattctttatctcaataataaaatgagatatgaattatttcaccttatataggaaacttttatcatcaattgtaagtaatatattgtgagcatgtaaaaaaatgtagctccaactgaccttcaggtatatttaacaacgccttaactctttctaaaacttaagaaaaagatggcataatgaaatattcattgtgaaaattttattttaatctgtaagtagactctttaagcttacacatatttaccactattagaaaaaaaatctttatagttgtcactatacattctcatctagttaactaattgagaattaatgaatgattggaacaaataaacaaagacaaaaatataccttcagaataagaagtgtcaatttttatgtaatttttcagagtatgctgtaatatttatggcactttgttagacttttttgaacttgaaatttttttgtttatttctttatttttctagatattttttttttttttgttttgcaaggttaaaaatgaacggttagatatacaatgttaaaagaattatagtgtgacatatataacttaccataaataatgttatcaattgatatagagtattgataatattgtgttacatgaaattagtttcactagctttttaaaaaattacaaaaaaatatcttaataatttgttgtattatttatgaacttaacatataacaatatattttaatttatgtttcttttaacttttttaaagataataagatcaaaaaaaaatatcacaacaatatatgtaatttaaatttgacttttcatcttctttattttaattaaataataaatataataataatatggtaaagaaagtatatagtgcacatatactaaatatttaaaaaaaattggataaataataataaatatatagaaaaattataattcaaaaactctcgcttatttattatttttcacttatttttattttgtatacaaaagtcatcattaacaataatataatttctttttttaaaaaaaattattttaagtgttacttttaactactttttgttaaaaaaaaacatatataaatatcttatctttaataataaactaatatatacctataaaaaaaaaatggtatataccattttagattctgtgttttgcaaaagttatcaattggaccctgtgttttgttaaatgacaa

SEQ ID NO: 120956 - DNA, 1180 bp, Cannabis sativa
  modified_base (1140)..(1141): a, c, t, g, unknown or other
atatatatatatgaaggccttgatctgaactgttatcaggcttcataccttttatgcatgatttaattatataaaacaaattgagattataatttagaaagcatacaaactgaaatagatctatcatacgcagttatgaaagactaagccctgttaaaagctatacaatggtgttcttaagagcatttcctttctcagtcgttgaaactcactgtaaaactttagtaatctctattactagttgtactgacgatctatctcaatatggtgctttgattgcccaaataaaaatggtactatctctctttccgaccattattcatcgtcatattagtggacagccaattgatgggttgcccgtaattaacttggccaagtttactactggattagatagtgtttttgtttggatcggtgattatcctattccttttgatcttgtaattgttattttggattaatcaaaaggaatcattttgttttcttttttttttttaaaaaaaaagatcatacactaaaatattagacaccaatattgtatttgctctgtattgggctcgtggagccgttgaaagcgaattattgggccttaagtttgtttcttacattttttttttttttttgaaaaaaggaaactttattcaaaaaaactagcaagatacatccaaacaaggcacaagctaacaacagacaaacgcggcagccactaaaccagcagctaccaagacaagcatgatttttgcaactatgagagggtttgcaaatcttgtttttaaggtatcaaccatatgctagacaacataaagtatcgagctttagtgttagcattctgccaacgctcaaacttttccttgattgccttggttgcattctcacttggttgctcgggagcttcttcggttaacacaaacaaggagtttacacttatgagagcaatattaatattctctttctatttgacaaagttagctccaaagagcttgttgtcagtcaacagtgatacaattgggttgttcatagtcatattggaaactataaatatcaataaatagaaatcaaataaggtccaatacaaaatcatacacattcagaaattattaagcgtttagcaagtaggaattgttgggaatattttaccannatctagatttactaataagtatgtgttgggttttatgcc

SEQ ID NO: 120957 - DNA, 938 bp, Cannabis sativa
attcatatagtaacgtttgtgaaggtgatgtgtttagattggccatgaaattcactgtaaaaactaaaggggaggatcataaaattgtgactcctaagatccctcctaagaaatggtttctcatgtctggtcaagtgaaagctagggatgaagaagatgccactgaaattaattctgaggaggaagaagcgcctgacgacttcaaaaaatttgtttcgtcaatttatgaagttagcgtcttcggttcttattatcagtaagtgagttttctataaactttcgtatgtttcttttttggttttttgtgtggggtttgttgcttgagaattgagatactgtggaatgtctcctgttttaattgtagtttttaattcatgctctttttattattctatggatgtatgctctagtttttctggtttgtttaataaaatagtttctcttttccaaaaaagaaaaaaaaaattgcactgattgtctcataaataaaaggcaaaaggtaattcttagagatttaactgcacaaagcaaatatgcaaatatttagtgcagctaaagaatcatatattcaatactcttctttctacaagtgttaattacttattgaaaaaatataattttttaatttaatagctaataataatagtttttgaccattaatttttttaaaaaatcaataataataatacttacaaaaaaataaataaataaacagtttttctttttttttttttaattacacatagtactaatcctaacttttatatatttgtaaatatttgtttaaataaatgtatgaaaattaatacacagtaagagcattgtttacacaacattgatacaccattaaccacatttcatatatatatacaattttttttaagattaatttctcattatacattttgtaacgccctaatgctaaggcacgctacagt

SEQ ID NO: 120958 - DNA, 1208 bp, Cannabis sativa
  modified_base (1147)..(1172): a, c, t, g, unknown or other
aaaattttaatctccgtttggctaacccataaaaatcgaatcttgaacttatttttttacctttgatatttttttttaaactttctaccaaacaggacccttgtctaaaaattttttttatctaaaagtgggataaaaagtctcaatatatcttttatcccattttttatttttgtttaactaaaaaagttgggagataaaaggtcccttttcttgtagtgatcatttttttaaagcatacatcatcaaagatttcgccacaaaggccaattaatacaagttctatcaaatttaacttatcaatcctctgaccaatctaacatgtataaaaaaatccaactagtcacatttacaaattatattcaacttttcctacagagagtcaaagttaagcataaaaataatcaaatctagcacacaatactaacaagttaaatcaaataagaaacaataaatggtgtttcaattcactaaagcttacttattactctagaaaaactgacataaaactactaaagataaaaaaactaaaaaagaaaaaattcagttcaccccccaaacttaaatatcacattgttcccaatgcgaaacaaaagaaatgagagaagagaacttacctggggtgcctcctaagagcgattttgttaacgtcatttagccggacactgatttcctttgaaaaacttcaacttggatcaagtccacctattgcatcctgtaaggccctcgtaccaaatgaataaaactgtcctccaatgctattaatgttgaaactatccacaagactcgattcaccttcacaacttatacacatcaatcttttcatacgacatcgaatagttcaaaatcgttctttgtactttcctttcttcttcttgacagttaattcttaacaagccttcactaattcaatcttacaataggtaggaatgtcaattggaacaaatacattgaaactcatttcttcatcttgaacttgcaatgttaattctcccttttgtacatctattaactctctccccatggttaagaatggtcttcccaaaatgatagaaatgttttcatcttcctccatgtcaagaattaagaaatcagtaggaaaaataaatttaccaactttcaccaaaactgttggaaattattttannnnnnnnnnnnnnnnnnnnnnnnnnatgttgtttaaacatcctaaataagaactttctaaa

SEQ ID NO: 120959 - DNA, 553 bp, Cannabis sativa
aactacaatgagtgtttggcctactagtgggggtgatgtttgttttgatttaatgaagtgtaatggaaatggtaatgtactggaataagaattgtaataaaaatagtatcatgatgtttggtaatttaactgtgaatattgtaattaaataaagtaagtgatatattgacaaaaatatttttaattttattatttttaatatttaaaatttaataaaagtaaataaaaggcaaaagagatatttttttaataatgtaatcattattacgttagttttttaatgtaatgagaattataatacagtgtaatgaccattacaatgataaaagtttacagtctaaaaattaaagtaaataatgtaatagtaataataattctattataatacacattatactaaactaaacatgtgattaatgtaaaagtttatgtatatatatattagaaatttggcttagtatgcttaaatgtaccacaaaattagaaatagtatatgcacttttaatattttttcctcccaaaaatacccttacatttcaaaaaaacttctctc

SEQ ID NO: 120960 - DNA, 874 bp, Cannabis sativa
ataactaataatattttttcttaagttttaatcgtatcactttcaaataaaatagaaaaaaattaacataaaatttagtatacgtgtctcgcacgtaattttttgctagtgtatataaatatagtaaaaataatgaaaatggaataaaactaatcgttgactcaatatatacaatatattatattaatcttagatacacttgattaagatgtttttaatttttaaatcttgcatttatatcattgatataatataatatattgtccgttgagaaaaagaagaaactgttataggaaagaaatcgtggtggaattgcaaaagaagaaagcaacaacaacagcaaataattataataatgaggaaggaaaattataagatttgtcatgtgtagaagaggcaaaaatgaaacaaaattcaaaatcaaatgtatagtcaaaattagttgattcaatattgtagaaattattctcaatcatgtccaaactccttgacatgtcatcaattgttttggcaatgaattctgacctcggattaggatccaaaaacttaggaagatcgtctttttcttgttttaatccatggaaaaggagcaaccatgattggtgcataatttcggattttgtggagtaatctgtaatagatcaaaactcttacatgcacctaagcgtaagtggacgtaccataagaaaagaattgtgggagacgaaagtagaaagttgtacatctcacatattttcctacgagaaatttgattttctatacttaaaaatgttaaaaaagaaaatttaaaccaatacattttacactacaaaaaatatgacacttttttcaaaaccccaaaaatacccccctctatctactttgtctatctctc

SEQ ID NO: 120961 - DNA, 1922 bp, Cannabis sativa
ggatctttcaaaggtgagttcctgtgttatgatttatatgtgtttaggctttttcggtaaagagtgtttgtttgtttgttttaatttttttttttatcgttttcaatccaataacagtataatcatccatacattatctatttaatgttgcaggagatgccattaaactatgtgtaggttgtgcaagctttgataagtttctagactttgagcaaagaagaataacttttcaagaacttgcatatgcataatatattggtaagctctcattattacagagaaaagatgaagagaaatcaaacttttttctttttgtaagaaattattgtactcaaaattgttttttcttattcttagctgcccaagaaaatattttgataaaagattagggattcttggtgagtatttcagttgagtttagtgcttatttatttccagtacagaattttgtgtgttcatttttttcaatataatttttttgcttttgtgattcttatgtagatgatgtagtgtaaaatcacacccctaaccattcattgaagtagttttgtagtattagggttatagtttgtaccatatgaggttgtaacctatacggctttgtacatactagaaatatttatggaatagatctctttttcataatattttctgcttcttttccttatgttttgtttatacagattctctaatatctattctcctttcttttgtttgattagagattacattttacagtttttacaggttatatggaaattaagtgattgatttactcatttgagaagtgttgaaaactgcttttgttgatgatttttaatgcaaaattgaaagggttgtattttcaatttgtattgaatttcaaactcttagcttatgttaaaagttttgcccttttagttgatttagcagaaatttaggttagggttgattttactggtttttaaatattccttccaactggtttttcttctttttgttttgtcattggttgaagattttgatctgttctattttttttttcttaataaatgattaatggaacatggatttttggctaggcggtcagtttaatatgaatatagattttttgctaatgtgactgacaggttgtcttaatgttttaaaagaatccccattttataattttgagagtggtttctaaatgctgaattatgtctcatgtcatctttatggtgaagaagctatttattttctgcaagttaaatgatattaaaacttttattggtattgccttttgttaatttgagcctggatgattgactttacttttatattgatatgcatgtaacttaattcactttaacctggtttgagtgaaaaaaaccagagcatgatgaacactgcttaagctggaagaaaaagtaaaattttacttaatagtgaaagttgaccaaaatagagagagcaaataaaaaaactatgaagtatgaattaggttatgtttaccaatctagaacttgagttgaggtctaacttagtagcactttggacataagtagaggtatgaataggtggcttggtgatgcagaatgacattacagcttcagtcattgttttgagtaagaaaatgtaactggatattgaagcttagatggatacgcttagattttggtttcatttgttgtgtgggaggggagatgtggatcaactaccacacatatattaattcaccattaattaagatatagatgaaacatgatcatggaccattcgattacattattatttactctgaaatccttatcacagacatttgtttcttatcatactttactcctggctgtgctaataatctccgtagtattactggctgttggctggaatcgaaataaaagcgtgtataaatacatatacatatatataatgtgtgtatatgtatatagggagagagttgtttt

SEQ ID NO: 120962 - DNA, 2880 bp, Cannabis sativa
ccagaccatggtatagcttgggggtaaatgttatccgcatgtgtgtccttgtgtactgagaaaataatccaacgactagggataagggaaattcaaatgagaatggccctgaggtgacacgcatctgaagcccagcctgtacagccggtatgatctgacacccataaaagccacatgaaaaatatgcaacctaccaatccagcgatgggaattcatccctacgaagatccatccaagacagcccatgcaaggagttggcctataaataccctagagggagcgcaaagaaggggaccttttttggattccgatctttctttcggaccttcaccttcagattgaagacttactcttcatcaagaaaacacattactgttacctaactattaactccagaatatttctactaagcttcctcttcttaagagaaacactgtggaaaggagtaaaagtctatcgtttttgtatttgtataaacaatcatcggccaaagtgcccaataaaatagactcgtggactaaggatagttaacgcctaaactacgtaataatctcttgtttattattttagtatttacgctttcattacttttttaagctctaaaaaatatctggttaccgaaaactcggtaaacaataacattatatataggatgtatatcagaataacaaacaagatagttaacaagaagagaaaaaagtgttaggctttaaaggaaataagattgatttttcactctcactctctctttctcctcacacacacgcctctctctttctctcctcatcaaacacggcacacattatagtgtgttgcgagttttgtgatcaaccctatttcatcatagtatctcatgagttcagaatgtaccgtgattgcataattatactcaccctgagtgttgaggtttgcttggaagattgtagtgtgaagtcttcagcaaagttcttgaattagatgttcgataataatacaaaaagatagcaaggatcccctgatagactacaagaagtattgtctctctatttattagtctagatttaatctatatacattatgttgagatccttgagcttatggttcatattggacaaaattattttttattaaatccgcttccgcttttctaactctgatatggactataaaaacaaacatgtgtgtctctctaaactatttacttaaacttattattcatctcaccaatcaaacgagttagtgttagccacttttcagcatcaacctagcctatgatactataatgcccaatgatccacaattactaaaatgatctctttatttgggtcaaactttatatagcaatacatacaaatacatatgagtccactctaattttaatccaacacaaaccccaataaaattatttctacatgcactcacattgtatgagctaaaatagctcaaaatgtaaaaatataaagaaatattgttaaaaatagactccatcaagtgagctaaattagctcaaaatttagctcatagagaagccttatttattctttaaatattattttaataatttctttctccttttctatttaatttttaatattttttggttacataataaaatataatatttaaatgatataaaaaaaaaataaagaagacattgtatgaagtaatgtgaaagtgtgaggtaaaataaagaaaataatattttggtaagatattttgaagaataaaatataaaagttgaactgagtgctttaatattatttttttgtccttatttatctttttttctctcaatagtataattttaatatttttttattatttttaaaagatttaattaataattattctttataaatataatatttaaataaagtaaaataaaatataaaaaaaaaattaatgtatagtgtaatatatatgaggtaaaataaaagaaataaaattttagtgaaataatctaaagaatagaataaaaaattattgggaatactcctaaaggggacgccaagctaaattgtacatttttcacgtctttgtttatattatttaacttgatcttgagaataatgaaagaaagaaagaaaaacaactttattattttgtagctactcatcactattcactacataactttataattagctagcatcaatgattcacaatatcattgaccactgttatcataataaaagtaaatagcagtataattactcaaaattttaaatttgtaagtgatataaatttaatatttatttttagtgacataagtacttaatgtttgtaaaattgtaattctttttaatttgattaatatagacttattgtcttaaataacgcatatataagttctaaattttaaattattgggtctagacataaacatgtagtatcaattacttctaaattttcttttaataaattcaaaatgcagtctgtactgaagaaactagaagaaaattacagttttacaaatacttagtacttatgctgctaaaaataaatatgagatttatgccgcttacaaactttaaaattttatgtatttatgccagtatctactctatagataaatttatatatatatatatattcatatcccatacgacaaggtgaatttactcaaagataatttgtggtcgaactccttaaatttttaagtttggtacgatctaatctctatactaaaaaaaattatggctaaagtccccaacttctacaattgttttggtcagcaatctttccattcactttggtatgttaagtgccaaagtggactgccatggtgtatagaagttacatgtgataaatttttattggtccacctaatattaataattaaaaattaaaattaaaatatttaaaaataaaaaaattagaaaaaaatttaaaaaaaaaata

SEQ ID NO: 120963 - DNA, 823 bp, Cannabis sativa
aataagtccccaataatttgaatatgtagttttgagaagggtaggtaaggtttcaactcaagctttttgttccttaattaagagagttttggcatcaaatattacttaattagacttgccaaccctccactctcttcttcatcttctttttattttctacttttattattgtaaggtataaactcttctttttacttcatttatttaaaaacgactaaataaaaactgataaatcactactaaaaaatcttatatttttactaaaaataaatataaaaaaaattataactataattataaatcattatttttatgttaataactaaaaagtcattaattataaaatcacaatttattgtgagtaaatgtatttttaatcactatatttattgcgactaaaattaaatattagtgacaatttgtattcaaatactatattttagtcacttgtaaattttttattgtgattaaaaaagtcacatttagttacaagaaaaattatattttaactaacattattacttaaatagtttttttagtaaatcatatattaatgtcaagaaattatatatataatataaataaatattaattttattgtgttactaattttttttgtaaggtaaaaagtggagggatttctttcatttaataattaagtttactgtttatcttttaagcacatattttgtcaatttatgtgttataaaattaatattgcgaataacatataaaagagaggcaccaaaaattgaacaataaaacttgaaaaaaaaaacatggcatactgggacagtgtggacaattcccagcctacataatt

SEQ ID NO: 120964 - DNA, 2450 bp, Cannabis sativa
agtttgtcagataattacaaaagattaaaatgtccttgaatttagatattattcagccattatgttgggcttttaaggcctaattcacagcccattagttgatgtccacatgtagaagagcacaagaaaccctacaaagccccccttagccagccatggtgcagtcccaaggctagccggccaactcctttgagggagctggtctgtcacttgatacccatttgagtgtcggggtctctgtttgcttaggtgctgacttggccttctttggtgagttgtactgccacgtgatgctgattttgtccacgtaagcgtaccacatcaggaagaaaaaaattggaataacgtacttaaatacttgcccaaagaggctgatcattaatgcctgaaccatgtaataaatatgtttgtctgttgtttaatatcttttattttcttaagctctatagaatcagttttcgaaaatctcgataaacacacgtaatattaattattaaaatatgataaaaatagatcaaaaaaagttaatttttaaaattaaatattatatttttttactttttcttctttttctttttctttttctttttctttttctctttcttcttctctgtccttttctcgaagcttcttctgtccaagtgaaactagggccaaaattgttggtgagttgcttgtccgtttaattttatttgctaaagttgaggttgtataattttttaatttatttatttgctaaagttgaggttgtataattttttaatttatttatttacatttatactaaatcaatcatgttgagggttacatggagttaacagccaagacaaaaaccttttttttcactgctgttgctatgtgcgatgcagaattttatgtaaaaattgatgatgatgttcatgttaatataggtaaacagaagtctcagttgatgatgttgctcattcataaactgttggttgttattgctgtttctaagtttttcccattcttaactccatttgaagttttgccttttattttcaaccgccacactatggggcaactcaagtttatgttggaggcccaaaatttgacctcgactttgatctactgcctccgaccaccaatgacccaggcagacatcttccttactcactttgttacacgcaggttgctgcccagtcgagagccttccctcttcttcgtcttcggtggttcaaggagcttcaatatactctaatttctaaaatctctcacactcgtgcctcctcctctctctctcagattcaatatttttcttcctctattttccttgaaatcaatgactaattgttggcgactttaaacggaacctccaccaaagatggggacaactacatcgtcatcgcgaaagagaaggtgaagaggatgatagtgttaaatctgatatctgccaacgatccatgtagatctatatctgtttctcatttattttgttggatctaatttgtcattgttttttgggtttctttgattttggctttaggtgttgatttttttatcttaaaaatgtaacagtaatggtggtagcaacagtgatatggcgatgttagtggtgatagtgaaagtggtgtggttgtggtagttgtttttagtggtattgtagtatggttgtggtggtgatggttattattattatattttttttattttctttactgatttggtggtgggtagtggcagtggtgatggaggtggaggtggtaatagagttagtgtttcaggataagaaaaaggaagaagaaaagaaaaaaaataaaaggaaaaaaaaaaaaatttctgattttggagtttaatttcaaaaaataatttaaaatatttttaattactttttataatattttaataattattgttacatggactaatgaaaatttgccatgtgtacagacagtccactatgacatttaattgaactttttagacggaggtgtaaagagcaaaacagaatgggggtttaataagttttgccgtcaaaatattgatttttgtggttaagtttttttttaaaaaataatatttaggtggttttgctgttaatatttctattaaaaattatttttattttattttttaaaaaaaattatgtcaaatttgtattaagcgagtcgtgtcgtgtttgacccgtttttatattgtgtcaagtagtatttacctttttttcgatctgcaactaatttttctgaccttaatctataaaattcatatcatatttgtatttgtgtgccatatccaaatttactttgtcaatgctatctaaactattgctcctctaaattttttaccattttttataaatctagtgcaagatacaataattttaggaatctatatttattatttttatatttttttatttctcttcttctattctctcttccactaattttttttaggagaattacctcatatactatttttttaatttt

SEQ ID NO: 120965 - DNA, 800 bp, Cannabis sativa
gaggtcataggttcgaacctaggatttttaagctattaagctactatataattgtaaaaacgctacaaaaaaaaaaaaattatttttattcaatcgtccatttggtatatttttcttttaggatccttttgtttaatttaacaatgatacttctataattttcttatttaatacttgaatggaatttaattgttataactatgcttattttattttttgaaaattgatagaaatttatttagaaaatgcttaaatggctggttttttatcagctttacaaaaaacaaatgtgtaattttggaaaaagcagagtcatatgagagggcaaagtttgtgagtcactcttgactctagagtctaaattgaataaagcccaatcgttgctcggtcccatttacatgggccatgagccctgaaataattgggctgtagattgtgaagcccaaatccatgcaatacgcaacttcaacttcatgtttctcttttttgaaacataacgtcttatttcttatggtataattacataaaacaactacttttgtaaaatttttaagttaatttttttttttttatatttttaccgtattttataaaaatacaagaaaataataaaaaaaactacataatagtaataagaaaataacattaaaacaacataaaaaataatatataaataataaaaaatcaaaaacaaaataacaaaaatagaatataaaaaggggtaagttgaaaaatgcctcttttattaatcaattgatcaaatttgcttctaattttatatttatttgaaacatacctct

SEQ ID NO: 120966 - DNA, 4547 bp, Cannabis sativa
  modified_base (497)..(501): a, c, t, g, unknown or other
  modified_base (1383)..(1384): a, c, t, g, unknown or other
agttctatggtcataccgcacaaccgagaaaatagcaaccggacagactccatttgccatgacatatggatatgaagctatcctgcccgtagaactcaaactgccatcccacagaatattagcgtataaccaagaagttaatcatgtacttcttttagaatcacttgatgaagttgaagaaaaacgaatcgcgacaaacttgaaactgatagcccatcagcaaaaggtagcttggtattttaacaaacaagtgagggcacggaaattctttgtgggagatatggtcctaagaagagtatttttgaactccaatgacagtacggcagatgtgctcggaccaaactaggaagggccatatcagttagtcaaaaatctagagtcaggagcatacaaattgggtaagtatgacgaaaagatgcaacttgttctagtaccaaggtattggaacggggaacacttaagaaaatactaccagtaaaagtaccaggtcggatgannnnntcaagtacaaaataaaagaacatttgctcttaagtgaatggccttctgggcggaccacacccaacgttttggataaaattatcaagtatttaggtcagatgaccacctttgaaagtacgattttctattttctgcaatttgttttgtttatgctaagctaaagatcagatcaacataatagctttgatgtaagttactacggtaacagacatatttccaaccaataaatgaataaagatgtttatttaaattcaaatggaatcgagttatatagcatgttacaaatttaccatccagtgcgtacaaaaggtctggtcgtacccaaatctccgaacaaaaaaaaatacttatgaaaaccaagtgaccaagagtcataactctgctcggtcacttggggggacctatacttgtacaaaccatttggtaaaaaaaaacaaaacaaacacaattgcacaataattacaaacaaaggatgaaattcattaagaataacaaaagcattcaatcccgagattaaaggatgcccggtcagccagttgttcaaaaaataaaaaatatattctaagtttaaagaccggttggccagtcaccttgtcttaaaaatagggctattggcaaaacagacataaaaaaaagatagtaaaaggaaggcaattaaacagcaggagtcctaggatctttgtatgggtcaagtggctttgaaggggctggaggatcatcattctgggcgaaaggagcctcaacactctgattggtaagagaggcgcaagtggtcgcctcgggatccccgtaggccacctgagcaacgcagtagtcgagaaacatgtctttggaatcgcccaagtaatcaaagttttccttgggattggccttccaaaagtnntaaaaaatctcgagaccagctatctctaaggcatttaccttctccccgagcctcaccacctcggacttttagttcttaacctcagcatcgagttcctcctccttagccttcttctcctcctccaacctacagagaagagtccggaggccctctctttcatcctgaagactgttaacgtcccgagacaaagaatatcagcctcgagctgctccgttgacggcgtctcctgcagttctttggtcagctctgcaactttggtctcagccgcagaagtttcttattgacctctctcagctcaattcgcacaaccccaagttgaacccgtgcatcctcgacatcctttttggccaagtccactttcgtttgcattgtgttggaattggcaatgttcttagcagtagccaacttagctcgggaataggcgtaggccatcttcaaaccagtctgcgcggataaaaggcattaaaatccgaactaggcaaagaggaataaaagaaaaacgtcagaaaggacttacccgcgaaagctctttcaagactcctcccatggccagctccaaagacaagtcactatccgccccaaccaactgttcgttcacatctgggaccaaccagctcacatagtggttgagcatgtctctacctctttggtctccgtgtgaaatattaaaggtggggccggagccttaacttgttcaggtccgcttctgaccggctcggatccacctttcgcctactcgggtccatgtgaactccctcctcaagaacacttggacttagtaactttcgaggtaggagggtcaacagcagcttgttcctcggagagatcaatgacctctccagctggtgttttctctttcaacggagtctcactgtccttagacttcttggtcgaaggggataagcccgagcttctccccactatcttcttcaaagcctcgatcatcttttgagatatttctggacggaataaaaacaatacagttagaagaaggtatagaatatatgaaggcatgaaaatcaagaaaaataaatgtaagatgacgtacttcgctggtaggagaatctgcccgaacaagcacagatggggtgtcgtcatccaaagagtcttcttgctcctccaggatggattttcccttccttctacaggggttgatggtcgagtaggtagaccaggctctctaatccggagagtatgttcgatgggcctatgcccggtcaggagggttttctttttcttgagcagcctctcctgctcagaatattcttgagcttccttctcatgttcagaatattcctgagcatactgcttgcctcttgcatcacccttcaatttagactcacacttaagttgagtgagctccttctcttgctctactctatcagccccgccacccctagacttcttcttcatccccttcacaggtagtctactgaataaagcttatacttcacaaagttgtcctccgaggtcaacaaagtgatatttcgagcagcatctggcagttggagaatctcctgagccctgtccctaagtgccaacgtgaggagtggaaggctgtatactgggatcttttgagtataggtggtatccatgccttccacgaagtaatactcgtcaacaaaacccccgatcttgctaacatccttgtcgacagtgcccgtccgccacttgaagtctggctgagaaaagtagaagtaccccgacctgctctgcttaggggtagacttcaagtcaaaaaaccaattgacctcatgtggggacgatacacctcatccttgaatagcgtaaaggatgaacagggaagacaagtacttaatgccctcaggagtgaacttggtcagacaaaggagaaaataatctgcaaccctcttgaagtacgagtgcaaaggcatcatcgccccttacttagtgtgagcacccaaccaagcacaaaaccctttctgtgggttagtttcccggtgattcgaagaggggacgtaacactcaagtccgcccaagtacccagccttatccaaggccctcatacgtgccttgcttatcttggacagagggccatctggaccctagagcacttcgcctcctatggggaacttcctcagtaagctcctcagtgacatagtcttccccttcgactaagacatcaccctccgcggatatcggctccttagcctcgttatattctcaaaaatttggaggttcagccacatcttctacctcaacttcagaaggactatcaagatgaacatcgtcctgctcctctatatcctggacctcaatgtccccctcatgatcctcctcctccacagtgggcagatcctactcgacacttggcaacatggcaagctgggccacatgagggtcagatgcattaactttccacatcgtctgccttgtgcgagacatcatccttctcctagacagatactgatgtgtgtgtcgtgcaacaatatcggttgggacaactatagggataattaccagagcttggatggcccacgggaagagtgtcataaacacctggttggagaatatacgcccaattagacgaaagataatgtctccatcccttcttcaatttctaaatgaagcgaccgtacccttctcatacgatctgctcggagtaagtgtggtgttgcacttcaggttgaggagtaggagaacgatcactactcacttccaaatcttcaaagcttgagttagaaagtccgtcactcgaagaggacaggctagcacgaacacgaggttgatcctcgtacaggagttgaagcaaattctggtcaattcggtgttcgcctcccaaaaacacaccagggttcatctacaaaagataacacgcgagatcagtgtttggccaggatatcgaacagtaaacaggaaaatatgccgaccaggactactcaacatattaaaaggatgaaaaacgtacaaaaattaactcataacccaagaatttttaattttttgggttaaaggttaaattttacgaagctttgaatgagcaaggtgaaaaacgaacattgggagattagaggcagaaggttataagcaatgaagccgtacgaactattatagagaaaactacaaagtttcgagcctagattttctatgtatcttctacaacaagtcaagaacaaatgtattttctgttgggttttgtgcc

SEQ ID NO: 120967 - DNA, 1297 bp, Cannabis sativa
tgccagcgaggcatcctgctcggaatgttgatccgaccaagtgctctaagttgatgccacgtgtcaccattcttgtgatgccacgttagagtgccaatttttggataacacgctcaaacccggtattctatttattgccactatttatcccaccaagaaaaaggttctagacttacccatgtgatttaaatggccattcatcgcatttttcgtcatcgccgagcaaaaatcataaaaatggcatatttcatatataatacaaataatacatctagagtttaataaaatctcttgaattgaaaaattatcactctaatacccaaatctaaaaatgggacccacaattaaataaattcataaacatttatagaaatatcaataattaacgctaattgcatttactaattatattctaaaataaggtcattacatgttaacccagaaactttcccttgtgacgtggacatcaatgtttgacatgtggaaagaaggatgacgtaacggagttgagtagacatgattcatagcagtcgacctgggaggggactctagcctgcgcctaagttgattttgggagctccaagatggacgttcagacttcaataacttatatccaactcaatatcttttagtattttgtaccatgaagacatggagcaacctaagtaaagcctcgagagctaaaattacacaaacttgcaactcgaaagccaacatgggcacctagggttttgcctagcgcctaagttaacattcctaactagggttttggtttttgggagcgtcttagtgcaaaagggtcaaaacatgcattgggacattaactataaataccacaaacatatttgaggcatcagaatcgaagcaagttcattttttagcaccctagtgtccaggttgacaatctgtcaatctggtcgccttctgaaaattagaccgacagttgattttttgcaacttccttgtcttcataaaaaattgagaaataggtcctttcagggaagaaacaacacttcttgggtgccaaaagcaaggtccggcccctaggttgacacctggggctagcctagcacccacgttgacattttattaacctgggtcgattttgatgatgttttctgagaatcttctctgttttcagaaaatattgagattcaactatttctaaggaccaaacgaaacttttgaagggacataactgttgggttttgtaccctaaagaaaacccatttcaacataatcagatttactaattaataaaagatcagaaatcgcttttatatggcatggttcacat

SEQ ID NO: 120968 - DNA, 553 bp, Cannabis sativa
actctcccagcatcatctaatcacgcatgaagctcaaaggtggttacgaacccatagaaatagcaaatattaccgtatgaatcagacctcaaccactcccgaaaattaagagaatagttgagatattttagcactaaggtcgcgtctcctgaagtgagatgcaccaacccttcccctatataaggggtcacacctgacctgggaaggggatccaaaaattatcactcaaagagcagaaaattttccattaattgttacttcttgctttcaagaacttgttattgactttgcaactcaaattagtaaaatacaaggggagtaaactataccaatacttggggctagagctgtacataaactatcgtaaactgtccaacccaaacaacccgcccaaactaaacagagataacccgacgaaaaatgtaaattgaaagacccggcaaaaatataacttgccaaatctttatattggcgggctaaaaataatactgattcgcccaattaacctgaactaacccgaccaacctgattaagaaggttttttttttttttt

SEQ ID NO: 120969 - DNA, 1840 bp, Cannabis sativa
tagcaaagtagaggagatattattttattcaatcccaaagtgttctatcatcttattttatgtaagatggtcccactgcctcagttgtattgacacaatcgataaggtcaataccattgatgttcctagacagaaagtcacagtatctcattgtagtgggagggtttcaaggaacccaccctgttattgcttggaagacacttgtgataaaattgcattgttagtttaaaagcaatgggtagtcttaataaggaactaagaatagaactatggttaaaaccattcacgtggagtagccaaaagttttctattacaaggacaagaatggaaatttgataaaacatatattcagtggagttaagcaacttcctgatcttaatttcctaggtttgagattatttgaacaaacggcttgtggtatacttagtaatttaattacccaacaatttcaaccattcataaaagataaaggccaaggaaagaattccttaagcatcaacaacgagaggtcccatgtatgctctggtatgcattagaccaaatacctggtgttaagtgggagttatgagtaggtatcagtataatccaagaaaggaatattgaaagacaatcaaataaatattaagattaagcaggacctatatgttagtctataaggtgatgcttttcggaaccatttaggctgcaccgactcagatttcaagattttctttaatgctagaaagtctaaattggagatggtgattactctaggggtggagcaatgatttttggaaaaatgtaaaaacctatctagagtctctaactctactagtgagattgaatatcaaagtggcccagaatgctactagagataattattctcagcctctatagaaagttctatacatttttagcattattctaatcatggattaactactattgttacttcctgataacacatatatagtttccaaatagtaaacaatccaataccctaagaggagtaaacatatagataggaatgtcacactatcaaggattttgtgactaaggaggatgtgatggtggagaaggttgatactgaatacaacctgtcagatcctattacaaagataataatacataatacccttattttggacattagaagataagattaattgaaatgaactttatttttatattagtgcaagtgggaatttgttgggattttatgccctaaataaaacccaatttaatttaatcttatttactaattaataaaagatctaaaataattttaatgttgcatggttcacatgagtactttcatgattatatgtttaatatataaattatattacactcaaaaatatagttattcatggttatagtgttgtttacacagtggaaaataatcatggttatatgcttcaaatgatcaagtcccacaatttatcagtgtactagatttacactgacatgataatcaatgatatggtttacttacacttgtataagtggaatgttctttccaggatattagcaaagtaaatgtgtatcagatgtatggactatacatcagacatgacaaatatttgcagtggaaaagtaccataaactcactattatgtcttttctaaatcaatgtcacttagttaatcttacgtcaattgttgatctcaattctgatgagagatggtggttaagttcttgctttaattgtactatatgggttctttaacttgtttgttatcagcttaccagtaggactagcccatacttacatcttgggaattcggtagtgcaattgagtgggagcattaatcataaatatggaatatataacttctataactattagaagtgaaatgat

SEQ ID NO: 120970 - DNA, 2491 bp, Cannabis sativa
  modified_base (45)..(63): a, c, t, g, unknown or other
taaacccttatgtgtttatttctttgttttagaattcatattagnnnnnnnnnnnnnnnnnnntgttagtaaatctagatcccagtaaaatattttcgacagaacttggactggcaacgacgaaggaacaacaacaagaaatcaatgatttatagaattttctcaaaagagttatttgggttgacatggcaagtggcaaaagtaacccaatgaagggaaaatgatggcttttataggccagaaagggtgcaaggcagctgtgatcagacaccatcgtacggtgggaattggaatcgttcgcgttctatgatccaattgatgggatgaatgggggtaacaaggagaaagggcagttaaaatcgtttgagcacctctctaacaccaggattaaatgcgttggtctatcaattgatgggaagcaaatcgttgcctgcaaagagaaataaatattaatgatgacagtcataaatacagcccacgcacctagggcacgtgccactatatcaataacctaaccggaggcctcatacaagcctcatttacccttcactaaatgagacttggagggtaaatgttgcctcagatttttcccaaaatacatggcagcggccgagggtgacacgtggacctaaaggagcatccactcacgaaaatcaattaagtcttgggcaggaaagtgcatctcatggagtgagcctcccggaggagagcataagacacgcctttactctttgggaggctagaactataacaaggcatctccgggaaggaaagagattgttcgaacagtcacttcgcatttgatgcggcatggggggaaacgtatcagaacctccataaaaggatttgacagatggcgtaagcccctttctacggcgattacaccataatcgacgagtttagtgacggctacattatgaggactcacatcaatcaagggaggataaaagattatatccacctaatccctaagatacttacagtataggtcatgtatttcctattttgtatctggtagcaatttgtgcccctaagaggctaacacaaaaagacaagtgatccctttctagggatccccccaaaaaatactatatgtaccctatagacagaatggaaatggagtcgatcgattaattaaggaatcgaaagaagtaaagaagagagagagagagagcgattcaccaagaacattctctgtaaaaatactctcataaataacaaagacttgtggactaagactcattaatgccccaaccacgtaaaaatcacctacattaaactttctacagctcttctcattctactacttaatttcttgccgaaaacctcggtcaacaacttctaataacctttctacattgtttccaatgagtagaatgtcgtcaacataaagaaataggaatactactacattacctttaatgtatttgtatccacaggtttcatcttcgttttgttcgaatccatactctttaatagtcttattaaaggtgatattctaagatctaaaggcttgcttcaatctataaatggatttagggagcttgcatacctttcaatcttcccttggtagcacatacccttctggctgtcccacataaataatttcgtcaagatttctatttagaaaagcagtcttgacatccatttgctatatctcataatcataagtggtagctatggaaagaagaatgaaaatggatttaagcatcaccacaggagagaaggttttgtcatagacgacgccttcttatagtgtgtattctttggctaaaagcctagctttaaaggtctctaccttcccttcaacatttctattcttcttaaaatatgggtgtaaaatatgggtgtcgtcgttgcagattatgttattttaatggtgaaccagtgaaccctggatctttatgcccgtattgcaagtctcaccgacacaataaagacttttatatttttatgttatgattgtttagtggtcagttttaatgtttgtttagtctttacttatgtttaaaaaattttacttggttcctgtcaattgtttaaaagttttcatttttttgtcttaaaatcgacaatatatcgacatattgtcgtcaaacagaagtcgactaaatgttgacataatatcgacaaactgttgatacattgccaaataaataaaattatttaaataactttttcgacaatggtcatccctgaccttccttcacatattatcgacattgcatcgatattctatcgacaaacgattgataacctctggaaatcccagattctgacaaaaaattagatctatcagatctaccatttcaaaccaaaaaataccagtttcaacaaataccacatatataacgaaaggaaattacatattattactaatgtctaacaaaatacttaaaatacaacttacccattataatggtgaatgattcttgagtgattggggggtgttgtctggttttccaccacctagagagagagagagagagag

SEQ ID NO: 120971 - DNA, 844 bp, Cannabis sativa
agatctaagatcctggtaaaataaattccaacaataatatcttataactacccaacttctctttagtcttatcctttagacatataatcttgatgtgtaaggtttcatgtcgctcaatatgagtttttctccttgttcatattaaagttgttcaaaaaaattaattaaccgtccaactcgaataaaccgcctaaactaaaccgaataaaccaacaaaaattaaaactcgaataacctgaccaaataacctgaataaaccaaataaaccgacttacatatttttactaaatttttttataacataatatataaattacgtttaatagttaaattattttacatttaaagtttgtattttgtaatgtttaatctgaaatttagaatttatagttgataattttgattgtatttgaatattgaagttgaaatttagaatttatttttttattctattttttaaaaagatttgtttaatactttaatatttattcaattcatatttgttttttcaacattaatttaaactataactattttaatcttgaaaggaatatattatatatttaattttttaaatcaattatttgaacaccaaaaactaacaacaatgaaaaaaaaaataaaaaatatggatcggtttaaacggtttaacccaacaaaactgacgaaaatcattgggcgggttacacttttttatttttcattggacgggttacaattagatatttgcaacgcgacatttatattgggttggtaacacactataacccaaaactaaccgaccgacgtacaagttggggctttatgccctaaataaaatccatttcaatctaatctgatttgt

SEQ ID NO: 120972 - DNA, 1038 bp, Cannabis sativa
ataggttttaggaaaagttttgactggaacaagactattttgactaggtatatctgggccttaactaagaagtctgatgtataatgggttaaatgggttagctctttacttgaaaagggaggatttctggacctatcattttaaataagactcgagctggtactagaaaaaactcgataatttaagaaaggtgtttaataagacctcagttgctgctgctgaaatgcatgataaattcaacttaataagcttatataatagctctctggtccaatctcagatctcttatcaccaacagtttactagagacctcttagctaggaaaatgttaacatggtctctattctatatcatgtttacgagttaatacaggagattcatgagtattcatttttcacttgtttcttgtccaaacagattattaatatgattttggcctggtttggtttcatggcttggccagcgaattagaatagctggatcacttggctaaataggaaaaggaaacatttgattgggagcattatcatagagtgacaacaactactgtttataatatatgactcaatcgacacaattgattttgaaagaagcttgaagttattttagcatattgtgaaggatagtaagttaatgatttattttaaaataatgaatataatttggaaagaagcctccatccggagatgaatttttataacagagttatttgtaagtaattttaaatttgttttggtgaaagctgtttgtaggtgtggagtggtgttgttttgtaagttttcttgtaattattaaagttttttttttcttgataaaaaaaatcttccaagataaacaagttatatatattattatttttatttgaacttttattggttttactcaattaattagatctgaaagaatcaatcaaatttcatcactttccatcatgtattaactaatacttagggtgtgtttggaagtaattgtgtaattactaggtagggtagttactagggtagtaattacacattttagtaattacactatatttta

SEQ ID NO: 120973 - DNA, 1182 bp, Cannabis sativa
ttccgtaaaaattcaaaaaaaaaaaaaaaaaactactttaaagtgtaaaaataaaaaagctccttttatatttgacctagatatactacaatatatatggtataaattaacctacaaaatcaaagaaagtatctaattttttgttttatcaaaagaataaataaaaattattaaataaataaataaataaaatttaaaattgaaaataatattaattagtggcaaagtgaataaaaatataatattaatgtggtacatatatttcacttagactatcttcaataaatagtgtatatagtatagtataaatctctccacaataggggagatgaaaacaattgtaataccaccaatttatagtgagcacaccacatttagtgaaactgcatctattttttttagttaattattattatatattatgatagaataaataactattttccctcattaattttgtacttactattaaagtgtgcccttgaattgtttgttaaaaatttatgctgaactttttgaacgttggtaattattgggactttcattacaaaatcttcattttctttccattaaaaacatgttgatgtatcatgacacacttgacactaatcactactacacacactaatgtattcaaccatgttattgattatgtggcctttttttttttataaaaaaattagacgttaattgaaataaaaaataaattaaaatattttataatgaattaaattaccaaagtgcatttataaaaataaaaaatgaaggaacgactttcctagatttgaattttgggcactttcttcatgcatgcatcaaagaggtcttgaaagggtcatgactttttgacccttcaacatgtctccaatggagacccaagctatggtcggaatttccatgagtaataatgaagtcgtggatcctgccattgctggagttgtgagggaatatatatagcaagtttggctttttaggttttaggttttagatatatgttcttatatatgactcaactcttatatgttttttaatatttctttcaagataggtgtggatcgaaaagtccgctagaaatatggtcctgataccatgttgaaaattatggagttccatctcaaaatcaattgacaatgagtggagtatcccatatttttatatatagctaggggtgttcatccgatc

SEQ ID NO: 120974 - DNA, 1573 bp, Cannabis sativa
gtaatgggttttatttagggcacaaaacccaacatttaagacctagaacgggttaggtcaagtgattaactgttctttatattgttgtgacataggccccaagatcgttgatcgtctccatttaggtcgaccgacatgcctaaatcaaaacttgaggtaagaaaagtacatacatatcacatagcatgttaagatacaattattatcgttatgacttgattatgattgaggtaatagaacggtaagtggattaaggtcatgacatcaagtgaaactattgttatgtttcctatttgttaattatcttattagacaatgacagagatatgtggatgtcaggttagggtatcggctttgccttattaggcaaggtgatatatagactctgggttagggtatccactttgccttataggtgatgagatatatggatgtcgggttagggtatcaactttgccttattaggcaatgagatatatagatgccggagtagggcatcggcattgccttattaggtaatgaaatatgtggatgtcgggttagggcatcagggttgtcttattaggcaacaacagaaatgtttactttatgaagtaacaaatatgacttgtcttattatacatgtacttgggtattactgtttaataatgttattattttgatttagatatctaatcgctatttactttcattgtttacttttcttgctgattctttgttactcacgggtgctttgtggtgcaagtaagggcaaggggaaactagggcagccatgagacgacaatcttttccgaaaaatgtacatatcgacttatcaggcttgtatagtcaagttgttaggatttgttttgggttgtacctaatgtgtatattgacttattgttgtatatagccctatttgtaaaacttttataacagggtatctccgaaataattttttagcgatatcatcctgttcattgctatggttttatgttagtgaaatttttagcattatcacagattttattaaataattaatctagtattattaaactatgtttaaaaattacacacatggagtccctaggaattaaggtgttacaggaagaacccagaagctctaccatgaaagtgaagagtaagagattcggagggtgaagatcaatgaactactctacactcaaacatacttttgtgatgaacgagatgcttggtgtaggtacttcactcgaggtcctgacaaccaaccatacaaatactttccatgggtgcatggagacgtgttaaacttgaacaatcaattcaactcccccttcacatgccactctaaggaagactatttagaagaaaatagtcattaaagtactacgagcagctactcacgaagcaaacgcttgagagacgactctgacatcatacgggataagaccccacaatttccagcaaggccacacgaccaggaaacaaccacaaggcctaggtcgatcaatgcctttaatcgacttggaaatggccaactgatacaaacatcaccacacatgatgtgttgttaagctatttttagcctaagttttgggtcacattttatagt

SEQ ID NO: 120975 - DNA, 814 bp, Cannabis sativa
ggcctgaatcctagttcaatacacgagataaggactcaggcttccaacactataaccgttgctccagtagagattccttgactagtttataatgtctcgagttagttttttcgatgtaacttcaggagttatagttacatcataatggcagagatccctttcagaaaccttaactagaaagtgatttgcattaactacacactttataccaaccgtaccataaccaagcctaattagaaacctagcaaatttcaacaacattggatgaaaactcacagttgctgccaccacgagatcttgcaatgtcagatatgatcagcacgtctcaacaaaaaggcagtagaagtagtcgatgacgatggacctgatactagcaccgacataggaacagtataagttgacgattacgataatgaacttggcttgacaggcacgttattttcggtagccctctacaggttacttgctgtcaacataacttttcttgactttaccgccaggcccaagcactctctcacattcaccttctcaacacggttgcacccctatgggcgatagggtgcccaagcttgtaagcaccagtggcctcttgcacctccggaaggttggccgaccaaatctgagtttttccaaatacgcattggtattgtgagaactttaagactgtttacatccaccttcccactctcctcgcctggatggggatgtaggccttcattcttgacaacgcccttggccagcaagccttcgaatttggccagatcttagtgggtagtaggggtggtcattggatcacatccaatatttttaggcc

SEQ ID NO: 120976 - DNA, 1355 bp, Cannabis sativa
aacagaaagattgtccttccacaaaagtaaaagtccccccccccccaaaaaaaaatacttcctagggacctctaaaccatggtcaaaacccaaagcaactcgaactcgatcaatagccttagcaagcaaccgagtttccatcaaaaaaaccacctcaggatgctgctctttcaccatcagggagagtctctagaatgcacgcgtaactccctaatccacgtgcattccagcttaaaagactcattttttttgggcgggtgtgcatagcatcacccgcctgttcatcttgagcagtatcagcagaagactcatcctccctagcacctgatcgagcacacttaagttgagacctcacagaacttccaactacagcaaagtgaggttggaatgaaggcctcttaacaccagaagcagaggccaaacctttcccacgcacatcaggatcaggttgatcccgagagaggttgatatccatgctagcattatcagcaggggtagaggacaaagcatcctttggactaacatggctagcaatctcctgggaagagaagccagtagacaaggcagcagtaaggatagattggctaacagccacaatacacagagtcaactgagtaagaagtaaaagccgatggtcttaatgaaatatcgaaggtgggcctggtgtagggtgaggcaacatttgagagattaggatttaatggtgtaggcatcatgacaaccgcattagatggttgaggagcaaagggtccagtaaaattatcattgagattcagaaaggatggaaagttgatggcttgactagtaaagttttggggaggtaagttgagattaacccgttggtagttcatcagagtaatggtaggaggatgagggtattggaaagtctgagatttgtcaatgagtttttccttacctttaaggagaatagtgtaagggcacaaaggttcagagaaaagttcatcacatttttgaagaaaagcaatacaatatctcttagtgtgatctagcttcccacagaaaatacagaaatctgaaagtctttcatacttaaaatctaaccatttgacaaactctctgcccatacgaataaatttgatattcattcccctccttataggcagattgacatccagaaggatgtgaatgcgcatataaggaccagtgtcctccttaatgctgtccttatcaatctcaataagatcacccacttccatagcaatgaacctagctaaatcatgagacttgcacataaatgggattccatacacttgaacccaaaatggaacatagtgcatgttatcaggagtaagagggaaagtgctatcagtagcagcaaaaatagttatgctctg

SEQ ID NO: 120977 - DNA, 1333 bp, Cannabis sativa
taattaaaaaaataacagtaaaagtatcttattttatgatttggttgcatttaaaaaaaattgtttttcaattttctttaaaattaagtttgggatgagttgaattatgagtgtgattaatgtctagtgatagaatttgctattcactaattaattgatatagtctatatatatatatgtaagcgtatattatactcatatgtatagcacttattccaacaaaataaataataaaaaacatagaaacttttatagagctcaacaacaattgttctcatcatcattttaatcaaatttagattaaaattgggtagctagcttccacttgtgttccaatgccttctccaagccctgcttcaccatagattcctctgtagaattcaaagactcccgaagtttcttgcatttgtcaagaccagcatggtactcgtcaatcttcttctgcagctcaagtatcttcttttctattttcatcgggaactcaatctcaactagttttcttagctgttgataatagaattctcgtgtgatcttccatagaaattgccacaaaaaatccacctcaaaacgagcatcattacttgcaaacaataaatagtgataccattgttgaagaagatttttagtgatgtcagcgaccaaagtagtatgcatctctttcattactttacatacaaagtaatacccaatgctattgaactctttggaataatacttgttactaatgtcttcgtatttgtgaagcaagtatttcataacagaggccaaattaaaaggtatgaaataaccttttatgccaacaatcttcaatgctagatcactcctttttattcccaacttctttttgaaatagatgaattgagactctttgaagatataatgcatgaaatcagattctgtaaaactagaaagttttagaacctcatcttcttgtgactcaacttcaacagtcttgtttctctcttcatcccagtaaaaattatccttcaacctgtctaggtcacgacgagttaatttatggattaagtcttctaaggtgtttagagatgatgtggggtgtagttgtagagttggataattaatctctttattagggaattcccaaacatcttctcctaaaactttaagcttcacatctctaatatcaccttttaatacattgatcacctatatatataaacaaaatattagaactcatcaatataaaataatagtctcatttaacaagactacttactatacttgaattcaaatatattataactagttattttttattttcaaatataaataatgctctgggactaggggtattgtggacattgtcccacat

SEQ ID NO: 120978 - DNA, 1359 bp, Cannabis sativa
atctctgatgaaggggattaaacaattttggaaaaaggtcaagttatgccctaggtttatagggcctttcaagattctcaaaaaggttggattggtagcttactgtctagccttgcctccaacaccttcagaagtccataacgtatttcatgtctctatgttacaaaaataagttttagatcccgctcatgtgttgagttatgaaaacctagaacttcagccgtttaagaccctatagggttttcttcaatttgtaaactgcatttttaggaatggtgcctttaggtttgtatctttgtggcaatttcatgtagatatcttcatgtaattcaccatggaagaatgcattgtttatatccatgtggtgtaggtgccactgtttgatggcagcaaggtcaaggagaagtttaagtgtgctgaacttggtcacgggggcatatgtttcaaagtagtaaacaccttgttgttgagtgtagcttttggctactaatcgagctttgcatcttttgactgaaccattagggttatattttattctatagacccatttatagctaatggtgtgttggcctggaggaagtggaacaactttccaagtttcattggcttcaagagcatcaatttttgtatccatggcattattccatacttcttctttgcaagctcgtgcagaggaagtaggttaaaaaaacttgtgatagcaagagcagttgctctaaatttggcataattttttataagagaggaattttattatggggtgaggtgtggtggatgtggcacagctgtaatcttgcagataggcaggtttgtttatttttctacttgatttggttgttggacagttgtctgctgattgtggttcaattggttgaattggtgcttgtgtgatggtttgatcatgagcatgagtataatcaatagtattggtctgagtttgaaaaaaattaaatgttaggattatgagtactggtttttaaggggtaaatggagtcatgaaagactacatctatttattgaaacatgtatgtaacaccctacaaagttagctatgttatcatgattttatattaattgtggaatccattgctaatcaattggtttattgaaaatcgtgatttattaaaacttttcttgaatacttttaaatattaaagtagataacatatatataaccgagatccggtattaaaaatatttaaaatcgaggcacaaaatatttgacacaaaaatttttgcctagcgactacacaatatacagcctgctgtcccaaagatcgtatgctttaggtctaatcgccccgacatatacaatcttcatctgctcgcactcacggcttgtaacaccctaactagcat

SEQ ID NO: 120979 - DNA, 2359 bp, Cannabis sativa
  modified_base (1423)..(1426): a, c, t, g, unknown or other
attgggcagcttgtccagatacaaggaggtcaacaactggcttttgcatttttgttggaacgtccatcatctcttggaaaagcaagaaacaacacacggtttaaaggtgtgccttattaggtaaattctatgcctaaaataaagtaaacgacatagcttattaggtgaataacgtgtcttaaattaggtaaacaacgtgccttaaattaggtaaacttaaattaggtaaacaacatgctttattagataaatgacatgccttaaattagtgaaacaatataccttattaggtaaataacgtgacttgaattagataaacaacatgtcttattaggtaaacaatgcgccttaaattaggtaaacaatatgcattattaggtaaacaacatgtcttaaattaagtaaataaaaattactatcttaaaataaagtaagcgacatgtcttattaggtaaactctgtgcctaagataaagaaaacaacatgacttaaattaggtaaacacgccttattaggtaaacttcgtaccaaaaataacgtaaacaacatgacttattaggtaaacatgtcttatcaggtaaactctgtgccttaaataaggtaaatgacatgccttatttatgtaaagtacgtggctcaaataaggtaaacgaaatataatttatcattgaaaaggtaaataactaccttaaaataaggtaaacaacacaccttattagataaacttcgtgtcttaaataaggtaaacgacatgccttatttagataaactctgtgccttaaataagataaaccaaaatataatttatcaataaaaatgtaaacaagtacctgaaaataagttaaacaacacgctttattaggtaaatatcgtgacaaataactaccttaaaataaggtaaacgacacaacttattagataaattttttgtcttaattaagttatagaacatgccttagttaggtaaactttgtgttttaataaggtaaacaacatgtaaactattatcttaagataaagtaaataacacgccttattaagtgaactactaaccttaaataagataaaccacgtcttataaagtcatatgagtaagattaatgctttcaaactaaatcatatattattattaaaagggtaaggcttatcatataaagtcctaccttaaaatataacttttatataattaaatgattttttttagatataatattttttcaaggcttgattcaattaaaaataataattctataaggagttaagtgtttatgtttacggctagaactcatcaatgatttaattaaggtttagaactatcactactacaaaattgggtttttctaacagtttataactgtcttttatactatttgccaacggttcctaaaaccgttggctatgtgggtgtcataaaaatgcggannnntaaaagacgttttataactgttgggaaaagttgatttaaatgacgttttacagctgttggaaaaagtcacattaaatgactatttataactgttggcaaaaatattatttaaattaaatttaatttcattttaatatatatttttaatttaaaatattaaatatatataatagtattaatttcaaaaaaaaaataatattaattaaaataaatgaaattaatatatttctaactttaaatatcataattcattacacaatttatttttaaaaaaaaaatatcataattcattaaaattataccaaaatcaaagattattacacacagattattacacaaaatcaaagatacaattctgaaaaaaaaaaataaagataaaacaagggagaaatcagataataggctatagccgccgtagtgagcacctccgatttcgatccaacgagttgtgcacctctgatcctggagtcagagcaaaattgatgaacgcagtgagcaccgaagaagctttcgcctcagaccagaacgatgtcaggcaaacaactcgcacaaatctccttcaaatctgagaaaagtaaaatgccacaatttttaattaaagacccaaattaattctccaatcacattttaattaaaaataattgtctaatagtattttagtcctttaataatttttctcttttagataattttttttgaataacttttacaatacattttaaatacaactaatttataaaattatcctctaattaaaaatctataaatttaaaatttctcagaattctcaaattataaatgtattaagcaaacaaaattattctttttttatttttaaatctgaaatttttttttttggtattttattttaggaaaatcttatttacaccccaaaaatttctaaaaacacccaattttaataatttttatttt

SEQ ID NO: 120980 - DNA, 1307 bp, Cannabis sativa
tttacttcgaccagatgtcctaggtgcaacagaagttggcgagaggaggaaaatcgggcatggaactctgaggagaaagccttccatgagctgaacattccgggcgccaacttcaaataccattgttgggcggcttctggcaggaaaaactctgcaacatagatctcctcgtattccttgtgatccatttgcatctcgaaatacttaaagtgggacaaaggatcttcctttccagtatacatcttccaggttggcatcttaaacttgtggggcaactcccgaatattgatctcgggggagaaaggggttccacgtgcttgatccaactcgagatcgttgttcctctgaccggcaaggccttggtacatattttttatttcgtccagatgtgcctgcacggctagactaacctgtttggcctcttggctgatctgagtcacatcatcatctttttgagcgggattttgaatgcgtgttctgggttgcaccattagcgtgtcaagctgatcgtccactcctctccttctattgagatcgtttctaagatcatgattcctccccaacctatcaaatatggaaatgcctggttgtcttagtgactggctggtttggcctatttgctgaccggcaccataaacttggttggagttattgggtatgacttctcccgatgaattattagacaaggactgcccgcctaccacttggcccacaagtggaacctgtgaccggggattcgacgactgaccatttatagtctgataggcttttcgtatcaacacagtggtttgccgactgcaatcatcaatgactgcttgctgagcccttaacgtttccatctgcttgtccctctattcgacaaacatgcacctctgctcttcaaacgcgagattcaccgcaacacggagttcctcttgatcatgatgtagggtgtttgtacgaccctgcatgattccaatagcagcacagaggttcaagatttcagtgtcatcactaatggttgtttgaacaattggtagcaggcggaacgagtgtgttatgaatgccctggtaggttgctgaataggtattcctagtcttttgcacaccaggcgtgatttcatccacaggagtcgtcacaccgtgacccgcagttgatggttatccgagatttacggctggcagaacccttgtgttttctaggttctacagtgtaggatccaccgcttgtggatttgctagaccaaccacacccctacaagtctgtaccacaatcgtacttgtgattaaattcagaataaagagcgatccttgattctgctctcaat

SEQ ID NO: 120981 - DNA, 774 bp, Cannabis sativa
  modified_base (747)..(749): a, c, t, g, unknown or other
atcttggaaatattcaaccaaaataagctctttcctctgtacacagatatgaaattacataaaataatacaaattacaaaaaaaataaccttaatttttcacttgttttgttcatctaacaatgtaattactttctgatttgtgataatgaacagaacccaatgataggtatctattcaatcgtacctgaacttagaattttcttcaaatcagctgcggaaggagcagcatttcctcccaaaacggccaacaagtaagcggcgatgatcttcattctgtcaattcaaaacaaaaaacgaaaaaccctcaaatcaacaaacaaaatcagacacagaataagagaaagttcgaaaatttatagaaatggaaacctgaggaaggtggtgggaggcggcgagattgagatgaagagctgagagagagagtctcagatttttgggggctagggttttgaagactcgagcatatttataataagaagcaaaactcaaaaactacgtcgtttttagatttcaatccaatccattatttatctactaatttagattatttttttattttatttatttttttttttttgacaaaatttagttcctttggttaaaagagtataaaatttagttgatttcggtaagcttaaattggttgagagaatagtgttaccattaactttttattataattttttagtcaatttttgtgttggaaaatacatgttagcatataaataccattttggaccctgtnnnttgcaaaagttacagattggaccct

SEQ ID NO: 120982 - DNA, 1692 bp, Cannabis sativa
atcttattagatatttaatttaacttgataaaataatttaaataaacctagatattttaaattagtttcattttttattttaatttttgaaaatatattttaggttatttttaacaatcctaaaattttaaaatagttgcttagttaaataataatttaattatatgagtaataaatattttttttttgttgaataagaagatgcatagcaaaacaaaaccagaacaatgttaggcagtcacaaggggacctgcctccctaccaacagtctttaacgaaatagaattcaccctagcaagataagcaagcttatctgcatcagaattctcagaacgaggaataaacttaaaggaaataaaattaaagcatctaataagactaatgcattttatgaaaataggataggacccccacgcataaggaagctccttggagttgagggcattaacaacaatcatagaatcagattcgacaagcacatcgacgagcttctcttccaaagccacctccagacacagatggactgcctccagttctgtttccagcacactgttcaccacacgaaaagaatgtgccatgatagccacatccatgggatccaacctgcacaatgccaaggcgcgctgcataatccagcacaaaagcatctaccttgaaatgcgagacatgagtcccacactgagtagcacaatctgcaggattgggagtatcacaagaaggcagttacactgaaaattccttcatttgcacagaatctatcttagagtatcatggacatcatggggttcaccacgaaaaacatagtcgttcccgcatttccacactaattcaaagagacaagcagcaaacaacattaacttaatttccccattgttgtataaccaaaagaaaaactcttcaaaacgttggcatccaatgttatccgatcttaaacctcaaaggctcaagaaccacaagcttcgagagaaaaagcaatcccaaaacaagtgaagctcagattccactccactatcgcaaaaacagcattgcacatcctgggaagaaatgaagcctagtcttgttttaataggcaaacagttactgagtattttccatatcaggagtgattgtgtggggtgaattttcagtttccaaaggaccttccagcactctttttccaccataaacctcagctgttgagaaaaccagtagacattcttaactgtgaacagccccttacgactcactttccaaaataaagtatccccagcttcatccaaaggtcgaataggagctatggccttagccacttcaggtgagaagcatcgataaatcaatggttcattccaacgacgtgtccctggtaaaaacagatcaacaacataagtaaaagagtgagtgatcttatgcgtaaaactttgcttaacctcttcaagactgaacccaggaacccaaggcttcgtccaaatatcaataccaccattgccaattaagaagcccgcgccagccacagaggtcccttgcatccagaatgcccttccatacaaaggaatctctgttgtttttctccacattccagaaatccaacgtattgcaatattttgcaagaagaattttgacccaaggaggatcatattgttagacttttatttgggcttacattaaattttattggttttattaaaacttgggttgattggatagttctttgct

SEQ ID NO: 120983 - DNA, 5819 bp, Cannabis sativa
  modified_base (3822)..(3824): a, c, t, g, unknown or other
atagtattagaaaatatctcactaaaagaaaagataactcatcttttgaaaaaaagataaaaaaaaatgcaactctacttgaaaagctatttttattttcgctaccttttttccaaaaatttcctgctgcgatgactgatagtattttggccataactctctcgatattactcagaattggacgattcaagatgctctggaaagataagaacgagatataaaacgtttatgttgagctccaagtccagttatgtctctaagatcgtacgaattttcaattaagttccactttgtacaatcgagcccgtcggtttctactattttcaccaaaatatgctaaaatccctccaaaagactctaaatgcatgaatagtctttaaaatagcataaaaaaattaaaatcacactaattaataatttaaagaatcaatttaagaatattaatacataaattagctatatttataagacaaatatggactcatcaataccatgtaaaataaatgtggttaatatttgaaaatcacacagctgtaacgttctgggatgtctcgctgggaacacggtaacaatagccttggtagcaagctagaaccttttcccatgtctttccgaggttgatgatgtaaacctcgtcattcctgcgcttgaagacataatgctccatctaaaaattacagttcttggcaacaaggtagacttcagcagtcaacatcatttgtatgtcagcttctatctgagagagcttactcgacggagctgttatccccatcgaaaggtgtctagagctgaataacgaaggtaccatgagcgtgccttcctatagcaagatgggtgccttgctattagatgtttggatttatctgacttttatacttagtctatataaggtgtaatgtacactaagtgtcttaccagtcactatgtatcgtctcctaatgcgtagtgaggtttatgcctcgccttgtacatctaaatttgtatggtgttaatgtgaatcaatagtttgtatatctttatctcgcgtaagatcttaattttgtaaatatactctgtcaatttcgcattaatgagttattccattttcaaatataattaccgtaacattcatagattcatattcttcccaatttgatacgtgtcctcctttgaaatgatagccgaattttgggtataacaatttccccttaaaaagttcttataaaaagtgctttttaaatgaacacagaaggtatattcgtcataatccctttttgaaattttgtatgcctttgattttggcagttgtcatatctttatttgcagaattttttagtatccagccttccaacttcacgcagtgagtacctcattctttcttactaacttttctcttcaggcgtcttttctcgtttacgctacacatcaccggtcgtctcaaagggtcaagatgctagagactgaatatcgctaaattaaggaacataggatgttgtagccaagaagtggagcgatgctgaagctgaggtttcttgcactaaggatgaagtagaaaagcaacaccaagctgaccaacaaaaattaaagcactcgagaattatgttaaatttctccaagctaatcttgttagaaaacaagttgattatgatcaaaagctcaaggaattggggactggaaccaaaagagaggatcaacaatatcggtaaaaggaccatctatcagatttggtcagccaaccccgagttgaacttgagttttttttttcgagtgataaggctgaaactgtgcatgcttattgcgagaagactcgggaggaagaatttagcgaggaagaagaggttgacgcagaacaagaaaatcccacaaagtcccctatgataatgtagactttgtcttgtatttatatttatttattttttgtttaggaaaatggcctaatggtttgccccttgcggcatttttgtaaagacaagtttgtgaagttggttggccaactaagcttttaattatctttaaatgcctcgtattttcccatttaagtagttagtaatctactatgtgcgcgaccagtttattatctaccagacttttgatttgcaagcagttatcaattctgtctcgcaataagagttataatctgtttcaagcaatcttgaatatactttcaatgatcttatcactttgtacattcttgattgtttatatgaatagttaaatcatctattcatatactaggtttaagtacttttatcaagacaccttgatgtctcatttaatacttttctatattgtgcgagccgttaatattcaatttcgcacgcgagttatgagttattctcatttatagcttttgattttcttttctcgttagacaggttttaaatcaaaagttacgatggtttgatccctttctcctcagaaaggttttatcaaaaactttaaaaaaaatttaagaaattttaaagttttgtgggtttgcactatatcatgtatttcttgataaatttcgattaattatacacctatgccccttaagtaattttaaagagtaacactttgaaattacttaagaaaaagaaatgattaactttattcataactgaagttcaaaatattacatcaccaatgcaatttacaatcattagttcactggtagtagggttgcaaatgttccacgttccagtagttctttattagcaagccattcggccgagctaatttgtaaaccccggttcctactatcacttcaatcacataagcaccctcccagttcggattaaatactcccgctgacgcatctcgcgtattcgcaaatactcgtcttagcaccaagtctccaacgttgaatagtctctttttgactcttttgttgaagtatcttgttactcggtgttggtacgctgcattagtgacttgcgactcagtttgttttttgtcaagcatatccaaggacagttttaggagtttttggttttcttcttgatcataaaactctcgtctatgagtcgatatgttcacttccacaggtaacattgcttccgagccaaatgccagtgagaatagggtgtgtccttttgctgttttttcagtagttctatgggcccaaagtacttgaggtagctcatcaacccatctacctttggcagcatctagcttcttcttgatagtatccttcaacgttttgttaactgcttccacttgtccattcgcatgaggcctagacacagacgagaagcttttcattattttattcctcttagtgaacaagacaccatcgaactgagttgcgttatcagatactatcttcattagaattccaaacctacagacgatgttttttacaataaagtcgacgacttttttccaggttatggagacaaaaggttcaacttcggtccatttagtgaagaaattgactgctactactgcgtacttggctcctcctcgccctgtgggaagttccccaattagatcaatcccccatatagcaaatgggtaaggcgaggtcatcatcctcagttctgttggtggtacaagaggtatatgtgaaaatctctgacacttatcacatttcttgacaaactcatgggtgtccttattatccttgtctaatgatctttttttatagactctgccaacctgcgtgatccctgcaaaagccttcatgaatttctctgatgatctcgttcgcttctgtacgaaggacacatcgaagtaggggcatggaataacctcttctgtatagttttccttcaattatcatgtagcgaggcactgcatataggagttttcgtgccttgtttttgttagttggaagttgtccgtcgagtagatagttgattnnnggagtcatccatgtaggtgagctatctatcatctcaacatcttttttttcacatatactgggctcatttagtacttccactggaatcaagttaaattaatccaagtcgttctgcgaggccagttttgctgaggcattagtgttagagttttgttctcttgggatttgctcaattttcgaacgtttccaagttcttccgaaccttctctaggtacttatccattttcaagcccttagcctggtattccctgagaacctgatttacaatcaattacgaatcactatgacatatgagattcttggccttcaacgcctcgactatcctcaagccagcgaccaaggcttcatattcagcctcgttgtttgacgcgtcaaattgaaatctcaaagcataatgaaacttaaagccttctggaaaaattaatattacccctacactcgagccctgctcaataaatgcaccatccacgaataacttccaagtgtctgcatttcggtgaataagcggatttttctctagagttattctttctattaaaaggtctgccaaagattggcccttgatggatgtttgagggtgataagttatgtcaaattaccccagttcaattgatcattttatcaatcttccagaaacgtctggttttgataaaacttgtctcaagggttgatcagttaacacttttattaggtgtgcctggaagtaaggtcgtaacttgtgagacgcgtggatgaggcataagtcaagtttttcaagagggtgatacctcaattctacccctagtaatcttttaccgacatagtaagcaggttgctggtgctttttctcactgcaagaaaaggcctttttaccggggcatttcgtcaaatgcgccggtaaaagttgttgacacaaagcaaaacctgaaatcccactttcattattgcaccaacaaaacatattaatgccggcgcaataatgaacatccgtcggtagaagtaagaaaatgaagcgtcaaaaggcgcgagaagttttctacctttcatttcatttttgctggcgcatgtctacttttaccggcgcatatgtgccgaaaaaagtctcaagaaaaagggagggaaacttcctacgtggattttttgtggtaggtggggatacttttactggcccacaattgtgtcgctaaaaatattaaattaaacgcgcattttgacctaggtcaattttttttaaaacacatttaccggcgtaactcgatgcgccggtaaaagtattaatatgtatcagggagcgcgaatccccctttcttccccattttcattttgttctcaaacaaacctagccccctctctcgttctctctctgattccctctcaacctctttcaatctttcttaatttctctcaatctctctttatccctctcaatatttaaaaaaccgcaactatggtttatctttctctctctcaactatggttaccaactaaactcaaaatcaaaagaaggaaggaaggaggagcactggtggctgttgcctgctgcgagcctgcgactgggaacgaaaaattattagaaaaaaagggtttaagctaaaaaaatttctgctagtgaacccccaaactggtatgtctaagtctatctaatgtaaaaaaaccattaaatccaatttaatgggccttgttaagcccaaaccgttaaaaaccgtttataaccgcgatcggttacggtcggttttttgatgttaacggtcggttacggttttgtgaacaattacaccgtaaccgcctggtcggtttggcagtaggtaaaaaccaaccgtaaccgaccgaatttcacccctatgtatgattatgtatgtatatatgtatatatatgcatatggtatgtgagtgtatgtatatgtgtatatttatgtatgtatgtatttttgtatgtagatatatatgtatatatgtgtgtatgtgtaggtgagtatgtatgtatgtatatatgtatgtagatatgtatgtatatatg

SEQ ID NO: 120984 - DNA, 876 bp, Cannabis sativa
ttttttttttatcaaatacactataaaaaatacacctgaataaaaaaaaattaaaaataactgctcaacaaaaaaaattatcgaaactacttagaaacaattaaaaaatacatacatacaataaaaacatattttctggaataaactgaaaatatacacgataaaaaatgcacataaattaaacaacaactgtacaaaaaaacacatagaaacaacaaaaaaataactataaaacaactatagaacacctaaacaagaacataaaaataactataaaataacaaaaatataactataaatcaactgaaaaataacatcaacttgttaaaatatgaaaatcattctactttgaataaactacaaaaaattcaaaaaatatactaattttattaatcatgtaaaagatagaaaaatattggaggaatagtcttaatttttttgtagagcgagaaagagtgttaagaaaatatgagacaaatgatgaaagtaaaagaatcgtattttagtaacagggccgacccaagcattttgggggtcttgtgtaaaattttaaaattgggctctttaaaaaaaactgtgtacattacaactaaaattctataatagtttttttttttaagattcgctcataaactttcaattataaattttttatttatgtatatataataggaaaaaaaaaaaaaaagaaaaaataggccttttcttaaaaaaataaaataaaattgggccttaaaaaaatggaggccttgtgcaatggcccaagctgcccaatgcgaccctgtttagtaaaggttaaaagaaattaattaagatttttttctaataaaatgtgattaattaaagaaaaatagtttgaaatagttagagtgagaa

SEQ ID NO: 120985 - DNA, 1315 bp, Cannabis sativa
tatacacctgagctctctcattgagctcaattatgtttcttacagagtccttgtagatcatcccacaacttgctccgacggttaatgggatcaatggagatccctgcaagggtggaggaggaggcagagatgacccacttgcatctccaccatgagaattctcagccaccttggcccttactcgtcccgtgggctcatctgaagatcccccaatgagacttctcagccaagaagacatatcttcaaaagaagagtacgaaattcagaaagcaagtcataaacattcaatgtaagacaagattttaaaagatgatgtgatcaactatcaaatacccaccgtcctcagaagaggaactgtcaaaatcctctacaatcgccttgccttgactctagatgtaggcaaggggcgagcaggtcccttagaagtcttgcctctgggcccgatccagagagaagcatcactaactagacccccgctaggcaagcgtcaacagagggccctctctttcctctccaaattttgtgctatacaagacaaaggcacatcatcatccaaatcaggaacctgtccatctccaagataggctccctctacaactgggactcgtgcaactccagaagtagaaggatacaaaccatacttctagaaattggccacactggtcaacctaagtatgtttctttgctccacagagagagataggatgtggcttgccctatccctcatttgcaaggtggggatagagcatttgaggaatggcacccataagaattcatagtgtccaatccttcgaaggccataagcaataaagtaccttttggcatacccgccaactttcgacatggtgtcatccaaccactggtgaccgatctgactgaagtagaagtacccagtcctattctgctttggagcagaattcaagccaaaataatgcccgatatcataaggtgtaggtttaggccagcctagctccctatataaaaaacattgtctaaaggtacttgatactttttagggtgatttgtgtcagtcacataccaaagtaagcagcgatgtcttgaaagttatgaagtggcagcactgccccgtgatcaacatgccgctctgaccaagcaagccaaccaaggggaagctagtgcgcccagtaatcgttgcgaggtatctcacaatcgacatccctcactaagccaatagcaagtatcttgctaaaagcatcctcaaaaagggtagaagcaagagagacccaactatctccctgtgatctcgcatctagtatctcaagctcagaagacttatccaagacatgatccaagc

SEQ ID NO: 120986 - DNA, 2937 bp, Cannabis sativa
  modified_base (2902)..(2912): a, c, t, g, unknown or other
ctcctttttgtctaaaaaagtaagtgcgttcaatttcggggtcaataggagaaagttcaaggtcttcttcttgctcgttcatgcactagattacacctaaaaaaataaaaatacagcgcaccaaaatggcattagaacctcaaaccagaaaataaattgtaaaatagttgataatacacaatttttagtttcaatacccggaaacggcgccaaaaacttgttgtgaaaattatgtacgcaagtatacgcagtcaaacaagtaatagattgataagtaagatcgtctccacatggattgcaaacaaaatacgatgtaaaactaactaattacaacttaaagcaaaaagaaaaaaaaatgagaatggttgagcaatgattaaaaattaaaatgactgtaattaaacttgctaaaattaatgctactgttgctagaaaattacttgcaaaaaatataatatggcaaaaagtggcttgaatagctaatattcaaataagaaaataaaatccaaactaaagagtgtttcttcatggctgttgccctttggttacaattcaacaagcttttaatatctaaataaatgaaacaagaaaagaaaagaagaaagcaaaatataaagggaaggtaaaagaaaatcaaacacaaaagcttgtgttcttctctctttgcactttggtccccccttctctttccttcctcttttgtactttgcttttgcaattaattttttctaaaaatggcagttgccatcatcttgaagaagaagcttgtacttagtcttctttttggttgttgggtaaatagggcacaaaattataccctaaaaatagaagcccaatcctttccaaacttggcccactaggtttagtcttcttcctccacgacagccagttggcttaattttgagtaactgacatgctcatgctgatgtggacaactaaaattcatttttccaactctttcctcatcactaccaagaatgttgaattcgttgtagcattgcttcagcaatttagcccagtttcagcttttgttcccactttatccttgcctcttttcgtatttcctaacaatttaattcttctttttcaacaaccaacaaacaacatttaattaaataaacacaactaaaaataacaatttttacatgatttcaaagctaacttactatttagaaaatgaagctagaaactaattaaagttaaataacaaacacactttcactactcttcacaataatttcaatttaaaggcactaaaaataactctataccatagagttatcaaatacttaggcatagaaaaatccatagatttgattaaggtagcacgactagcttttgaaagagttttcacatttcaacccaccctggagcttaccagaaagattatccataataaaattaaaatcaacatctttctatctcgatctaaataaagggagccccaagtatttaatatcccatctggcaaactgatgcccaagtaatctctaatccctctttttattccctccttagtatttttactgaaaaaaattgaggttttaagcttattgacttattgtcccgactaggagaaaaactttcccacacaatcctagtaaccttaaacttttgtcaaattgactctacccactaggatatgatcatccacaaagaggatatgggaaagggttggacctcccttactaagtctaatccctttaataatgccatttgcaagggccttctccaatagtctagatatataagatttttgcagcccaaatgaaaagatgaagagataggggatcaccttggcaaataccacaagatagaataattctcccaacatggcccccattgagacaaacattaaaagtagaagtagagatgcactggttgatccgattacaaaaaagctcaggggccccaaaactcccaagaacacactcaatgactgccagctcagcttgtcataagccttcacaatatcaatcttaatggcaacgcaaccctccttacctttcttctttttgaaggagtcgataaattcttggtcaataacgttgttatcttgaatatttcggctagggaaaaaagcagcttgagtcggacaaatcagtctcaaaaggatgggcttgattctattagcaatactcttagagatcacattgtacaaaatatttcaaagagaaataggtctaaactgactgactctcttaggattcaggacttttggaatgagcactaaattagaagtgttaacccccttgtgcataattctagtcatggaaaaatcaaaaacaacatcacaaaagtccccactcaccgaatcccaataattcttgcaaaaaaaaaaaaaaaacagacatgccatccggcctaggggccttgttacttcccatggtaaagagtatcttcctaatctcatcatctgtcagaatcttgttacttcccatggtaaagagcatcttcttaatctcatcattgtctagcctaagggcttgtttagccaaaccatgggccgtagtattatctttgcgggacacatgagacaaaactaccctcgaaaatttagacaataaagctatgacatcctcgatagcgcaaccatctcatttgtgaacacctttctattattagtagccattactattgagagagaatcagatttaaccgcttctaggggaatcccacacaaatgagcccagtttagaccactcaacatggcaaaagtttcaacttgaaaagcagtaatactacctgaaaagaatcaaacaacaaacaacagagcaacaatactaccaattggaaaacataatatccacaaaactagaaaatacaggaagagactaacaatcaaataaaaacccctccaacaccgaaactgaaattactattgttgcccctgattttgccnnnnnnnnnnngaccaaccggacagggacacgtgga

SEQ ID NO: 120987 - DNA, 2581 bp, Cannabis sativa
  modified_base (2077)..(2081): a, c, t, g, unknown or other
tattaaatttaacggtgttagtagtattagtagtagtattagttttgtatatatatataaatataaatataaatattatttattttaagttaattgaacttatatcaattttaatatattatttgcgattttttattattatttttaataatgagaaaatgttcaatttaatatttttaaactatatatttattttcctcaatttttttatactttaaatattatttttaaaaaaattaaaaaaaactaataaatggcttcttttaatttataaaattaaaaaaatacatataacagaaataaaaactaaaaaaatataagtaagtataactaagtatacgttaacaatattgattttttattgaaaaaaaaaactactgcagtttaattaattgtttaaaaaaaattactgggtttaattatcattataattattattatttaaaaagcagtttaatttttattttagtttttcaaaaaaaaaaacaatttatcttaaaaaaaacaatctagttgattcactctctcttacactacgtatcaaaattaaaaaagaagcatttcagtcctaatttaaaaaagcaatgtatatatacattggtactttgtcatttattatagttttatttttattcaaaattctttatatcaattatattgaaattcacaaaggatagatatatattaaattcttttttcaaaatatagagaaaaaataactatttcaaataaataaatgaatataaacataaaacaacaggtccatgcatgcatagagttacgagctagacccacatgcacccatatgtaattatgtacttgttatttatttatttattttttaatagaaatacttgatagttaattcattgataaacacaaacagtttgttgttctatagtcatagtgtagtggtccattggtttcgtgattactgaatattgtactacttatatctatatgcacacatatatagtctgataaataagtagtgcaaaccaaattctgacacgtgtcatacacgtgaaatatggccctcactaaatccatggattggaacttggaatttccactctttttattgtatttaatttttgctcattgacaataatggagtatattcctcaagatgctcacccttttattggtgatcatcatattactgagtatactgtatatatatatatataaatattaattactaaactatggccattatattaatattaattactttatttcattaattaaaggtcattttaagtgtttatccatatatatactcgatgttaaactatttgatttatgcttaacttatctttggagactttgggcaaattatattgcttattagactttgatcgatgctatgctatatattagttaatgatcaattaagaaaatagaaaaaaaaaattgtagaaaagcaaccaatgaacatggtaacttaatttggtgaaaataaagaaaccaataatagtaaaatactgaaataagtgaaaagtcatattcaaagtaagttattggtttggtgaaaaaacaaatgaggtaaatgaagaagttgagctaactaagggtagctcgaagaatcaaatggcaatcaaatggcaatgggcaattttttttaaaaaataaataaataaaatttggaaaatggaatgtggaaatggtgagtgggagggggacctcccaacagcaaggaatccgacaagtctatttattgatttcatcttcaaattcagagtacgtgtcgtagactagagtatcccacatttaattagggaaatttttttatttaagaaaatagcttcaaaaaacaacactaaatagcaaagagttgtaagctaaaggttgagaattaagagatatcattaatagatggtctcaattataaataaaaatttaaatttagtgttatatatatcaacactaaaaaattactatttcaatagaattttttttttcaattttaatcacctaacactaaaaattacaccaaattttatattatttattattcaattattttattaatataataaaaatattttaatactaaatatatataattatttannnnnttttttcttaaaagtattatttaattattgaaaatttaaaaagaaaaaatagtatagtctacaataccccactaaatttagtgggacactgtagacaaagttatttataagtataggtttagtgtcctattagagtaaatataatgtgaaactacattatatttagtgttttgaagtgttagatatgccctaaagatatccaagtcactagaatgtactaaatgttgttattaagaaatttttactatgcataatacattagtaattaagtgtttttatatcttgcatttccattttaatttgtatggattaagcatatttttgaactaaaataacataaactttaatatattactccttactaattcattctcgatgtctctcaagaaaaatctcgaatcagattctaaattaatgggttatggtatgagcttatttatgcggttatgtatgcataaattattaatattgtggacattgtcccacatgaaataaatata

SEQ ID NO: 120988 - DNA, 911 bp, Cannabis sativa
caaacatgccttaaactctcaaaccagaaaaacaatggaaaaatcaagaacaatctcaaactagagaactgaagctctcaaaccagaaaacaatggcaaaatcaagaacaatctcaaaccagcaaacaacaaacaatttcagagcagaaaacaatcacaccatgtcacaaaagacaggacttacagacagtggccatcgttgataggcgatgccggacgacggcataaggacatggagaagacgacgctcctgaagactacgcgatactttctctctcctagacgctacgattctttctctctcctggacctacgatactttctctctcctatttgttacattcgtttttctctattattttcatcaataatatgttttaattataatgtattaactcattagaaataaagaaaaaaataataacaaagcttaaaaatatgaaagaaaaataaaaaaaagacaacaaaaatatataattaatttaatatgtaatgatatttggtacaaataaaataaaatacatatctaaagacatacaaattactaatatataatcttatttacattgagaaaaatgtaaaaagagtatggattataaaaaataaaagagcaagaaattcgacacatgcaagtttttaaatccaacaatctcaatagtttgtaaaaaaattttaacgacctaaaaagtttaggagcataatttggtatatgttaaagtttaggaggtaaaaattctaatcaatttttattttattttaaagatacaattatattttctcttaagttttcaaaacaattacaaaattaaataaataaagcaaaaaagtaaaaaaaaaataattttatgcataaagtgcggactaatgattacatatatgatattcatttctagtgattacattttgtacaa

SEQ ID NO: 120989 - DNA, 1140 bp, Cannabis sativa
tatgaataatcctaaatacaaatattatacattaaaaaacaaaaatatttcaatttatactttgcactcatgtatcattagtattttgttaggagaattgtattgaacacaaaaccacaaaagagtcactcgatggtaatcaatatgtctaagcatcatatatgtgttatttattctattttttgaatatttttttcaaaattcaatttaatacatttcctttttttatcctaattgttcatttactacaaaaataatttagtgataacactttagttttgttactaatcacaacaaaaaattattgaaaaatagcttatgaaaacaagtgatacattattcataaaaataatatgttgtaactaaaaatatatttaattataataaattttaactcttataggaaatacttttagtcataaatatatttatgacaatattagtataataatttttttttagtcacacaatttttttactattgtagtcataatttttttcttttgtgatataaagcaaaactaattttagggtgtttagcaatgtgtaaaacaataggctctattaattaatgtctttttattatacatatatatagttaggtcactagaattgttgacactaaagtgtgtagcacaattatgaggtggtgttctataattgtttagaaattttctacaatttttattagagaaatattaaagggtaccagtagtgtttagcctctttctcagtattatattgctattgatacaattaagtatcagttcccatatattttaaggtaataacttttagagaatatcgccaaccaaataattgtaggatgacatctctaagtgatgatacacactactggtgcctaataataatgctcgatctctttattaatgtaaaacaaataagattcaatattaaattacattaataacaatattacatcttacaaaagtgttaaacacctttagcatttctattaggtcattgaatgtaaaagtattatcattttctattaattaatttttgaaagatcatgtggttggactaaagtttcattatttcaaaaagattttaattagcaaagcaaaaattgaataatatttgtaattaaatttatatgactacaaaaatgtatacatg

SEQ ID NO: 120990 - DNA, 589 bp, Cannabis sativa
gggcctgcttccccctcgctctctctctctctctctctctctctcttacccccaaaattctcacttgaaaaatcctccacctaacatcaaaattcctgaccctctctcttctcgcaagcttggaccgccgcccagggtgagaagtaccatggcgacccacaacccacgacgtacgctacaacaactagcattgtgcccccatatcttgtcttcaagaacgtgtcatcaatactaattacaggacgacaaaacttaaatccccttctacaagcattcagtgaccaaaaatagtacttcaacctgttgtcatctatcacaatatctgtaagagcacttggattcttctgttccagcatgtacaagtaaccaggtaacttcgtataagattgtgctggcgtacccctaacatacataagtgccttctccctgcacctccgcgccttctcataacaaattttgattccataatcgtctaacatatccttttgtatgtctattgccttgtacttagttccatctgatgtgtacttgttcttaataaggtggccaacaacccacagtgttgcttgacagttatcagcatgtctag

SEQ ID NO: 120991 - DNA, 1274 bp, Cannabis sativa
tattattattattaaaacttaaatcaaatataattaatcataaatttcgtttatatacatacataaaatatcaatcaatatatagatcttaatacgtttttggctttttttcaaaaaaaaaatataataataataacataaaaatgataatgtgtatgctttttcttttaaaaaaataagatataatattattaataataataataataataataataaaaatcaattgtacgtcatacttgaaataatattttaattgctttctaccacgtttaaattttttattaaaaatattaattaatttttaacaaaagcatactttacgtttttttaaatgataactttaatgtcaagtatcacataattataattaaagagcattgttatttgacaccagtggtgctcgtggtaacctacgattggttaacaatattccctaaatcttttttttaagttatataagacctgctagctgcttaattatcaaggaggattgccttttagcatttctcataactaaaatatcatattttttaatatttttttttaattaagatatttaaaaaataataattaatttttaaaacatattaattaataataatagaacaaacaaataatttttttccaatgtttaaaaaatgtttaaaaaatatttaaaattcgatgaaatctaagattaagatatagatttgggaatacaatagtgataactacaaatgaactacgataatgataagggatgagatacagtgatgacaatgagtgagatacaatgataaaaataagtgagatacacaatgaaacaacaagcgagatacaataataacaataattttgaatgatcgagatacgaaaaagatgcattatgaggaacaccgtaattttttatataccactctatttatttatttttataaaaataatttcttttaacaaagcaatttaaatatactacatataataaattttaaatttattaataaataattctaaataataattaataaaattctagcttttaataagtaacattattaataataatatgaaataagatactatatttataattttactttatattagaattatatgtttaagtaactatttattataatagtaaaaataattaaatatattaaatgtttacgatagaaaatatataaaaattattatgttatagtaaattttatgatatatattatatatttaatcaattttttttacattattttattgtaatataatctataatatatatatatataaag

SEQ ID NO: 120992 - DNA, 1101 bp, Cannabis sativa
gctcttacactccaatgtacggatggaaagtattacgaagttaaggtcttaaaattgggtcccaaaattgatttggaaatgtttaggcctgctaaacattatccaaggccaacaacaaccacaacaactacttcatcatcagaagaagaatcagcagcagcagcctccaactagaacaaaggctttgttcagtgctatttcgatgttgtcatttcgttttggagtgtaggaagttattacctttttcatctttagtttttgtcatggatattttatttcttgctatattgctggtagagttgggaagaaaataaaaaaggtttaggagacatgaattgagttgaagaatcataaaaagatgaaccttgaattcataatcgaaatcgttatcaacatgagcctcatcctgtcacaagaaaggagtaaggattggtaaacctattgtagaaagcagtaacttaaaatgcaagaaaacaaattaagagacacaaggaaggaactcttttctcataagtgttttgggacatgctatatatttagagcaaactagatttgttcaaactctcaagtagaaaataaaaaaaaaaaacatcatgcttttagttatagttatagtaagcacatatgacatataggagaaagagatagtaacttggaaacttaattgagaattattggtgattttcaatagtgaaccataacaaactcagttctcccaataacataattgagatgcaaatgtgagctaatttgggagacaaaactttatcaaatatgcatatatatatatatatataactaatacatgattgagttacaccaaatcacaagcaaaattttaccatgaagagattaaaatttcatttttatttcataccctgtgtgtatttgcattgtcaagtcaaattcttgtgcaacctccaaactttgtgtgaagatatagtggatgaagtttttatttgtcacgtgaacaatagttggacatataaataatatagggatattggcggctaagctacctaaattttacggtttgtaacacttaatcacgaaaaccgaaattttggcggctaagctacctaaattttacggtttgtaaca

SEQ ID NO: 120993 - DNA, 1637 bp, Cannabis sativa
  modified_base (1489)..(1517): a, c, t, g, unknown or other
  modified_base (1566)..(1606): a, c, t, g, unknown or other
ggtttcagatgaattcatacattggttaattaattataaaagaccaaaatgccaatgatcatagatattattcagctattcttttgggcttttagggcccaattcgcagcccaaatgaagttgtccatgtgtagaagtgcatagagaaccctacagaacttctcttggctggcaagacccctatagggagcaggatagctggccatggtgaagtccaaaggccggccgaccagcttttgtgaggaagctagtctgtcacttgatgcccatttcagttttgtggtctcaattttcttaggtactaacttggccctcttattagtaagttgtactgccacgttgcactgattttgtccacgtaatcactgccatgttaggaggaaaaaaaatcaggataacattagtaattataattaattatcaaataaaattatcattaaagttatttattaattagaccttccatagtctcttaattaaaaaacaaaggctaaattctctttttcttcttaaagaaacccttgcttagtgaaactcataaacaagacatagccttattaagtgttctatataatcaagctcccaataagtagttctacaatttactgagtagattctctatcttattaattcctccactatagattcataattgacctcctaattacataatgttatcctttttttactatgatgtggtagttagctggatgacacgtgtctcacagtttcctacctgagcgaaaggttacactcctagcagccccaaagtattgatagaaaggtccatgttagccatacatagcaggatgttcaggtagagtcatcaagggaaatccgaccaagctcaatcatgtgattagctcgcatgcaccgaccaagaaatgtgagttggcaattttggagatagacatcgttacttccaagcttgcatgtcacgaagataatccctacattcgtgggattaattcagataataaaggcaataagtctagattttccaatccctacattgtaactatggaattaaaactagtttcttattttattcattatagattaagggaaaccattcttcatgtcataagcccttataaatagtggtttaatctcactattctaggggatgaaattgattcgaaaagaacactcaagagagaaagagcgatctaagagagaattactcaaagattcattgtaagagctttagagagagaatacttcattctttatctcataagtcaatacaacctaaatgggagtaagatattaccatcatcatggggccgaatctctagaaattcaagtgttctctttatttactattatgctttctattatttactttatcaaattgctttattttgactcacttgtcgttggctagaagtgaagtcaacattttggtagttttattgagagtagaaacacaagctttttgtctcaatgtcttgataggatactagatgtttatgttgggttttatgcnnnnnnnnnnnnnnnnnnnnnnnnnnnnngatttacttattaatatagattaagattaacatttaatgttgcatggtnnnnnnnnnnnnnnnnnnnnnnnnnnnnnnnnnnnnnnnnnattcatctgaaaccctttttcacatacttga

SEQ ID NO: 120994 - DNA, 1245 bp, Cannabis sativa
ttcctacaggtccccctaaaccggtcgaccggttaagtgcaggaaacacaaaaaaaaaaaccatacaacctcaaattgatcccaaaccttccagacctgcttaatataccataatgaacattaaccaagcaaccaaacatctcaacaaactcagaacataaggttaccattaaagacaaaagtttgtctaacaactcaaactttatctaacaaccaaatcaagccacaaacgaacgtcaattcagctcaattaacctaatttcagcctcagaatatagtctcaagcaacatgaatcactacagaacctaactcgtagaaaaattataaaacacctcacttgatacttaccttaagtttgacatcactaaaagcttgctagaaatccttgaattaagctgaaaaattcccaaccctagcttgttcaagggacctcgggagaaagagaaagagtttagggaccttggataaaatgaataaatctgatggttttctaatttaattaaaacaatattcagattattaaaacttaagtaaatctcactaaaggacaagaattaaatggccaaaaagactattttacccctacctaaatccaaaaagcttcaaagtcacttaggagcattttggtttattttaaaatctcaactaatctcgacattcccaatgtctaactatacttccccgctactactaaataccaaaatgtgattctattggcccaacgtcgctttccaatattgtcgggtacaaaacatgcaataacataaaatttcatgtatgacataaataatacatcctgaattcaaataaatctacataaatgataaatcataattcttattctagcttcaaaattaaaacctcaaaatctaacctggacaactcttgatactgagacctcatgtcggactctaactcccaggtggcttcctccaccttattgtttcacagagcaccttgaccaaagctactttcttgttccgaaggactttatctattctgtccaagatttgaacatgttcttcttcgtataataggtctggttgaagctcaagattgtcataacttagcacatgattaggatctaaaacgtatttccgtaacatggaaacatgaaatacattgtgaacggctaaaagtgttggagggaaagctagacaatacgccactagtcaaaccttctcgagaatctaaaaaggccctataaacctagggcataacttgcctctttttccgaaacattt

SEQ ID NO: 120995 - DNA, 1178 bp, Cannabis sativa
  modified_base (1101)..(1138): a, c, t, g, unknown or other
aaaaaatttggttgtaataattaatacaatacattgcttaatccaaacatagtgttatttattatttaatacaatatgacccttatacggcgtaccaaacgagccctaattgtgttcttaagtgtgatttgcactattactcgtttggatcatgtatttaaaaaaatggattgagcttgtattttggagattgattaaagataggtcgttgagcttaattatttttttttttaaatgaaataccagactttattaaaatattagcattttgaatacaataaggctaaggcttgtaaatcagcccaagcattatgttccaaaatgctgcaatcagaaagaaatcgagagtgtctagcaacgacatgtgctactcgatttattgatcgctttataaaacgcaaagatacattaattaacgaggataataaagtctgacaatcaagaataaccaagccaaaagtagagtccatgcgttgattgctacgtaaagcttgaacacacaacatactgtccgattcaatcactatattgtgccagttattacgcttgacctagatgagagcttctttgattcccatagcttcaatagtctcggcggaataagcacctgtttggtacccagtttttgcttcgattaatcgaccagaactgtccctcgccacaacctcgtaactgtaagaaccttcttatggaaataaggcagcatcaacattgaatttgatatactctgattcgggtttagtccattactcaagcttatcaacattgttttcaagagacaatgacaacaagcatgttttatcctaagcatttttccaatgatcaaaagtgacagtagctgatgcaagagcctcattactaaatgtagttttttttgttccaaacagtatcattccaagctttcaagattgcccaacacaacattgcaacccgacacactttatgcacatcatagctctgtaatatgctgtcaaatcatgttccaaaggaagtggaaattaatgcgctagtatgaataccaaaagaagcccaataggagctagcaagaccacaattaagtaaaatattgttggaagttatttaccaggaacttagatctannnnnnnnnnnnnnnnnnnnnnnnnnnnnnnnnnnnnntctaaaacgatagaaaattaaacatataagagtatcagaa

SEQ ID NO: 120996 - DNA, 1034 bp, Cannabis sativa
tttttttaattctaatcttagttgtgtctctaaaaggggaaatatcttgattggattacaaactattattttagttgattgtcattaataaaattctatgatttattaaaaagaaaacttattattattattattattattattattattattatccaaagcctctcaaatgtcatatattttcatttttgtcgttcataacggtgtaaataatttagaatgagaatatttcagaagcatttttttttttgaacaaatttcacaagcattaagcattctatcatatggattttatatgtttatatatatcaatataatatttatatatatttttttcatggtatgtttcacaaatatgacattataatttatacattaaagcttacaagcttacgaccaattcggaatttttacaaaactacatcattttgtaaaaattacaaattactaacgaaactataattaccagttaaccgtaagaaccaaattaccataacccttaaaataaaatgacaccgttaaatcaaacagaactgtattttcctaatagaatagaaaagcttcctagctcttgttttgattaatgaaggaaaacaaatgaatttcattgtggggaagtttagataatgtacttaaaatcagatttttgctacatttttacagatttttcttttttacatttttacggaattagttttattacaagtttttatttgtatttttaagaaaagagaaaaccttattttcccgtaccaacaatgtgaaaacaatgaaaaacagcactcattaattttgtaagaaaaattaaatctgtaaaaatataaaaaaaaagttataaatctgtaaaaatataaactatttattattttgggtatttatgaaatagtccctttcattttattatgttcggactgaatcaataaattaagatttcttttttctagaaaaattaaaacttaaatgtagtattttttttttaatgaaatttagaataattattaatatgtatagaaaaaaaagtattataaaaatct

SEQ ID NO: 120997 - DNA, 3472 bp, Cannabis sativa
aatacaatacaaggggagtaggctattaccatacttacgggatcgaacctctttaaaatatggtgttcactttatttactatttttgatttcttttaattatcttacttaatcgctctatttttgactcactatcgttggttagaagtgaggttagcattttggtacttgtattgagagcaaaaataaaagcctttatcttaagttttgataggtaaacaggatggttgtacaaactcaagggggaggtcttactgattagggcaacccaatggtgagagatcccaatgtgcaaactcctaaaaacacgagaggaccaccagggacaaaccccgagtaagttaatacataacctcctactgtaggccacggagtgacttcccctctagctgggatcacaccaggcgtacaagagactaggaacaccaattcagtagccgatcattccactctcagcactgaggttccatccattactgatactcaaagggcagttggagacaacaccaaactccaaaatctacgagagccacttggacccatgcaaggtcataataacactttgcatcatgatcaaggagacctccgagcagccataaaccttgcatttgacgaaaagagatgtcaattcatagaatggaggaactgggagatggagattatgagggctcaacaagcagccattgatgatcgtactagaaaggctaccgtataaggagggcctaccaagtcaccaatcaacaactggccactacatctgatattcccttaaacagaccagaagggtatgtggctgggcataccgcacaaactcacagtggtcagccatctaatccaaggccacaagtccaaattgtgtaccaaacagtagacggtcagatcctgccagaccatcctttaggaggaatcacacattttaataacttcaccactactgaggttttgggccaacctatcagccaaataagtcaaacaccgaggccacctggtactttagtgtttgataggttgggtaccgcacatgacctcaagactaatttaaattgcagaaggagcctggacggatagaatgttcccttgattgtccaaccaggtatccgtacctaagatccagttcaaagggatccatatgtgacacaggtcggtcaacaagccgaacaagctcatccacttgtgcaagcataaatagatcaacttaaaaatatggtataaggcctaactggcccaaagctcactgatctcgaactcgaccgggcacgcggatcacctttctttcctgaaattgaagttcttgagctacccgcaaagttcaaaatgtcgacttggaaaatatatacaggaaaagaagatcctttatcacacctaaaatattttgagatgcagatggatttgtagggggtaagaggtgatgtacggtgtagaatctttcatgccacactcgcagaggttgcccagcaatggtatttcaagttaccctaggaaagtttaactcatggaacgccttctcatcgaagttccatgcacaattttcttcctcccgccagcttccctcacacttggaagaactggtagaagtaaagcaaatgcttggggaacccctcagagcttacattagcatgttaatgaccgaagccacaaaggttaaggggctaactaaagaaggaagatttgctgcaatactgcggggcgttgagcctcttagagagttgtggaaagatattaaaaggctaactgtgggatcaatggctaaatttctagatcgaacagatgggttcattaagcatgaagaagttgttcagcgcatcgatactgtccgacaaaataaaaatcaacaacacaccacgttggcggggatgttcgtctagaatccacaatataccggcagttcaaattcaaatggaaataggtcaaacaacggcaataagcagggtaatagaaagaaaggcaaattcacaggcaatgtcgagcagcacccaagagaaaatgcctttaaatttactgctttcttagtcctaacagacgacatagagacaatctatttgacaacttagtctatggtgtcgtacaagaaaccatctcccatgaaaaaggatgtcagcaaaagagatacaataaagttttatcgctttcatgcggattacgaccatgacacaaatgaatgtaataatttaaagcgagaaactaagtttttaattagaaaaaaaaccttccttacagaagtatgtcaaggccgaccaaaatcaaagggccacccaagaaaacaataactacaaccaattgatgcccccaccaatggacaggaatttacaagtaatcattgggggtccgcatcttgatggagactcaggcaaagctagagaaaagtatgcctgagccttgtaatatgaacaaaatgaagcaatcttggccatggaagaaaggaaacctaaaataccacgtgtcggggagccaacaataacattcactgaagtagatgccagccacgtcatctttccacacagcgaccccctggtcgtggaagtgcaaattgcaaacaagatggtggcacggactatgatagacaatggagcttccttgaacattctgtttaaaacaacctatgagaatatgggacttaaacttaaagacttaatcccttgcactcagctcgtatacggtttctccgaccaaagtgttgcaccccttggaaaaatccgcctaccgcttactgttggacaagctccgaggagcataactataatggtgaaattcctgataattgatgtccctttggctttcaatgtcatcttaggctaaccggccctatatgacttaaaagatgttaaatcaattttttttatatgtgcatcaagttcccaacaaagagtggagtgggatgtctcaaaggaaattaaagaatcgcacaagaattctataactttgctctaactaaggtcaagaagaaaaatacctccattcagagttcagatagggggaaaagcattgcccaataggaagtcacccaaggcggggatgaagacatggatccccgacttggggaaacagctacaaatgtttggccaatagaagagttgaaagaagtgaaaatcaatccaaatatcccggccaagaaactcaaattcagtgaaggcttgctgctcaaaataaaattagctttaaaaaaattttgagaactaacctggatgtttttgcatagtcacatggggatatggttggtattgaccccactgttatgtctcatgccctgaacattgaccaagacttttgtcccatccaacaaaaaagaagactattggacaaagaatgagcataagcactgaaagaagaagtagacagactgtacgcaaacaagttcatcattgaagctttcgaccaggcttgggtggctaaccccgtactagtacccaagccaaacaaaaattggtgagtatgtattgatttcaccaacctcaacaaggcatgtcccaaggact

SEQ ID NO: 120998 - DNA, 962 bp, Cannabis sativa
  modified_base (936)..(936): a, c, t, g, unknown or other
attaaaataaaaaactaaaatattaaataaaactaacactacgtgacttggcacgtaacaatcaactagttataattaaatacggagagaacggattttcttgttggatggcacaagttggcacattgacattaattatacacttaatcaaaacctatatgtatgtcgattaaaaaatacaacattccaatgctaatttatttatatatttatgtatataataatatttgaatgaaaaaaaaaaagttcgttttcactttttgaaataactagatatataataaacttattacatatatatatatggacttagatgatttcccttacgttatattttattcactttccttcctccatgctataatgctattatatattaggcaaagaataatagtgagtttgcaatagtttgagcactacatgagggttaaagaagaagagtatatatgaatatataattattttagaagaaatatgtacagcatatataattataatcatgatctgagagcatattttgaaaagtcatggaataaccattatactacataaaaaaaaattaataataaatgagcaagtttccactagtagttaacagaataataataaatccaccaagggatatatatatatatatatctccaattttggctcctccatattgtggagacccgcgcaaatggttaattaattacctaatttatatatggaattgttttgaaaaaagaataaaagtatatattattattttcctaattaagttacagtacctcacaattacgaatgaagtcgattaattggagaatcacactaatgatctacaacataaaattttttaagtagtaaaatgacgtacccatttctcacattatataaaattaattaggtgcagagaattaatttatatatatggaagagatttcaatggttatattnttattgtaaccatcatgattacattt

SEQ ID NO: 120999 - DNA, 1353 bp, Cannabis sativa
ctgatgagaaactctatctcatccagcaactgattacacacatttgtgtcatgactgtaattttatggtagcgatagaattttttcatgtccctcttccctaactctttgcaaagaagaggtttacagtatggcactgttgactgtgtcgtcgtataaatctcctcttttggatctaagagaatggagtaggtggtataatctcgcatggtcttcccctagtcttaggcttctttcctccgggggagttactttgcttgccaccattgttggctctctttcctctgctcaaacctcccttcttcccattactctgtgcttcaatagcaagggcttcagtgtttggagacttcttcttgccaccttttgagccctttgttcgggtgacgacttcttcaagtttgataaagccatctgctctatctaagaagtaattcatggcgtatacggccttaatacaaagtttagaccacaaaggacttatctccattaatcccaattacaagtgccataacccttgcgtccttgctaagacttttagtctcaggatacctctaagaacatttggatgtagtccttgaggggctcgtcatcctgttgcttgacatccaccaaatcattgggctaaattaggcattgtcaagaaggagcaaactcgttgccaaaagcaactactagacctttctataagtcgattgatctaggagagagcttaaggtaccaccgttgatctaaagctgtcagcatgacaaggaagattctgcacctgacgttgtctctcacaccatgcagatcagtttgcactttgaagtagtggatcctccttctcagtgtattgatgctaggaagtgtttttgaacttcagaggaatgggaagagctttgattcgtttggagagcggtgagcgccattctctgtcgagctcaaattcaaacaacttaggtgtcgtgatccctttcactaaagtagctaaggtgtcaaattttgcacgatttaccacatgagtggtggtctgtatcccagatggagcttctattatccagataaggtcttctctaaaagtttccacatccaccgttctcttcttggttaagaggtaacgcacgtctcttggtcttccaggtcgttcttgtactttggttgaccctgggtcttttagttttcccttgaccatggggtcatgaaggtaactctagtgaagcttttggaatgaactctagatcatctcgggatgacccgcagcgagagtgttcatttagagcagtgtaatggctactgataactctaagatgtagagttactttgatatctttaaacttgaattttaaacaaaataatagagtaattagtgtct

SEQ ID NO: 121000 - DNA, 2131 bp, Cannabis sativa
taagagtcattcattccgtgggtgtaagggcccaatagaagcttgaagcggggacgttacagttgttatccttttttctctctttctttttttcattataaatattacacttaacatatcttcaattcaattattttttgtatagcaaacccgcatatcaagaacaaaataatgtttttttaacataatatatacttacgtacatacaaaaatgttttgtaaacgtatgtattacagattaatctacactaaaactttcctacccatacgatattatgctaataaaaaaaaattctaaactatttatattaaaagaaatggtcaatgcgtattacaattatgggcacacacgtagtagtttttgaccttagattataagtgagaaaaacgggtaaaagttgaatagaaatgtgggggctaaacgaactgtgggattgtttgtacaatgattatttagagtgaagaaatgaaataagtagcaaaatatgaataggagaaagtagagagagaaggagaggttgatacgatgatgtgatagtgagtgaccaaaagcaaagaaaagaagtaaataaggtgagtttgaagagttcacatgcccccacacacactgttcctccaaaatcttaaatatatgaaagattaaatagtcacgtttccacatttgaccaacacataacgacaaaaccaattcattcccaataccctccaccacaccattccactcacgtgataataaataacaatctaaaaaaattaattaaataataattttgataaaaatattctcatatttacttaaatctagattgatgatgtgggactctgatcaacagaactattaattaagcatgagagatggggttgatctggtgtggggtcatgtttcttcattaatctgctaaagaatgagtgtggcacatgtggatggggtcaaactaaccaggagatacaacattattcaaatatccatgaaccatttgttagatggttataacacctcaagagctataaatgcaaaaagaaaaaaagagtactaacaaagaaataatactagctagtacatgcaagagatacagtactagaagtagcctggttaccatacacgatggtcgtcttccaacactgtaataaaagttaaaagaatatggacacatgagcatcatcacatcactaataatgtcaaaatgatctccttacaaatggcaatactatatatctctaataaggaagcctaagtagaaaatatcacaaccattaagatattcaaactccacaatcaaaactcttaaaaaccaaaacctactacatagagcccacttagaattattgtagcatcgaagggaggggagttgcacaccatgcggagcaaagtcttggatacaagcctaagcaagagtgtgtcattatttacttggttaaatccatactagtcaaagtcaatgtgcctaatttgtagtcatatacacccgaaatatttgttatcattaacggagcgtttgaaaagggaagagaaaattaatagtaattaattaaacagtattgtctatttgtctaagtgtataattatatttttatataatttgaggtaattgaaaatatttcaattagactctttaattatgagaataagtagtaagtgtactgtaatttttaaaaatattctattttaaagattaagaattaaaatttattattttttatgtaattacaaactattttgtcatcattagaattattacttcatattcaaaaaaatattgtattttaaaatataatataattactatacttactaatcttaatagtaattacacttagagagtcactttaaagcacgtttgaaaagtcactatctaattaaaaataattacacattttttgaaatatttgtttgattatgtgtaattagactgtaattacgtgattctaaataattgatgggttctagttactcttttacatcctcatggtctccataaaaattaatattatctgtattttaaaatggtataattattagattgtagaattattaaagatgcacacgggacgggaaagtggcggggagtgttctattagaatattttatttatggaaattattttctaattaaggaaatgattttctattt

SEQ ID NO: 121001 - DNA, 2635 bp, Cannabis sativa
taataataataaaaaatataggtagcatttatataatgcatgtgatttactcttagtgtgtgtatttatatattatatatatatatataaatatttattagcatggaaccaaagttatcatgtttatatggcatttaagatgcacaaataatatgatttatacatttttaaatatttgtctaaaaaataaggtaaggtaatgtctcatctttttatattataacatgacattgttggaattaaatgttgttttcagaataaatcattaacaaactttattgtaattaataattttgtgaaagatgacgagaaaaattaatgggggaaaaaatttatgtattctcttttttagggaaaatttttatgtattcttaatatgtatactttggaataattaatgttgacattgcctaataattgatcctatcattaatgaatggtccttattttaggcaaatgttaaaataataataatacagttgatcgttgagtgtttattgttaaatattaatcctaataataaagttggatcacgtgaaatatacatcagcatttccaattgtgaatcgtttgagtgacacaaaagtataaaccatcaaaataattagatagtgaaaatttaaatagtcaaagaaaaacattatgtacaaaaatacaaaaactgaagtaggcatatttattatttggatgagaaatgctaacggacacgactgatatttagtactttttaagatgcacacggaattgggaattggtagaaaatactctctcgttccattttcattaaaaaatttaggtgacgtttggttgaaaggaacaaaaacatagaaatgagaatgagcatgagaataagaataagaattgaatagaataaaatttaaaaaatataaaaaaaattaataaaaaaattattaaatttatctaatcatgcattggaatagtcttttcttctattttaaaatagaattgtcattccaccaaaatagtagaaagaccatttcattagaatgacattccaacactttattatggaaccaaacaaatgaatagaatggagattgtttcttttcctttccattccatttcattacctccaggctccaaccaaacaccacctactagttctcactcccgttgtttctcattaagaatagggcggggaatcccctaatagaagcaagaacaaaacggaaaatccttcaataaaaaaataaaatttataataaaaacttaaatatataaaatcattaacgggcataaaaattaaaatattatacattaattattattcaataaactaattattatctaacacacaacttaaaattcataaaaagaatactaatatactaaaaaaatggaaacatcgatgtcctcgtcgaggcgtagagtatgatctcagtttgtcccgtttaatattcgggaaaaaaaataatccacatctccgtcctattttctatttagacatagactggaatccccactccattaaaagtaggtccctgcagggcccatccgtgtagaggaaatatacattcttactactttctaaaatattatattattataattaggacaaaacatcatttttagataatattagacaccacttatatttaattaaaatattcaatataaatctttaatgtattaaatatttctactagcaatattttccttaaaattattgttgggtagctcagtagctgtatacactgaaatgttggtttaattcaaagttatcgtataaaagagttagttgtgtgttgtccgactaataaatgtgccaatatattattgaaaagaaaataaaaatatacaacttgtgcacatgcaacacatacccaattaattactttaacataccatccaacaggttaaaaaaaaaatcttaattttgttatgacagccgaccacgtttcttaatgaaaaatataatttatatgggaataaaaataaaattatgtgaagataaaatgaaaaatataaaatttttgaggatataataaaaatataaaatattaaatttataagaatcaaaataaaaaatatatgtttggatataaatgaaaaaatataaattttatggagtaaaaataaaatatttaagtggttataaacatagtttagtaatttcacatttttttttacaaagagatccttcgaataccccttctaagtaaaaaaaaaataaataaaatattttaaatttatatataaaaaattaaggagaattattctatattctattttattttttttaaaaaaaatttacaatttaggttgctcaaataatttatatgtaagttgttataagaattttggttaagatttatgttgctataagaatttctgtgtagaattctgtaaaaataaataaaaaaaaactattttaaagtataaaaataaaaacactccaaaattaatttataaaaaaattgaggtgggactaatgaccccacaagtcccatttgccttcgccttgatgacaatgatcattgtaaatatagtaaattcattataaatttttaaaaactttaagataatttatagtgtatgatcctaatcttagaagttgaattttggtggaaaaagaaaaaaaaaatgtagaaaaaaagtgaaataataataataa

SEQ ID NO: 121002 - DNA, 907 bp, Cannabis sativa
ttcctcccaaccaaacgcctccgaaggatggcaaggttggagcccctgattataaatcttgagtaagagttatctttttcgtttctaaactcaaaatcttcactaaaattaagtgatttctgtgtttttttaagacagggcagatcaaggcaacagagattaatttaacaaaactaataccactttaaacaattaataaaaaaatctcaaatgagtagctcaatcaaataatgaagataggttgattatgtaacagtgctaatatagttattcttatatatgataaatgaatacaaatgttcaagataagacacaaactaaacctaattaaacagatggaagcataggaattttggtagggatgggaagatgaattggagcaaaaacatagggtaatttgtaacgaaacttgaaatcaaaatcatatggaaatatcttgtggtgatgttgttgaaatccaattcttccaatcttataatggtaaagagcaaatcgagaagcagttctactactactgcctagaaaaatgaactcatcaccttctagattaggacacaaaccaataatcctataattatccatacttaaatgattattaacatcccctttcactttaacatcatacaccaaaacccaattcactacctcattaatatcatcatcattcactaattcccaaactttcaaaacagtgtagatggacatattggcaagtggataagatcttgccaaacgcaacctcccattaaccaccccaatacgagcacttgaaacactcaattgcaagaattggtcaatatcgtaattattacttccaatcacataaggcaatttaataaaacgaaattttatgtttaaaggatcaaaactaacaactcctctaactcctctcaccattccaaacaat

SEQ ID NO: 121003 - DNA, 4393 bp, Cannabis sativa
tacacaaatgaatgaaaaatacttatgttactttattgatattgaataatctagattacattgaaatagagttttatttaggccataaaacccaacaaatacaactaatgttccttgacaaaaagtgacaatacctcattgtagtgggaggatttctaggagcccacctcattatgacttggatgatactagtgattacattgtataaataagcaactaagactcaaaattatgagaactatttttcagctattcacatggatcaaccaaaagttttcaaatacaaggacaagaagggaaaaccctgctagttaaatatgtctattcaaaggacttatacaaacttctcattcctagtatcatggatttgatgagatcatcataacctacggcttctggtatacctagtaattaacatagataaaatcataatcataggaaataatgttgaggaactctcaagagcaaaagaacaaatcatttttctcttgcaagcagcttactttagtaaagttctagaattgctaactctgaaggaggtcgcatgacttcttaatatggagttcatttatataaggagtagttttctaaccattcgagaaaacatagaggccaagagaagaattccttaagcatcaatagtatgaggtcttatgtacgctctagtgtgcactagacaagacatctacttttgagtaagagttgtgagtaggcatgagtctaatgcatgacacaaaaattgtataaatattaaatatatcttgaaataagtaaagaggacctaattgttaatctatgtggatggcgttttgaactctttaggctagactgactcaaatttctaaacttgcatcatttctagaaaggtggagcaattatttttgagaagtgtaaaaatctatttgaaatctctaactctaccagtgagacggaatattaagttgccccaaaggctactagagaatcctctaggctcaagaaagttttatacagacattggcatcattcgagacatggattaactgctagtgtgactttgtgataacatagatgtggttgccaaatagtaaagaatctatgaccctaaaaggagtaaacatatatgatagagttattaataaaatcgtggatttgatgaatatggagaatatatataatagttgaaaaggttgatactaattaaaacctgttaaatcccatcaaaatgaaaatgtcatacactacacgtgatctggacatgaagaacatgagattaattgaaatacactttaattttatattagtgcaagtgagagtttgttggatttttatgccctaaataaaacctaattttaatatatagttatttactaattaataaaagagtaaaaattattttatgttgcttgcttcacatgttactttcatgattatatatttaatatataaattttgctaaatccctaacatatgaatattcatgatcataatgttgtcaacaaagtagaaaataatcatgatcgtgtgccttaaactatttagtctagtaatttgtcagtgctcttaatttatactgacatgataatcaatgatgtgatttgctagaacttggataagtggaatatcttttcaaagatattagcaaagtaaacttatattagatgtattggctatacatcacactggatcgatattaaagtggaaaagatatgataaaattattgttatatctttctaagtcaacgatacttagttaatattagatcaattgatctcaaacctgatatgggtaagctttaaccaaattgtagtatttgagttgtttgacatgtttgttactagcttacccgtcaaaaaagcccatagttacaacttggaaacacaagtggtgcaattgagtggggagcattagtcatatatatgaaatctatagcctataagtttttagaagtgaaacaatagttttcttaaaacttggctaaatgagataaatacaagagctcttatttcaataattatattagtttgctaaaaatatcatttataaggagctaattgctttaaggataaaatatattgaatgataaactggtaaatttatcccctcaattgaaactatataccaaggataatttaatatttacgttgaaataatagataattcatagtatatctatattagatatatagaacattttatatattaaggagtgcaatactaactctatagtggagtcaagatgaattaataagttaggaaatttacttggtaaattttagatctacatatgaggggcttgatttcattagtgataaatgagatctatgtccatttattagggtagtttattacatgtttaagagttatttaagaaaattttgttcgaattgatagttgttttctttagtttgaggaaaaatataataaaaatataaaaagagtttgacaaacaagctaaatttgtgtaaaagtgtgattgaatggagctaattttcatcttggtgagtttggcaatgttcgggggacaaaaaacgggccaaaaaagaaaaatttggtaaaacaaggcagttagggccatggccatagaggtggaaattgagcaaaaaagggctaaggtctagggttccaccacagggagctatgactcttgaagcaaaattaatcattttatgagatttaaactaacatgataatcagtgatgtggtctatttacgctaaggcaacctggtatgtctttttcaaggcattggataaacagactttaattggatatattgatttatatcagattagattaatattgatagaagaagagatatcataatcatgccattatatctattcttattcaatatcacttattttatcgtagatcaattggatctatatactgacatgattaagctttaaggtaattatgttatttaagttctttgacttgtttcttaagagcttaccctattggctagcccatacttacatcttgggaacatgataccataattgagtggaagtgttattcataaatatggacatctagagattttaagatttacttaaaacgacagtttcctttgagcttggtcgaagtatttaataataaagctctcatttgaatgattatattagtttactgaaatatcattatgtcgactaagtgtgttaaggttaaaatataattaaagggtaaaatagtaattttattccctatttattgtgggctatctatagaggataactaatcaatatgatgaaaattgtaggttgtatagaggttgtacctctattaaaaacattcttaattcatttgaagccttgtaggtaggtgtatgggtgcctatgtttatatgttcaatgcttttgttatagagtttgataactcacaaatattgtttcatgagtaggtaaaggaaaggcaaaggctaagcaacaatgagttcagagcttgtgggttattgtacattttaggatttttaggcctagagtgcttgattttgtgatgacatggacttttatttggtagtcactaggtgatacttttgtcataaaacatatttggtgtattgttgcaatcttttaaacgggattgtgaaaattgtgtaaagttatgtatttattaaagataaagtttaattcaaaatttttaatttatcatatttttcaagaaatcctttaattgcacagtatctagcaaaatcactgtagtccatccaaaaaagtgggatgttataatttggtatcaaagccttggcccagcctaagtgtggttaatgtggtggtgattgtgacagtcaatgtcttgtgatcgggaaggcaaaagaccaagagctgtgcaatcccacatccactggaggagggttaagtgtgatgattctaagagtgtgtaggtatgggactacgaagttaaagatgacttaaatggattgattagtactacctttatcaagaagatgtatcttcttttcggtagcccatcatgaaagaactccaaagctaagagttatggacctagggtaatttcagaatgggcgacctcctagcaagttttcccaggaagtgggcgagtgagagaaaaccttgctagaaagactcgtgttggtctgtaagttcagtcatctttccatgaagcaaccaagagtgttgtaccagtgtataagactcattagtttgtgggggaaggcccaatgtaggcttgaagtggtcatgctacaaaatgtgtcagaggcaaggttgtctacgaaagatcatcgagatatgtacattcatcattagaggcaagctcgtaaccaacaaggaactttcctaggcacgaggttatgtcattcatggatgcatattattgatataactagataaaaaatgcatgtctcagatcaggaacataagagctttgtaaccaacatgggacttta

SEQ ID NO: 121004 - DNA, 2240 bp, Cannabis sativa
gcatggtttttcaagcttagtacaacaatccttgattggggttttgttgcctcccaagccaatgcatcactcttcatctacagatctgattctgatgtcattatcctattgatatacgtggatgatattatagtggcagggtcatcttcttcaacaattaatgcactccttgcattcctcaatacacggtttgctgtcaaagaccttggacccttgcatttttttctcggtattcaagtccatcgttctctggctggtattcacttatctcaaaccaaatatatcctagatcttcttacaaaaaccggtttccttgataccaagcctgtccacacgccgatggctcttacacctttgtccatgtatgatggtgaaccccttcatgatgctacagcctatcacagccttgtaggtgcattgcaatattgcaccttaactcagccggatgtctcctttacggtaaacaaattatgccaatttcttcatgcacccaccacaactcactatcaagcttccaaacgtgttcttcgatatctcaatggcacgactcaacttagaattctcctccaacccgaccctccacctgagcttcattgctttacggatgccgattgggcttcctgtcccgatgatcgccgcagcactagtgcatattgtgtctacttcggtttcaatctcatctcttggtccttggctaaacagaaggtagcatctcgatcaagtaccgaatcggagtatcgcgctcttgccaatggagcctccgaagtttcatggcttcaatcacttctccaagaactcggctttccactgcccgtccctcctactcttcattgtgacaacattagtactctccatcttgcctccaattcggttctccatgttcggactaagcatgttgaaattgactaccactttgttcatgaacgagtcaagagtggtcttctacagcttcgtttcactccctccgaagaccaagttgttgattgtttaactaagcctctcactgcctctcggtttcagaagcttcgaaccaaactcactgtgcttcccatccctgtgagtttgaggggggatgttaaacaataaaatatttcctatgctatttccttgtatcttttcttactttatttgtgaaggtgacatgtgtcccttaatgggtctttactttactatatatttgcttgtactgtgtattattttctcaagtaatagcaatacatttttcattccttctgacatctctctattcaatattaatcaatcaagcaataataaggtgatccaagcaattctaaatctgattttagattacctctctcaaatataaaatctaaaatcttacttggttatacactccatttttaatgactttggcataaaattcaaacttcactaaacactctttttgtgacaatagtacagctattcacatctttgaaaatctagtatacaatgaccaaaccaagcatatgaaaattgactgtcatcttatccgaaaaaagacaatgacactatcaaaacgaaccatgtttcctccaaatcaaacatattagacatcctcacaaagccgatctatttcctacttatttccatgaacttgtatccaagatgagtattgaaaatttctacactccatcttgagagggccaattaaaattattaagattagttcactactataaaattagtttttcccatcgatttataagtgtcatttatactatttcccacattatattagttttgttcatttagagtcagttagttgattaattgaattcattgcttcacacttattttgtccatatatatatcattcaatcagatcaatataccatttcttttaatgtttctcaatcacaaaacttaacaaaagaagaattaatagaaggatgtgaaaaaaaaaatccacaagaacaacaacagaaaggtttctaaggacttttttttagtgtatatatatgtattacaacacaattgtaaatatattgtgtgtcaaatgaagattttcatttcttttttttttttgtatgttttaattttaacactatatatttaaattttacattaaagatgatcttattattattatgtatattagtagttaataatttatattatttattaaaataaaatacgtacgatataagagagaagtaaattaaattatatatacacaatattcaatctatatataatttcaaaataaaatgaaagagtgcaagttgtgttgtatacaa

SEQ ID NO: 121005 - DNA, 1136 bp, Cannabis sativa
tgttggctacttggtctaagagttctccaacaaagggtgatgtttctttccccaccttgggtgctagccgcttctccaaggcctcaatgtctaccattggcccaactaggatagtggcgatcaaataggccttcaaaatctcagccctcttaacgaccgaaagcctgttagctctctttcacagagttctcctttcttcctcattctccaaggcatttgcagcctcctgtgctctctgcaaagtagcggcttaagtggaacaatcttcatggggaatttaaagcctacagaaggaatctcgggtaggaaagtaaactgctgagtccatgattgatgttgttgttggtattgctggttgtagtgttgctggggttgttagatgatgacggccgattgggtggagctaggacattggctcactgagaattatccccccctttgggacacatagtttgaagtatgctattttttcttttccttttttcctctaagacctcctccactagcgaagcctgtcgggtctatttctcttgatgagcccaacattctcgctttaggcagtacctataaacacaaccaacacaggatcagtaaatcaatccaaagctacaatgtcatttactcattttttattttttattttaaatttaccataaaattatttctcaatttaaaaaaaatggacatgaacagttttgtgatgtagaggtataagattaaacaggggtatcaattgctattctctgaatatgataaattgccttggtgtaatctagtttgggatagactcattattcttaaacatagatttatattttggtttgtattttggaaaaggctaaactcaaaagagagagttagcaaatcttatatttcatgtaattttacatataataagtccatgaaaaatatattgagctgaaacttttttttaaaagaaatatattgagcttgaccggcacaacatggtgaattatatatttcaacatataaggtatattttttaagctgattagtataggtgtcgattggtgtaacacttttattttctaattttttaatcacaaaatgaaagtaaaatttttatttttgaaaaataaaaatgcattctgtaaccatttttttttttttaattt

SEQ ID NO: 121006 - DNA, 954 bp, Cannabis sativa
atataaataatattttattatttattaaatataaataaaaggtcacccataaatttctcataaactaagaattttagttatatagacacactttatatagaatagatatatcaccgtgtggtttagggctatatagaattgtatataattaaatgattaaaaaattaaattatttcatattgtggtttaaatcattttaatagaagtttataatttaaatatagtaaaaaaatttcataacaactgactaatatatctatagaaaactgattatatatgattttaaaattgttgtcatcacagtcttcaagtcgtcattacattcaaaactgttatcatcatcatatctcacttataatcttcattatattcaaagtcattgttgtcatcatcatatctcgcttatctctattgttgttatcactgtatctcatttatagtcattattacactcaaagtcgttgtcatcaccgtatatccacttatatgcatccaatcaaacataaataattataattcatgtaatttttctttcaaataatgtgtgtttaaaaattagatttttattttcttcgcgtgcagttgtattttatttagtgataattaaatcataaaactatattaaattttaaattttagtattgttttctcttaaataaatattttactaaaaaaattctcttaataacacacaaaaattattatagtcttaatttttttaattattttaaactaaataaagataatttttaatttattatttattataaatatattatttatatgattaattttcaaaatatatattgaataaattaaattaaaattaaaaaatataacaattgattgttttattaaaagggaattttacaaaaatactgcttttggaccaaaactttacaattatactgggacacggcaaaaataacatttttactgccccagcccaatttc

SEQ ID NO: 121007 - DNA, 1648 bp, Cannabis sativa
cacgtaaaaaccctgtgttcatatattatttttctatagcttttactttttctgtgtgtaattattaccgtgaggctcaaattcggttaacgaaaatttgcgttaacacaaatatttactgcgaaatgctcaataattaaattttttaactaagcaacagacccacgaagtatgctatctatttaacttaggaaaagtattaaattctgcagagacaagttaatctaagcaaaaaattattttggcatataattcatttaacttaagttctattcttcataaaaaataataatacccgtcacaatatcattaaaaacaatttattagttaaacttagaatcctagactattgggtgaatagaaattgtaagaatcatagtagaataatgtaaaacctaatttagcagccgtctaaacaagatcaagacattaatcataaaatcaagcatataagacaattcaatatgaaggaataaaataataatattaatcaaaacattcaagaacttatgtctcgatttttgaaataacccttacttaaagaggactactccataatcacaaacatgataataagtataattacaaatgaaaattaataagtttaagaagaaaaactagatgaagatttagattctactcttctcttgagttctctccttcgaaagcgtaatgaaaacttgctgaaatatactttaaaagtcttatttatagaaacttaaaaataaacttaatttaaacttaaaaattgatttttcgtaaatcgtatagacgatgtacggacgtgagtgtctgggtgaagtttaagtggcaccttggtgctacttcctgagttgtcactatcgcgtgttcatatcagtattttacccataaattcttcaatattgctcagaattagacgattgaagatgttttgaaaagctaagaacgagatctaaaaacttttatattgagctctattatcccgatatttgcccacctgacgtagcatgcttatgtggacaatatcaatgtcacgtggcagtacagctcaccaacaaggaggtcaagtcaacaccttagcaaataggggtcccaacactcaaatgggatgacaagctacaacccaaccacctcaagggggctgaccagccaccccttgctggccctatggtttgccagcttctggacagcacaaggccgaccagcctgcatcctataggtgtatggccggttaggattggacgtggtaggactttggtgcatagccttacacgtggattgcaagctagactacaaattaggccttagcagcccacgaaatacacaaaaaatacttttttttaaggggcattttagtcatctatattttaccaatttaatatgtaaatatctacttattttattttctaattagggtttaagctctcctatataaagagccttaactcaaccctaaaaccctaagtcattaagtaataactaagtgagatctaagccaaaaagctctaagtctgataacattctctctcacacacacatgcccactataacatccctcaatacttgagattttccatctttgattcctactttgtaaccttaagagagctatatcagatcccacctatagtgatttgaatattattatctctcagtatcaatacaa

SEQ ID NO: 121008 - DNA, 3126 bp, Cannabis sativa
catatatcccggttttttattttagcgaaaactgggataaaaagccttaaaaaccgggattaaaggcctttgtttgtagtagtgtattgtagtgtgaattcataattgaagtaataattcacctaataaactagctttgagagaaattcattgccgagagagagagagagagagaaagacatctcattattttaagacattataaaagcaattcaatatattataacatttcatcatgaaaaccaacatataaaattgtagagaaagagatggggaaaagcaaagtgttgatagtagggggaactggttacttggggaaaaggctagtgaaggcaagtttagaagagggtcatgagacgtatgtggttcataggccggagacgaatgttgatatcgagagagttcaaatgcttttgtcgttcaaggagaaaggagcaatgctagtctccgcttctttcaatgaccatcaaagccttgttaacgctgttaaacttgttgatgttgtcatctgtgccatttcaggtgttcatgttcgaagccaccatattcttcttcaactcaagcttgtagatgctatcaaacaagctggaaatgttaaggtacgtaggtatagctagtgacttcatactatcccgccaagagtggtcatatatacagttgtactgtgaaaaaaaaaaaaaaacagttgtacttgtgttgtgggagaaaacaattccagcagtgttgtgaggatttctcagatcaaatgacctagaaattaggccttgtatatatgtcccctgtttaaaacaataacatagtctatactaaaaaaattagacaaaaattacagttttataataaacattgcgtacttataccgctaaaaataaacattaggtttatgtcacttacaagcttaaaactttagatacttatgccgctttttaccataatatttatttatcttaaattataattataaatgtaaacatatttataatatttattttagtttgagcattaataaaattgtttttttgctttcttatcaaacaccaattttttttttcaattgaactttttttaaactatatatttattaataattcattcataatttttcctctttgaaatatttatcaaatttattatttttttttccattaaataatgataaatcaatgatgtaataataataaataaaaatataattaagtgcagagatttttgccatccgagtttggatttgatgtagcaagaatgaagaatattacaatgggtgcagaaagagtagtgtatgatgacaaaatggaagtgagaaaagccattgaagaagcaaacattccttttacatatatttcagctaattgttgtgctggttacttccttggcggtttggggcaacccggtcgctatcttccctctaccgactctgttcttttgtttggagatggcaacaaaaaaggtacatataattgaaaaatttacattatagaccaaaaattaaaaaaaaaaaaaacaaaaacaaaacaaaaatacctcaatatggattttttttttttacgctttaatttcttttatttacaaaaataccctttcaataaaatcaacattttttttagttattttatagtttatttatagttgtcattatcatgttatttttctaattgttttattgtttacttatatagttgatttatagttatcgtgacattgatttctcttagtttttagtagttttcttactttttgttgagcaaagtatatttttgaaattttaaaattttataagcgtatttttataaatataaatttttagatcataaaactgtaaacataacataaaaagagtatttttaaaaactcccccaaataattatatatatatatatatatatattagctacaagttaataattaattagcctaaaataaaattaatatacatatggcagcaatatatattgatgaagatgacatagcaaagtatacaatcaaaaccatagatgaccctcgaactatgaataagactgtgcatcttaggccacccaagaatattttgtcccaaagagaagttgttcaagtttgggagaacctcattggcaaagagttgcacaagtcatcaatctcaaagcaagagtttctagctaatttgaaaggtgagaccttaatataaaatatatatttattatgattattttcttcctaattactagttcttatatcaaaatcacatgttggcctaacgtaattacttgtttgattttaatttgtatggaaatgaagatttagattatacttggcaagttggaatggggcattactacaatgtgttttttgaaggttgcctaacaaattttgaaataggcgacgaaggggtcgaggcaactcaactttatccagaaatcaagtatgtttcggtatatgtttacatgaagcgctatctctaataaatgacacatatagaccttaatataattttaagtatataataaagtctgttagggtttttcattcttgaatccttaacttccgaaagaccttccctgagctcaggcgtggcttggttagggtctgtggttttactactgcaattagtcttgtcactgtgatatagttttgtgtgtcttttatttaggttactgtgataagtcttatctctgtaacatggttttatttttgtttcattgttggttcgttttctttatcaaatcattgttagcggttgagaacaacaagctttttacggtttaatgcgttattaatagtgcagttacgtaccttgtattgcataatagtttattttatttaagtttcttttgtaaaatatgatttgatcatcagatggccgataggttgacttgttctataaccctgatcatattttcaacggaggagatcacgattggattgcagattattattttaattgattggtattaatataatttcttaataaaaaatatataaaattttaagggttccctaaattatcaagaattgtaatatttatattgtattattattatatattgcaaatcaatagttgttgtgactaaaaataattagtaacaacttgtatttaaatactactcacaagtaatattttgttgtgactaaaagttacatttcgtcacaaaa

SEQ ID NO: 121009 - DNA, 743 bp, Cannabis sativa
  modified_base (698)..(703): a, c, t, g, unknown or other
gtagttttaccaaactgagtaaattgctttacttcgtttttttattatttcgttgcgcttgaagtttatcgtttttctgaacaaaaactttgtcgttgaatcatattgtgccaatgccatttccctggcttcgggggaaagactgaatagtgtggagacttaaaatcttgataccattatttggaacattagaaacttaattcttagttggttgtaatttctattttattttcagagaagctaattctttagcttattgtttactcaaatttgttctcgatcaaggagttattgctatgtggaatactgattttttttttctgttgtttgttctataattaatgcagacaatccaattcagatgtaactttcttttcttctatgttaaactttccaaaaagaaaaaaaaaacatgaatgtgttatttttttttttttttgataaatcagatgaattgtattgcaccaacaatctttttacaacctatatgcaccccaatgagggccataatctatacaaacagtatgtattcggctaagtcaatacatgacaactatattttcattacaaagtaaggaaccaatttctatcaatgctcttaacttttctaggcatgaacatgaatgtgttattataatgataataacttaatgagaaatgctaaaggacactagtggtgcctagcaccctcctacgtnnnnnnatcgctattggtctaactaagtatcgagtcccatataatt

SEQ ID NO: 121010 - DNA, 1507 bp, Cannabis sativa
  modified_base (27)..(30): a, c, t, g, unknown or other
taattaatcacgattttcattaacctnnnngattagcaacgagctgcacattatgtttaaaatcacgttaacatgcctatgctagttagggtgttacaaaattacttgaaatgatctgacatgcgagattcagactctaaaaattgacgatttttatcaagtgtcaatttcaaccattggatcatcatcaatggccaagatcggctaaaaataattttttttcatatttttttaatttttattattatttaaatggacctcctttcctataaaaggagagatcttcgagttcattttacacattcctctaagtccccataaggttagagcatctctctctaatttatctctctattcaagccccacacttagccagcttcttataattctcgtgagaaataacaactcaaagtagatgtagctctataaccgtcacatgacggggagtgaattactataaattttttgtgtctctcttacttatacttaactctgattacattctttctaatctagtgagcaggtgtggccagatttctatgtccaaatttttgtgtcaatattttggtgctttctttgagagccacaactcgagatcccaatcaagatggttgtaacaagattaacaagtgttgaaagaagcataacagctggccaacccactgggggcacgccagtcactggagctggtaacatgacgacgcctgcatcccagatgccaggtggaggcctcataatcagctccacaactcgtcccctaaggccagcaaatgttggcattaaaaccagtgaccaaattccacttgaagagccacgagtggagttagaagaccacaaggaggctgatcctctggttgaacaacttagccatatagtggctagcttggaacaatagctgcgagatactctcgacaagcaacatgaacagtttcaaacctagttcatggaacattggataaacgttgaaaatcaatgtactaaacaagagtagtgaagagcaaatcttgctcaacgaatttgggaatcctatagatccgataacgaagtgactccttcaagtgttgcttcaactagggctggaaagaaccctcatgtgccaactcgccacgtgggagcaagcacacaagggaaaacccttcatgcacgtggtacttctaccaatcttggtagttgtactgctcaacatgcagcaagtactgaggatccccgaaggaatgtaaactacgagtgagcgtccgaaaggactcaaactggccctccacctgatgtggagtggtgtgttagggaagcggtttatgagtgagtatttgagaggactcagactcgagaacgtgggcctacagggccaccacctgccgctgacaagaccaactgcaaccctgcttggagaaatccaaacaacagaagaaactgatctcctccacgggattcttcttacaagtctaatgattctaggcctcgtgaccccggaagggggaaagtgttgaattttatgccctaaataaaa

SEQ ID NO: 121011 - DNA, 628 bp, Cannabis sativa
tcaactcaagtctctgataggacgtgttttcaaggcaaaatacttccctcacactgattatctttcagccaaacttggcaacaaccccagttatgtgtggcgaagtatctggggcgctcaaagtgtggtccgaactggtgctattcgaacaattgggaatggtctcactacaaatattacttcccatccatggattccacattcttctaacaagtttgtatcatcatctcatccagctttacatggtcatactgttgcttctctctttgcaattgatgaaagaagatgggatgctgaaatcattaacgacttgttcaaccatcgagatgctacactgattcttggcattcccttgtcaccaaatgtcgatactgatgtctggtcctggactggagagcgctcaggcattttatctgtgaaaagtgcttacaaccttctgcaaaatagtaagcctaagcgccaaggagctgataactctgggttctggcgcaagctgtggcatctaaagagccccccaaaggttaagaacttcttgtggcgtgctacttctaattgcctcccaacatgcctccaacttgtgtcaaaacatgtgagcatctcatcctcttgcccggtatgtaactcccat

SEQ ID NO: 121012 - DNA, 828 bp, Cannabis sativa
  modified_base (743)..(748): a, c, t, g, unknown or other
tataaatatatgtcacgttctttattatatttatatacaatacgtataaatatatatcatgttggacacattctatgattagagagcgacttctcaatgtcatattaaaatggtcgatttcaattcatgtgaaattgtagtgaagaaactaaattaaattaatagtatatgttggtacaattcctaacttgtaggggtagcaagttatattcctatatttgtgtgtggttgacacgtttaattagccaattttaacccgatcattacatatttcgtgttaagaaatctcagtcttatcctgactcggtttgcatgttgactatatttatcttacacaatatgttgatcaacataattactatctcacatttgatttttgtaaattttgtttaaataatttttctttctaatttttcagtaaaaatgaatacaaatttaattataaattagtacttttagtaatatattaaatataacaggtttatttgtgttacatgggttaattctaacccaaacttaaataattatcgtgtcattcggatttaactcaattttaactacatctactttaacacgtaataatttgtattgagttcttatcgtaacctaaattgctaccctaacttatcatttatcaacataataaacatcttaatataaaacatttacatggatgatttcatggttaaaataaattttcaggctcacattacaaaaatttttacttttagttacaacaaaannnnnnactaaaaataaaaaagttgtggctaattataaattatcattattgtattgtgactgaaaggtctgtggctaaaagtatta

SEQ ID NO: 121013 - DNA, 962 bp, Cannabis sativa
  modified_base (906)..(906): a, c, t, g, unknown or other
tttttttttttttttctgttttctgtcttcaaaattgtattttttgaaatgaaaacaacaaaaaaaaatgtagttttcaaaatacaagacgtgtttagttaatattttttaaaaaattgtttttagacttctttttagtaagaaaagctttgatattccataccttgcttgattcaatcccaacccccaagtccattgcgacaccgactttggacatcggccttggtcccaaacctatacccagacccaaaccccggccctagaccccaactctagatatggactcgaaccccagccccgaactcagactcaaactcaaacttgaacccgaacttgaactcaaattcaaacccgaactcagaccctagctccagccccaaacccaaatctcggaccctaaacctgtatgcaaaccctgaactccaaactcgggtatatgtaaaaaactaatataccagatttagacttcaactcggaccccaaaccccaaacctagatccaaatcccagagctcgaacccgagtatatgagaaaatgtaaaaaaaaaagaacgtatcagacaaaacaaaataaaacttgtttttgaaataggaaataacatttagattttttttttaattgttttctttaattcagtttttagaaaattgttaatgaaaaatttggccaaacattctctatttgtttttaaaagcaattttttatttttaaaaagtgaaaacaattttttataattttgattttttttttcttttagtgtagggtagtagtattaaaatttttgggttctaacccatacactctccctttttctcatcccaggcaaaaaccatcttaatgattcagtatttgtaatttgtaaatgataaggggctcgtttggaatgccgtattaggtcgtattgtnttgtattgtattatattaaattgtattttatgcaatatttttatgtaaaactatat

SEQ ID NO: 121014 - DNA, 4566 bp, Cannabis sativa
aaaactagttacttaaaaaaaaatcagttatgaaaataataaaataatatgtgtgtcagaaagtgattaattaaaataaaataaaaattattgttcaaatatcataaaataataaaactggttttatacaaactaaacaatatacaataaagtagtttgggactcaaagcactcttcgattgaggaggtggtgtcaacagcttttcttaactttgtctcttggagtgatgctcaaaaaaagctctctacttctcctaatgacttgggtcatgagcgatatgttgagcattggactaaaccggagttaccttatatcaaagttaatgttgatggcgctattttctcagaagaaagtcgttttggtttcaggatggtggctagggatagcactggtgttgtgttgaaggcagttcaaatgtgttgttcgggttcttggggtcctctaatggtggaagcattgggactaaaggaagctctgagttggatcaagaggaaaggttggcatcatgtcatagtggagtccgattgccttacacttgtcaatgatattaagaatgctaagtctttaggggttggtaatggtggatgaacattaccactttgagctaagacccttgaagaatgatgcactataagaacaagtttcccaggagaaatctaaggtggaaattgttaaattagatctcccctggacaacttgttttacagtgttacaaagaagatgaaaactacaagtaaaaggctcgtggccttacccactcaccagacacaacaacattaacaactttgtgtaaccgaatttctgttttgcaacagaaattctgttacacaatttacaactaaacctaatgctataaaaggagggaagagtctcaccaatctcttatgttttgagagataccagaaagccgcagacccaggattgagagaggagctctcaaagttgttgttttcagttgtacatgcaaaacaaagaagagaaagttagtgagaatcaaagaaaaaaaacttaaagaaagaaatgagagaaatatcagaaataccagtcgagttgtgacttggatttctcacataatgtaatattcttcatcaatagtgtagatctgagatcattcttaaaggcgagctcgaaagagaacgtacccctggatttagggcgaacctctataccccttgtgtttgtttttctaatctctctttactgtttttacttttgatttgtgtgtgtatgtgtttgtgataatttctggggaaggattctggggatatcgatctggtttgatggagaaggagatctagttctagggtttgagaaccagagagaaagagaaaaagtttggtcaaactctcgaaggttctttggcaagttctgagctagggttaactcacttgccttggttttgttccacggagtaggacaaatcgttttgacttaaacaatttgtcattcagggataaacaacaaggtttcttggtcgtttgattttattgtatattaacttttcttggacagttttgtcccaattgtttgaaacagatattgagttggtgtaggggcattcttgggaactcaggaaaaacttacagtggtatcgaagctcttgttcgagcattattcaacttaaggaaggaatcaagaaaagtgacaaagactggaagaagaagaatcacaacaagctgttgtggatagtcgaaaagctgtggaaattccactgaatgatcctatagaggatactcaatcaattcctcaaaactcaactcattttaattttgattatactaatatgagtaatatccaagttgatattgatcgttttgatggatctggtgattataggatttggaggagaaagataagatccttattggctcaacagaaactacttaggattcttgaagaccctattgaatggccagaaaacactttaaagatacagcaagaagagctgttagaaacaactgctgggatcataattttcaatctttctgatgcaattatcagattgattgataaagaagaaactcctgccaagatttggaagaagcttgaagaacagtttcaacaaaagtctctaactaacaagatctacctaaaggagagaatatttgggttccagatgagtcatacaaaaaccctagatcaaaacttagatgaatttcaaaggatgcacattgaattggcaaattcaggagagaatggggctctaagtgatgaaaatcaggcaataatcattctgaattcattgcctgaatcatatagagaagtaaaaactgctatcaagtatggaaggatttccataactcttgatgaagtcatatctgccctaaaatctaaagatttggagatgaaaagtgagaagaccagttctgggaatggtgaaatgaatctgagtaggggaaggccatctcacaagaaaccctatcataacagaggaaggagtaatagctcaaatcatcaaagaggctcaaacaaagggaagagtaggtcaccatcaagagattctggtgacactactggttgtttctattgtggcaaaactggccactataaaagggattgctatttctacaacaagtacaaaaacaagaaaggggcaagtttctagaaaaatcagatcaaaacaaatatcagaatgacaagcaacaagaagccaatttctcagatggctatgacagtggtgaagtctatgttgcatccacatctttcaaagatgattggatacttgactcttgatgcacatttcacatgacaaactctatgaccattttaactgattacagagattctaatggaggtaaagtcattctgggaaacaataatacgtgcaacatagaaggctcaagtactgtcagttttaaaatgtttgatggtgttgtcagaaccctaacaggtgtaaggtatgttcctaatcttgctagaaacctaatttttataagtgttctagatgacatgggtattgtcagcaaaattgaatcacgttctatgaagctaagaaagggagctatgaccattataaaaggccataaacatgaaggactttactatatagatggagaaccagtgactcaatgcaaaaatgcattcactagtaatccagaggacctaaaagttgttctatggcacagaagactgggacacatcagtgagagaggcctacagatcatgagtgatcagaaattactgggaaaggatacagtaagtaaagtagacttttctgagtcttgtgtcctaggtaagcatcataaattgaaattgaaagctgacacacataaaactaaacacatactggagtatgttcactctaatctttggggaccatagaaaactccaacacatggtggtaatgtgtactttatgtccattgtagatgatcattccagaaaagtttgggtatttctactcaaacataaaaatgatgcattgtataaattcatacaatggaaaacacttgtggaaagtttgactaatcaaagggttaaaaccctaaggactgataatggcttggagttttgtagtgatgaatttaacaggtattgtggatctgttggaattcaaaggcacagaactgtgaggattactcctcaacagaatggagttgcaaaaaggatgaacagaaccctaatgaacaaagtcagatgcctattgttgcaatctcgactctctaaaggtttctagggagaagctttgttaacagcagcttatttggtgaacagatgtccatctagtgccattgaattcaagacactagaggagatatggtctggtaaacctccatatctctcaaatttaagagtttttggatgtgctgcttatgcacatcagagtgtgttaaaattggaacctagggctatgaaatgtgtattcctaggttaccctgaaggcactaaaagctacagattatgggtaagagaaaaaaagggatttaaaactacaagcagtagggattttatttttaaggaagacttatttccttgtattacaaactataatactttatctagtcctactgtagatactaaccctgcaggcacatgaatggatatgcaaacaaggaatacaacaccagatacagttcaggtggaaccagaacaggtggaaaacactcaaggagacaatatggaaggaaatgaacaaattcaggatgatactattcaggtggaacctattcaggaagaaggacaagaagcaaatgtactacaagactaccagtaaactagagacatagctagaaggattcctagacctacacaaagattcagttttactgcttgggaagaagtgctagcctattctttcttttgtgctatgggagtagaaatgactaaacctagaacctatgaagaagctatgacagacaaagattcaaagaagtggtctaagggtatggacacagagatgaactctttgagaaagaacaagacctggatacttgttaagaaacctaaagggaagagcatagtttcatgcgaatggctattcaagcacaaagatggcttaactgagactgatcctaagaaatttaaggcaagactagtggctaaaggggttacacagaaagaggggat

SEQ ID NO: 121015 - DNA, 1613 bp, Cannabis sativa
  modified_base (216)..(225): a, c, t, g, unknown or other
aaattctaactattcccgacattctcaatgtctaaattattgtcccgctatactaaaaatactaggatgtgaatctaatagccaaacactgcgttctaatgttgccggcacaaatcaagcaaaattatgaaatttctatatatgacatataaaggcattctgaattcaaatatatcatcataaataattaattcaatactaataaataattttcannnnnnnnnnctaattatctgctaattccaaattaaagctaggcgttctttacagctaagaaaactttcttcctaagctttgacatcttacttcttgagatccatcttagaagcttttttaatgaatatgtacttgtcctccatcgtagccaccctttaagctgatcaaggcatttcctgctaaaattacattcaaagaacatgtgttccacctatttagggctatcaccacagaggaagcatgttttttcattaaaaattttataactcatcaatctatcttttgtttggagacaattctgaacaacaagccaagtaatgaaattgtgtttttgaacattatatctgctccaaatctctcggctccacaccactttgatcgaatcttccgacaaaactttgtagcatttttggatactataatcctggttcataagtagctggaatttagggatgtttatatttttctttgattctaacaatctgtttcttatagcagctacttgagattgaggcattatagctcaccagttttccttcttcaagtagacactatgtgtccaacacacccaaagattttttttttgatgctatagctcatatatgcttcccaataactgttgtgttccaaagaaaagtattcctaaagcccaaccctccttccgatttttgtttacagaggtggtcccatgccacataaccaggacaagatgtttctgtaatgcctttccataaaaaagctcgacatatcgaattaatcttcttcaggacagttttccataactaggacaagttttttttttttcctataagataagataaatgctaaaaggtactgctggtgtctagtaccttttttagtatcataccgttattgatgtaattaagtattgaatcccatataactaaaaacaataatttttagaaaatatagctaacctattgtatggcaccacctatagaaggtgttgggcattagggccaatccaagcatatagcagcaattgtacaagatcccaatattaaaaagttttttttttcatcatccatttatatataatataatataataaatatttttttttttataacatgtagtatacataataaatattcataaaagtaaatatacacttacaagaagaaaaaaaaaattgataaaacattatggtctcaatagacataattctaaaattcttgcctattttagaattcataaagtgtttttttttttaaatcaatatatatctattctatataaaatatgtctatataaccgaataattggtttatgagaaattcatgcatgactttttatttatattaaaaataaaatagtttttgagaaattcatgagtcactttttatttatatatagtaaaataaaaataaaataaa

SEQ ID NO: 121016 - DNA, 4535 bp, Cannabis sativa
  modified_base (67)..(72): a, c, t, g, unknown or other
tttaaaatgcaaccaaacaaatgaatagaatgaaaattgtttcctttccattccattccatttcatnnnnnncaaccaaacgccaccttagttcttactctgtgtaaaccatttatagatgatcattgattattagataaaaataatggataactaatactatgactatattaggtatatagagcgttcagtgagatcaggagtgaaatttttagtttataatggagtcatgagcaattagtaagctataaaatttatttgttaaattttagatctatcttattgagagcctagattttgtggcccatgattccagcaatatccgggataaatattaagttgtgaatctcaataattgatttattattaatcaattagcattcacattattgactttgttaattataataatttttacacttggagaaaataaagaagtagaagaagaaaaataaataaaagggtaattttattagtcatgagactttgttgtcaagttaataaaaatatttaaactatattcttatttaatttggtgattattaaattaaaactagcatttaattataaaaaataaattagttgtggtaaaaagaaaaagcatttaaagtttattattcgtgcttccgacaagtgacatgtgaaatcctgatcaacatgaaaggctcaccagtaggtcctaaggaagacaatttgggccaagcccaagttacataggacttctaggaacataccttagcttcgtgattgtatggtcttctgccaacgacgacccgtattcggaagcagctccagtaccgtaacgttggaaggtcaggtacgtgttcttggaatactagtccaatttttctttttattccagcacacaaaattaggaaataaatgctcctcaaatcttgacagaagatcctctcaagctaaaatggaagactacttaaattaagatcaagtaattaattcataattaattgcccacaattataggacacgattttgactcattcaactgcatctaatttgcctagtcagcaggtcatctccttcgtgggctagacttcacaaaatagtccaaattatgtaaatcaatgtaatctcctcattagatggaaaaaaaaaaagaaactaagtgtaattctcttaacactataaatatccaatgaatccttcggattaaggattgaattctcttgcaacattttcttaagagacatagagaacttacactcattgtattcccaaaagcttttctaacttaagttacataataacatcaactcatagactaaggctcattaacgccccaaccacgtaaaattgttggtgttgttcttactttttctattttaattatttatttcttcagttctaattaattacaattaggtttttaaaaatctcgaaaaatattttggtactttcattaagagatgaatgaagcagtggtaccatctgaagattacattcagtaatcatggtactcacttgtaacaaatttggtcttcactttattgaacttaatgccaagacaagtgatgcaaaagatcagaatgagacaactagccatcacaaagattaagttggcaaagacacaaatcaggacgctcttgtattcagagatgataattcataatagaacaattttgatgatgctgacggcaatcttcaagagacctcgaaatatgatcctcaagacacaccaaaggacgatcatcatgataagattattgaagacggtgttggagacaagaacactcccgacgagtcagatctcatggttgccatggccaaaaaatccaattaattgaaaatagactatctcgttaggaccaatttaacaagatactgccttggaagatgacaagaatggaggcggtgatgatagccctgaccaaagggacccctaatatgcaaatacctccaataactgatgctcccgaaagagttgatccaaaagatcctagagcctcaaatcctatcaaggataaagggaaaaggatagtaggtgaaacttcaaagaagactcctttgactaaacaacaaaagaaatctaaaactgttgaccaacctcaacagaaaaagaaagggaaccatgcttcagagcaaggtgacaagactaattctagaggcagagtcccgccgaaagataagactgatgtcggaggcaagaagtctacttcctagaaggacaagcatcatcacaacaactccagtagtcaacacattgatgttgacgaagtgtatccgatctcagatggcatcaatggaagtctctccacaaataatattcgaagaagattaaatgaaaaaacaagagaaaataagaacggaaaaagccagacctcgcgggaatgatttgagaaattatattaatgatcgtgttcgcggaagggaatctttagtgacaaaaatcaatgcttagaacacaaagtcgaagagttgatgaagttcacaaagaagatctctagaaagcagaatggtacaacgtcagatttcgaggaagaagacacataaccatgtgtgaaaagaatcatagatgaaccattaccggagtgcttaagaatgccacaaatagaattgtttcaaggaaacacaaaccacagggaccacctgtccaaatacaattgcatgatgcaagtcgctaaggcttgtgatgatgcaaaatgtcattgcttttcattgactttgagcaagtctgcagaagactagtggaagaggttatctctgggatcgatccataattggagggatctacaagcaatgtttaaaaagcaatttgtagtagcaaaggcctttgacctgaaagctagttccatgtccagtgtgaaacaacaattaagagaaagcctaaagaaatacatccaatgcttgatggatgttgttgctttaaccaaggttactgatgatatgaagatggtgactttgacatcaggattaaccacagaatccttgctatggaagatatacaacgcaaaagaccagataccttgattgatttcttaataagagctcaaagattcataaacttagaaggagcttatgctcaagctcatagagtacttccatcaccttccacagacatagcaacaacccaaacttcccagatgactactccatcaattttccattcgataacttactttacaaattttaccattttacagaccaggtgctttcgcccagccagctatacaggctagtttttttttttttttggagcaatacaaactggctttagtgtcgctgttgaacaaacaaaccaaaaagtagaagctccatagtccaatgtaagccaatcatgcccaggttgacatattgtcaacctaggccatttccaatcaatttctcgaaaaagtattcctggcattatttccgtcatcagaaataacaaaaatacaagcaaactcggggagaaaactacaaccatagggacatgaaagttgagcccagtgcctaggttgacaattaacctgacgcactagtttcgattatttaaatgtcaattctactccgagcattctctttgaaacgataaaaaatggggtaaaagatctcgtcctcaaggtttagaaccttggaagtatcaaaacgacatcccagaagccccgaaataggcacccaatacccaggttaaaattttgtcaacttggatcatttctgaggatttttttattctccgtttacagtagagattaagattcaactatttccagggaccaaacagaaattctagatgacttgatgctggacccagtgcccaggttgacacctggtgttgggcccatcgctcaggttgacatattgtcaacttgggcaatttccaatcagtttctcgaaaaagtgtgtcgagcattttttccatcataaaaaataacgaagatacaagtaaacttgaggagaaaaccacaaccatagggacatgaaaattgagcccagcgcccaaggtgacaatcaacctggtgcactagtttcgatcattcaaatttcaattctgctctgagaattctcttcgaaatggtaaaaaacaaggtaggggactttgtccgcaagttctaaaatcttcgaagtatcaaaacaacatctcaaacactccaaaataagcacccaacgcctaggttaacttattgcctggtgccctgggttctgcttattcgattctgatttcgtctcgaccgttcatctagtttttcacaataattgagagccataagtcagaaaagtcaatttcacaacttcatattttcacaattccgacaatgtgatctactcggaaaccgagtagttttgagtcttccgtttccatagaacaataacatctccaagaattcgtgaccagcttcgccataacacaaaaatagactaagtcatgtcaaaatgtcacttacgcatcaaaaaatacatccccaacatgatttttcactctcataatgaccaagttgacatgttatgtcaaccctcaacggtaggatatcaatctggtcattggccttgaacaactttcagtaaaatagtcataattttttagagttattgtatat

SEQ ID NO: 121017 - DNA, 802 bp, Cannabis sativa
ctctctctctcttctcttcatctctctcacactcatactataggctggccagcaccctaggctgtccaacagttgagatctgcctattgattcatcctttgtaatcctaagggtgctatagcagatctcacctactgtgatttggatagcatttcccttggtataaatacaaccaaaaggggggtcgaacttctataacaaatctccgtgtttattactttttcattctgtttgtgtaacacgtggcaagcattaaatctatacgacccaactgtcagttaattattttttgaggtcaacaaagtctttttttttactaataataattagtatgtatgtaaataattgtgaggaacaagattgaaatgaagttaatatgcgtgaacttatcaatacaagtatttagtcaatgaatacaaaaaactcataagcttgtaaaagttacaagacttaagagttgaaacctttatttatagagataattttacaaagaaaccaaaaacagaggacttgtcaactaacaaacagttgaaagttataacagaaaactaactgaaagctaactaaatttatataactgtatcatccctcctcaagcgaaagggtgtattacaaactttaagcttggatttcaagtagataaatctgtctttggaaaaagccttggagagtatgtctgcaacctggtccgaggatggaacatgtcgaacctctaactctttggcaagtatttgatctctaacaaattgtaggtctatctctatatgttttgatctagcatgaaaaataggattggctgcaa

SEQ ID NO: 121018 - DNA, 843 bp, Cannabis sativa
taaattttgccccaaaattttgttctaaccaaattgtgtaccccaaaaatcgttctcgcatccatgttacatgtgtaatttaaaattagggatgttttcttttttttgagagaaagctatttatattaatgaaaaagttcatttagaacaatagcttcaatagggtcaagacaaacagccctccaaacaatattagtgtacacccttaaggcatatctagctaggccatgagcagtagagttggcactccaatggacataatttagagtaatatcggggaaataggacatctgatagataatatcacgaattaaatcataaaaacaatcataatactgttgaggattattaacattttgagagatagtgaaagcatctgtttcaattaaatgcgccgaacaattgatgtgatgcaaccagttaagacaataagaaatggctttagcttcaatttctttgactgaaaaaactcctttaatatatgccgaaatcgcaacaataacctgtccataagagttgcgaacaatgcccccaacacccatagtttggttatcaacatccaaagttgcatcaacattaagtttcaacaaaccttcagggggaggcagccacagttggcgtcgggattgagagcttttaggaggcttggcaggtggagtgtttgcttgacgataatcatagagataatccatagctttgtctaaaagaacagattgtggaagaggatgtgaatgatgtagagtcttattacgatcgtaccaaataaaccatgaaattccgtattttaatattcccagtttgattatttaattaaatgattaattaaatgcggaataataaaac

SEQ ID NO: 121019 - DNA, 865 bp, Cannabis sativa
atgccaaaacaaattaagggtgcatcagtacatcccttctaaaggtgtgcattgtagaatcaccctataccatatatcaactttaatataattgtgttgtaaaagtttaaaacaagaattttcctttttcttttataaaaaaaaatatgataaatatgctttggtttataatagtaggggatagaataattcttattgcttgaataatgttatagatggaggaatgatatcacaagaaccattctcttggcattaaccttatatataaaactaaaacatataaaaaattatgataccaaacctactcagtactaaagatgaaaggaaggaatatattttatcttcatgatatttttttcataaggagctatcatcactttttatcatgccaaggaagaaattatgtttcccagagaaaaaacagacaaaaaattattaccacatgtgatcgattgtagatgtcgatagtacctaacaaaacattccattctcattagtttatgccgcctagaaaacatgctaaatattctgattattaacatatataagtaatgcacaacactttaattatcgtgaatcctgccaagtttcaatttttttattgttactttttaactttttttcacattaaccatatggaaataccaaggatactcacaaagtcgcaaccttcatattaaacattaaaaaaaatgataagaggccctaaggtgccaatcactataagaaattagtggtgtgcactggatcacattcaatgtttttagttttatctagatccgatccaattatatattagatgttaaattttaccatctgatccactcaaattaatttcagtcatccaatcgatccaacattcatt

SEQ ID NO: 121020 - DNA, 1681 bp, Cannabis sativa
aaatctaacaaattcaatagttcaggtagaatttttgacgcccaaaaaaattcaaagggcatgatttagtacatgtcaaagtttggaagaaaaaatcttaattcacgtatgcttatttactattttaattttttttttttttgacaaaatataattgtaacaactaacttttttcttatgataatttggactttttttaattcttcgagaaaattgataccaaccaacggattgaacaagaagaataataatatatagttaagcagagaaagaaaaggaatataaaatgaataagtgggatatgttataaaattattatgaatgaaagagagattgaatgataatttagtttattctaaataatttgaacttctatttatataaaaatatggttaaaaataggaaattaaattaattaaataaaaagaaatacaataatatttatggtattattgatttgagtgatttgaacatttatatatataatattttataatacttcttattgaatttctattataactgtatcattaaaaatctttgctagaaaatttaatagaacaaaaactcgaccaagggaacacgagtgtagtatgaatggacttctctttatttaggcattcgtggagatattctaatcgacaaattctaatcttgtgaacaatcttcttaaatattgatattggtaatgactttgtgaataagtctgcaagattgagtacacttgattgaatatattggataccaatatgcattctcttgaaatgtattaagaagaacatggtaaaatgtgttttaattctatctcgtttaatgtacatccttttagttgagcgatgcaagcagtattatcttcatagagaactgttggtgttgatacttttttattgagtgcaatctatatgtttcctgaatatgttatatcatgatttcactcccacacattctttacttgctacataaagtacaagtgttaacatgatttaaagttacctcgttaaaaatattgtcagaaaaactcagtgggacaaaacctgagctaaaaaaaaagagtgcaatatatatttttgttgacctcgatttaagccaatgacaatgagtcaattaataagcgattaagaaaataattaaaatagagcaaaaacaaataagcaataaagaacaccaaattttaaagaggttcggccccgtgagtatggtaatagcctactccccttagattgtattaacttgagataaagaacgaagtgtttttctctctcaaagctcttacaatgaatctctgagaaattctcttagatccctctctgaaataattctttcgatcctttttacagtgaggctaaatcactatttatagggtcttaatgcatgaggaaatgttttcattttgctaacaatgtataaaataggaaattacatttattgcataattatgatacacgaaatagaaaattagaacaagttgtcatatttttctgattcaatcccacgatcgtagggatttccttcgtgcctggacttcacgagatcattctaaagtagttaaatcatgataagtagttcggaaaaccaaatctatgcctgcccagatgatctgcctaattaatgtggattagtaaaggcaattagcactaatttttattatttattattatttgtgaattaatttatttgtgga

SEQ ID NO: 121021 - DNA, 527 bp, Cannabis sativa
  modified_base (479)..(484): a, c, t, g, unknown or other
tttgcattaacagccacttggcaaaggcaatccaagaaaattgagacctctttccattcttgctactacaccaatttgaaggggtcattgtcgaagccaattctggcattttatacaattttacatttgtcttttttttttttctaaaaaagataaaaccattatatacaatgcaatcaacacgttgcgatatgattggtagttcactttttataaaggctttgtacttttattatgataacataagaaattacataaaagaagatgatcattaccaaaaatgttaaatcatattaaaattgtattaaatatttttgaatttatatttagaaaaataaaaaaagaaaaacatattgcatgagaatttagacaacacgttattagaaaataaatatgtaataaaagtgggtgtatttaatttattggggagatgaggcactttcggcgccaaagaataaataaaataaataataataatnnnnnnaataataataataataatgaataacgtatagaaaacgctaagc

SEQ ID NO: 121022 - DNA, 1939 bp, Cannabis sativa
agggtttaggtagttatgccgccaaaatttcagtttttgtggttaagtgttacaaaccgtaaagtttaggtggtttagccgccaatattcctaaaaaatataatccattacccttagggcatgtttacttaaagagaatgggaattgatggtatggtattgattctcatacaattgtttactaaattttggaaagggagaaagtagtggggtccatgagaaaataaaggaaaaggttctcccccatttttatagggaatacatttctctttcctaacttatttttattttattaattaaaaattaaaaaaaaaagacaaatgtgcccttttaaatttataaacaaacaataattacatgtttaaataatagcaattttatcaaattaaagcattttgattacctttcctagttatgtaaacaaaataatatgattctgattttcttttcagatagtttagcaaaacaacataataaaatattgtttctgattattttctattttaaactgattcatttctcttattgattattctgaattcgagttacagtttagtaaacacaccattaatggcatttcttaaaaaattgatgggagaagttctcttttttttttttccttatttaatcaagttctccattttctaaatttaataaattaaataaacaaatataagggaatgactctcttaccattaattctcattgcttattagtaaacatgccataaaacggttgtgatcatgtgtaactttcttgcaaaatagaacacgattagtgggaagccacgagtgaccaaattctaaaaaaatatttgattttgagaactactctcattggctttcttagtatccgaagtctcagctttttttattaaattcatggcaacttgtaactgcttctcacatgtattctccatttttagtatactcatcaatatagatcaatttaccaaagctcacatcgacttctcaagatttataagctagtttgaagcctcgtagtagattctttcgtcaagcctttgacctttgtggcctcgttcatgaacctttggatataatctttcaaaggttctcctgacctttatcttatttcaactaagtcttccaattgggaaggtatctatcaagaggacaaaaactgtgtgtaaaacttagcgatgaaagcgtcccaagaatcaaatctccctggggacagcttaaaataccactgctatgcggtgtaagacaaggttataggaaaaatcctgcaacgaacatcatttataaccccttgcagattcatctggaactcaaagtatttgatatgggccaaaggatcttcttcctagtgtacattttctaagttggcatcttgaactttgttgataggggcaacgtgttaatacgtgtagagaaaggtgatcctttagccctgtcaagttccaggtcggacaagacttgtacaaggctcttgagttgatccaactgtgcttgtactacaggatcaactctggtcgtcctgtgtccggccaacttctctcttgggttgataagaggttggccgtatgggccgataagaattgacctatcatgcacccttagtggatcattttggggaggaacgtcgttattgtgcatggtgttattatgagttctctggttagtgtgcccatcaatggggtgggtagtagcactgtaacgccctaaatattaggcacgctatccaagatgattaagaaccctaatcccttaaacggattactatatagaaaagcatgggaattttaaactttaaacgataatagaaagaaaaaaaataaacacttgtgataactttaactttacaactaaaattacatgtttcgggatcccaaaaatattttacaaaatattacaagtgtaatacccggaattaagaaatggattagcaaaaacctaactagataattatgtata

SEQ ID NO: 121023 - DNA, 2986 bp, Cannabis sativa
  modified_base (2881)..(2882): a, c, t, g, unknown or other
  modified_base (2908)..(2917): a, c, t, g, unknown or other
agcgtaaaactattccaaaagtaaagaagaaaaacaactataaaaagtgacccgaaacttaggctaaaaataacctaacaatttccaacttaataaaacttcgattctaatatttttatatatattttactttatctattaccacttgaccatttaacacttgcacagtacaccatgtcttaagaaacttgattactaggagtaatgccactgcttcttaaagttattattaccatgaaagtacttacacaaatgtgcaaaacaaaatttgaatgctattgtaacatatggctctcatataacataacataacatatgtgccccccaagtgatcagagaagtgccttcattggtcacttgctataccaaatcctctttggccttcttgatcataactcttgattggtattacacgtgtgaccactctcaacttatctgaggattcgtgggtgcaagtgtttaactcacttaagaaacaaccaaagttatctcgaaaccaactcacaagcttcactcagtgcttagagagtgtcatcaagtgtgtgagctgtaattgattaatttaaatgaagtaccaaaaaaactttacttacactttttctcattaaattaaatacaattacattgttgtgagctaagtttagaagaaaaaaatacactttgaagtagttgtttcatggttctttttcattccaagcttagcttaagtgatcctcactatgctaatgccttgttcagcttttagcatagcaaccataccttagcgatggacctcttaacctagggacaacttcgtcacatcctgttagttaaaaggaaatcaattcacttacatgaggtaaggtgaatctcactatgatgcaagctgttttaaagacacctgcttttattggcaataccgtcgtagatgtatcccattccaataccttggtaatggcactagggacaacttcgtcacatcctgttagttaaggagaaatcaattcacttacatgaggtaaggtgaatctcactatgatgcgagctattttggagacaactgcttttattggcagtactatcgtagatgcatcccattccaataccttggtactggcactagattaaagttatagtcttagtgtgccaacttgtaagtttaggattcaagcacttcaaccacgacatatggtccttcccatttaggcccgagtactcctgttgttgtgtcttttgtgttcaagaatacccttcgtcacaccatgtctccatgcttaaattatctagctttaaccttagacttgtagtgttttgcgaccctttgctgatacaccgcctttctaagctttgaactcaaacctttctctgatctcttcaattccatctagagattcggccggcagctgatgattagtttgctggttggatgtaaatcttcaataggatggaagtgtgagctctatgggttagagtgaagggagtgtgacctattactattttttctatggtgctcgtaggttagagtgaagggagtgtgacctattactattttttctatggtgcgataagcccatagttctttaggcacttatttaggccaattcctttttgcttgctctaggcattgctttagcatatccttaagagtttggttgactacttccacttgtccatttgcttgtggataagcaatcactaagaaactcttaaagattttatgtttgatgtagaaatcagtaaagaggtcgctattaaactgtgtttcgctgtctaacactatcttctgtgggagtccgcgtaacgtcttactcagaggaatgccacgtgttgtgattacaattagctaatcccgttaattggggtccataagccaagtgatttaaaaaccaataatatactaaatttaactaaataacttggaatattacaaacttatttcaaatcaaaatatttatagttacatatccgggatccaataaaatttatttttaaaatattacaagtcatttcttacaggttgacctaagcggcaaaattagaatttctacacaatcccttgttggacccaacccttgtggtctagcttggcttgaatatgtacaactcatctttaaaaccctcaaactcatggttgaagcgacaccgcctaactagtgcctgtacattagagcactagtgagccaaggcccaaaaagacagaataataatacatcatatagtacgctaatgcgtatatattgtgccattgcactttatatcacattattccatatataataatgtcactataattaatgtttatatagcatagacccacgtgttacgctcacatgtctcgtttacatttaaggccttattagggtttatcttagttatcattaccgagtctaacctggttatgccttacccgcataactctactcatatatacataatccatacattatgctctcacagtggttcatcctaatgatgtttatcagggctaacccagttatgtattatacacataactcttgatatataaatatcaatacagtacatttagcatatactcaaccatatgaagttttagggtaataaccctaacttgcataattctaatcattcatttacataatacattatagcatgctcaagacaatacatatttagggtagtaatcctaattcaccatatatatattgagggtggcaatcctaattcacaacaacataattacttagggtagtaaccctaatccataatataaatactacggtaatgaccctagttcacgacacatattaatttaagttaataaccctaattcatgctttcatctaaataatcacattatatattattgcatattcatgtaaattcatacttaaggtaataactgtaacgccctaaataattnngcacgctacccaaaatacttatgaannnnnnnnnncctaaacgggattactaataaaaaggtgcaaaatttaaacttttgtaataaacggaaggaaaataaaac

SEQ ID NO: 121024 - DNA, 1020 bp, Cannabis sativa
ttacataaaaatattgcataaaatataatttaatataatactatacaatatacaatacggtgtactaaacgaacccttatactctaaaattatgagagttacaaataacattatgaaatattttaaaagtggctagagttgctgatggagtgatttttatatttttttattgttagtatttatgttttgttaaactttaatgtcttgttttaattgttattgttatttttgattattttgatagacaaaaacaaagagtagtattttttattttatttttggtttcaactctagaccttattttcaatgggagttgtttgtttgtggtttagttgatcttttttcgtttaaaaagttatcatatctttgttttatgtgttagtaaattttcatagcaagtattttggttctaacacttgttttctttcaaaatattttgtcaatcaatcatcaatgtatcaatgggggaaattgtaaattatatttttttttgtatattttatgtgataaaaatgtttggaatttattaattaatttcgactatatatatattatttatacatgttttaaaattttatatatttggaaagtttgacaatatattttatctttaatattttcaaatcaaatctcttgtggtttcttttttgtagtcgatttttgtgtattaattctgaccatttattatagtttgaatgtacgatctaattttcatagggacgaattgatacacatttaaaccaaagaaaagactttgacatatatacccttcaaattgactattctgttctgtagctacaaaattagaaaatcatagcagaattaatttaggaaatttttcttgtgggatttgatcggtttgactatgtgtattagctgcccaatatgagtgtactatctataaatattcatatttgctcctagggttaggttaagggtcagtttactatcagaaaaaacagctatagtaaaattgtgaaaaatattgagttgagtatttggtaaattataaatttcaaa

SEQ ID NO: 121025 - DNA, 740 bp, Cannabis sativa
gttcgtaaaccgtaacatagcattttcatccacggtaaaatcctcaaccttaccggctaaaattttatctcgaatcttcatcaagtttggatctccatgttgagcttctctgattctttctagcaatgtggagtgtagtgttggctaattgtcccacaaccaaatcaatattagtttttgtcatttcctccgcaagttgctttaaaatctgtttcatgttacttacttgtccttgaacttttctgcttaggacatctgctactacattggcctttttaggatgataaaagatttcacagtcataatcattcacagactcgagccatctctctgtcccatatttagatccttttgagtgaaaaaatacttcaagcttttatgatcgatgtatatttcatatttctcattatataggtaattctgccaaatctttatcacaaataccactgctggaagtttcaaatcatgagtaggatacttctattcatacttttcaactgtagagaagcatatgctattaggggtgagaaaaaaaatctaagaaactaaccaaaccaagtacatcgaccgtccgaacactgaaaaaacaaacaccgaaataactgaaaatagaaaaaattgcctttacacggtcggtttcagtgttaatggaaaaccgaccgattaaaccgagaaccagccgaatatatatattatacactatacatatataatataattatttttgtacatatttaata

SEQ ID NO: 121026 - DNA, 850 bp, Cannabis sativa
  modified_base (208)..(217): a, c, t, g, unknown or other
taatctatgaattatactaaataattcacaataattctaaataaaattacaaaaataccctttcagagttagcggatattacaaacactgtctacatgtgtgcaggggctgacagagcagaattctgagccacaagattgagatccacaaagtgcagcccaaccccatcatcaccgtgctggctggcctggtggtcagtgtcttggcnnnnnnnnnnctccacaggtgggtcggccaactcctcgtcgtgtgtccgtgatgatgacccctctcaataaccaacaacatggtatatctccattcgactctcaaacagtgcctttccatgggtcaatgtcctctccacaaaattgatactgcctaagtacgacaatttagctcgaggtttatgcaaatgaaactcataggtaagtttggaggacatgtgaatataattctccttagtggcctgctgaccatcaaaagcctcctaaaacttcttcttatgatcctcaagttcagtttgcaacctacaattaagggcgacctaggtggtgttctttgtattcttggctcaaaacatggtgtccaatccggaaaccattctatgcctctctgctagaagggcctctagcttggaatcggctttgtcttttgcttcaagggaagcctccaaggtcttcacataatcctaaaagcatctgacactacaagaatgtatacgtttgccagcgcagttttttaattgcatcgacaaaagtatacaattacctgcaaaagtcaataaatttaccggcaaaagtgggaaaaatttttggtccaggtcccacttttgcccccgatctatatcaccggtaataggagctttttc

SEQ ID NO: 121027 - DNA, 610 bp, Cannabis sativa
agagtgaacatactctaaaattttctttgtgttgtgtgtgcctgtggaaaatttcagtctatgatgttttccaagaacacaacattcacaaaaatcaagcttacttaccttgtccttacttagaagtttctgttcacttaattgcaggcctttctcactgatatggcctagccttctgtgccaggtcatgacattagaattaccactgttgttgtgagcagtaaagttacatggaaccactagtgtgccctttagatagtataggcctccttctttgtgccctttcatgatagttagggctcccctactaattttcatttgtccagcttcaaccttactcacaatacctaggtcatctagaacacttagtgaaattaagttcctagccaagtcaggaacatatcttacttcacttagggttctgaccatgccatcatacatcttgaaattaatagatccagacccttgaatgtcacaggtttgattatttccaagaataactctaccatcatttgatttcctgaaatcaaacataaaattcttattgttagtcatgtggaaagtgcaaccagagtcaaggatccattcatctttgatggatgatccaact

SEQ ID NO: 121028 - DNA, 1333 bp, Cannabis sativa
atatctacttttaaggggcaatttagtcttttgtatttagtcaatttaatatgtaaatatctaagattttagttgcaaattatggtttaggctttcctatataaatgccttaattctaacctagaaaacctaagtctaattctaacttccaaatcactctaagtctaaaactctaatctctcttctctctttctctcttgtacacgcccaaggggctctctcatcctctctcccacatctctaaggctatacttctctttcaatagtgatttgcctactcgatttaagctttgtaaccttatagataactatatcagatcccactgatagtaatctgaatagtattatctctaggtatcaatataactaaatggggagtaggtcattaccagctaacaaagggggtcgaacctctataaaaatccttgtcttatttactatattgttcttgttatgtaacacgtggtagaacccaactgtcaattgatcactttttcaggtcaacaatatatgttagtataatttcaaatttcttaataaataagtaaattatagaacacactaataaaattttcaataatcctccaaataataaaaataaatatagtaatttgcggtgtagatatctaagtttaactctcagttacaaataaatacctaagtttaatttttggcagttataattgctaggattttatgccctaaataaaattcatttcagtataatcttatttactgtcaatagaagattagaaatcatttaggtttacatgtagtttttatacttatagttttaatatataatttctattaaattctgaacatacagttactcacaattacaatgatattatcacaatggaaagtaattgtgattatatgctttaaactattttatcctatgatttatcagtgcactagatttacactgacgtgataatcagcgataaagtttacttgcacaatgatatgtgaaatgtcctttctagggcattagaaaagtatattagtatcatttgtattagctatacatcagactggaccgatattgacagtggataatatatcataaacttaccgttatatctttacaaagtcaatgccacttagtttatcttagatcaaaagatttaatcctaagattaggttctggattaattgtactgcatgaattctttgacttgttcgttataactaaccacttggatcgacctaatacttacatcttgggaacatagtagtacaattgagtgcaagcactaatcatagatatagaatctatagcttctataactatttagaagtgaaacgataattttcttagagcttggct

SEQ ID NO: 121029 - DNA, 1251 bp, Cannabis sativa
cagcttgccatatctctgtgatacaatcccagatttatagggaatgcttttatgcttcatgatgcaagtgctgaagttgctaagtgttggcagactattcaaacttttcactgctcggctaggagaacttcgttcgtgcaggtataagtgatgttctgttcggaatacttctctcaggtagatatgagaagtcgattccacgtgtcaccagtgtgtgatgccacgtcagagtgcgaaatgggataacaataataaataaataaataaataaataagaggttatgatgtaatgcataataaataattataaacttaatataaattatgtaaataaacgtaattatagcataatttgtatatatgaagtataagcgaaactatgtgtatatattgctgaatacacatataagtataaatatatatatatagaatatgtaacgcacaaatttaagtagtttgataaaatattatttgcctacgtttacggtagcatttaagctataattatgttttattaataaaatggagatctacagattttaagaaattattaataacaacggtcttagctgtgtgtaaataggtgttttagtgaatagaagcggtattaacgcacactttgcttgtgtagagagaaataagatgaagaagaaaggaaaaaataaaataaacaaagagtgtgcatataaacacgcttgtttgaagtttatctttctgaaggatttgaggtcaaagattcaatggagtttgtatacaagcatgatgttatgctttgacgcctacaaccagcctgtgtagagaaaaagaaagcaaggataatttctttcaagattgataagacaagcttgatgggactagacaccttcttttcctcgttccttctctctattcgttcctcgttccttcttttatcgtgcctcttcgagatgaaccttatcttcgtaaaagaatcaagtggcagctgcttttacctttatgcattcacacctaaatctaggtatatattcatctcaagttttatgtggttactattcatgtttttttttttttcgttttatacatatctatttactattttactttttttactgtattttattttattacacaatctttttttttctttttactcatcaacagtattattttatttaagggcctttttcacttttacactttaaaatatatatatatttttttgcaattttacagaattttacatagaaatccctattgcaactagcgctgtaa

SEQ ID NO: 121030 - DNA, 981 bp, Cannabis sativa
tataccatcaaatggctaaatgattatcatcattgcattttactttcaaaactgagtccaacaacatataatatgactatatttaaaatttagagttctgaaacctcatataagtagtgcacattaactatcagcgacggtagaaaatggtataccgaaaacataaccaaaaataggggtattatatattaaaacgactacctcgactagtagatcacacccatcccaaccgtttgtcaaaatagtacacgatatcgccggaaaggggcggagctacaaaacgtcactggaaagtggtggtggttatggcttcttgtgtggtctagagagagagagagatgacgaagcagggggttctattttgtttttttatacatatatatttatttattgattatgcatatatatatttatctttctctttttgactcggtcagtctttacattctcctcttcttaaagaaattttgtccaaatatttcaaagtacaacctcaagttgaaaattaaacaagtgagggtacttcatatacatctcagacactatctctcaagtagcctcgtcttctttgtgatttccataagaccttgactactagaatctctctattccttaacacttttagctctctggcccagatttttacaggttgttcttcataagtcacatcttcctgaaaagggatagcctcatactcaatgacatgtgacagatctacggtgtacttcctcaacatagacacatggaatacaatatgaatattgtccaaaccgccctgggaagtttgaacagtaagcaacctccccaatcctctcgataacctcaaaagattcaacattcctcaaggctaggttacccttcgctcgaaatctcattatgccacgtgtaggtgtaattttcaagatgacgtaattaccaacatcaaactcaactttccatcgatggagatcgacataacttttctgacgactctgaacaacc

SEQ ID NO: 121031 - DNA, 2431 bp, Cannabis sativa
tcacctatttctatagtgagtgttataaactgtcgagaatacacaatgtttccgaacagtttaaaataatcatttaaatttattagtggcggtacctgaaagaaagtgtttttaggaccgttgcgaatactctttttttgtaaaagtgtataatataatgtatgaagatttatgtggtagagactttttcttttttgctctcactaaattagtgtttgaaaatttttaagcaacacacgcaattaattattttaaactatttaaaaaaaaacatagtaaatcattcaaattaaatattttaaaaatttgtgagatattgctataattaaaattaattaaaagagttggcatcactgaaactttggaggaccccagaattcaaagagttggcatcatgaattggctgcccccccttctggatgggtgatgtgtaatataaatgtgtcaatcggcaagtctcaagcaacgggggctgctgtttttagaaatgaagctgggatcttcaccaactgcttcaccttccgtttgggtgtctgtgagccatttattggagagatcataactctatgcatgggagccgaggaagcggtcgagcaaggctataagaaagtgatcttccaaagtgactcctccattgcaagaaattggatctcttcatcacaacattcaggatccggtacagaatttcatccgatcattggttaacttcactttgttggaagcctcttgaattcggaggaaatacaacggtgtggcccattcggtggctaagtgggtaaatcacaacaactcatttgggtggttcgatttgtctattgaggatggtcccttacactctgtccttacagagataggctgacttaaattctccttttcggttttgtttagttggtttagttagttttctttcctttgttttttagcttgttttcctttggggtgttgttgccctgtttgttttgtctcgttccctggggcttctagggattccactaataaaaaaaaaataattaaaatttattgtggaatgaactataatttcttccattaccagaaataaaatgttgctttaattaagcaaaagtaaaagtattaggagtgttgttgtcaatacttatttcatcctctttctccatatctatgtctacaaacacatgctagagaattcttgtattttttttttgtactggtatacttaacgatgtagtactttactgacactagagttcttctattgatatcggagttcttggtcctcaacttaaccatatgtgattgaaaaactttaaattattttttgacagtgtaaattattaaatgttttttataaaatttatagtaatactattataactataatgaacactgcccaatgaaaaaaagtagaaagatattttgttcggtatatttaaagtgaattataagaaagaagatataatttacactccacacaaagataaaataaaaaaaaatacgtaaatagcggtacaagtatttaaaattttgagtttgtaagcggtataaatttaattactttttttagctcataagtatccaatgtttgtaaaactataatttttctctaatttcattaatacagactctgttttaaatttattaaaaaaatatattaaagtaattgatattacatgtttccgttcaaacccaatatactagaatttagacaaactatgtgccctatttaagacaataacaaagcaagtatagataaaattagaaaaaaattatagttttataaatattaagtacttttgctataaaaaattattatatatatagtttttacaaactcaaaacttaagatacttatgtcactatttacccaaaataaaataagttgtgtctagcaaaaattacgccaaacattgggtgatatctatcactaaatgcgctagctcgcgtgcatgcactaaatacaccaacatgatcacattaatgccctaatttgacctcactagcgatacaatatatttaaccatatataaaaatattccctcaatataatagtctcccttcacaatattaataaaaaaataactgtaactgtaaagattttgaagaatagaacatacataattagaaaatgtcttgtacagtggcactggaaatttgaagcaattattggagatcagcttagtaaacgtcatagcagtgtatggtgatcatgtatatacagacatatatattgccggattttccttcttcactgaattatataacctacatttactcagtcaatcgatcggttgaatttgttctattccaaaaagatgaacgaatgttaagaacaaggtaggttatatgttatactatagaagtttgaagttgttacacatttaactactaataggaccgtcttaaagtatatgggacctaaggcgaaattaaattttgggtcccctatatatat

SEQ ID NO: 121032 - DNA, 1327 bp, Cannabis sativa
tttatgcaaataattttaaaatgagttttatattaattgtttttaataattttgttttaacttcttgcactttatttggtatattggattaaatcgtccaatcatatgtttctttcaatgttgagattacaggagattgtataatcttgtctactccaacctaatcaaatctttaagaatctaattcaatttagtgtaatcttactacgtaccaaataagtcaataatataatataatatataatatatatgtgtgtatatacataaaccctatcgtatttttcttcactcaaattcatttcaaatattgttgtacaattaattatgtctccattaatattatcattcccagaaatctcgacctttctcctactcatacctcctcttacaataattttccttgtctacaactactcactcaaatcaccacctcttccaccaggcccattccgatggcccattgtcggcaacctttttcaaatagggcccaatcctcacatgaccttagcacgcttcgccaaaatgtacggcccagatcttttctcattcaaactcggtaccaagctcgtgatcgttggatcaactccagctgcagccatggcgattctaaagacccacgatcgaagtctctgtgctaggttcgttcctcacgttgctccatcaaagtgtcaaaagaaatatgactcaaccatcggttgggtcgatgaatgcaccgagagttggaagaacttacgtagttttactcgaactgagttattttcaggtaaagctataaactcccaagcattgataagagacaaaaaagtcaacgaaacggtcaaccacgtggccaaacacatgcaaggaaaggaaatcaaagttagagagattgcttttggtgctgtgttgaatatgatgggaaatattttggtgtcaaaagatatgattgagcaaagtaatgaaagtttgaaaggggagctttgtgagattatgaataagataactgatgttgcttcttctccaaatatatctgatttttatcctattttgggtccatttgatcttcagaatcttcaaaaaaggtccatggaattgtttgataggagttgtcagctttgggaggctattgtgaaagaaaggaaagcttcggaaacatcctctccatctccacctgattttctggattctctcattcaaaatggtcattctaccgtcgacataaataatatttttatggtgagtgttcttattcttatatactatatagcatgcatgatgttgcaatatataagggaaatttgattttctatacttagaaaatcaaaaatttttttccctaaaccaaaaa

SEQ ID NO: 121033 - DNA, 2341 bp, Cannabis sativa
  modified_base (2267)..(2271): a, c, t, g, unknown or other
ggactactgactgtcacagttgttcatactttgaggtcgacttctcaaaaaattttggcctcagggtcgagacaaaagttgaaaagactgctcaaacatttcaaaatgtggctgcgagttcaaggaaaatctgggttcccaaggtggtgaagttgaataatgaatagaggaaaagttatctttcttgtgctagttttggcttagttaacaaagatctaaacaatggaaggagcctacacctttacccgttttggatgatagccagtatcagctttttggggaagagactagtggcgtagagagaagatgtaaccctattttgttagactcagttattaataaaacgtcttttaggctgggctactctcaaaatcatttaagcccaatgatgttgtctagttttattgtgggccaagaggcttcctttggtggtaatgaaaacagggcagtaactcaatttttccaagcccaagacttatatgtggatgagctgaataatttaaatgtgctgaacattaattttaatgagaacactatcttggagaaggatggccagcccaatgatgatgtacttggcaatgactcttttagaaataaaaaaataaaggcttcatgtatggatattagagtgccaacctctcctgaagttaatgagaaaatcacgccatttaaacttcacaagctggaccactttactctctcgttgagtactacaccaagacctctgcttaagcgcttccctagtattagaagagattttcttgttggcttgggactgtcgggagaacctttttggggtgaaaacaatgctaatgattacaattcttcctctgaagaaccttttgaatgctctgataatattaaggatcagatgtcgaaccattctagtgctgactcttaccatgtagacaagccaatttctctcagatagtcttctaggatcattgcttggaagaaaacagcgcaactcactgatattatcaccccatagagagaagtttttatagtcgaagatgaaggctcgtgtgttggattgacccatgctagtgttacccctgtggaggaggatttggtatttcctccataggagccatgagaggtgttgcttggaactgtagaggattaaggcggacctctaccgttcttgaaatgaaaagcttcattcgatcatgctccccgaatttcatctttttgactgaattgaaagtagaagctactcctttggtacgtcttctgaaatttacacttttataataatattgttgttcttgttttggagtgtgtgggggatactttgttagcttggaagtccagttttactattttgagaatatttgcttatccaaaaatcaaatttctagcattgtgaactctaaccctgctcagaaccctgggcttttgtcttgtgtgtatagtctgccttatttccatgagaagaaaaaattctagccagacattttgaaccttggtgcaaaatttggtggcctctggatgatcctaggggatgtgaactttgttctgaattcttcgaaacgtgttgggtctaggggaaaggaccaatttttaccgtttatctctgagctaattaactaccatggcttgattaacatgcccataaaaggtgataacttgacctgggataatcatagggagggttcaactcatattaactctgctttggacaaagaaattgtgaatgatgattggcttcacttattttcaaaggcagttatttaatccctatacacctacaactcataccacaagcctttatgtgtgtactttggaggccttgaggccaattttaagcgctaattttactttgaagcttggtggacaagagactcccatagtgctttggtcgttgaccatgcttggaattctaccaatcattcttggtcccctgctagggtgttcaagaaagtgggcgctacgaggcttgctttttgcaagtggaacaagaaacaatttggtaaatttgactctaacataaaacggctggaagctcaggtccaggacattcaatgtatggaataggatctcggtgttgggatcaagaagagagggtgcgggctgagcttaatgaagagcttaagagaaaggctttattttggcaatagagatcccgcgtctcttggattaaagagagcgatagatgctcgaaattctttttcatctccgtcagcattagaactgaagagatgttgggaatattttaccaggatctagatttattaacaagttgttgaattaacatcctaaatatnnnnntctctaaaacaataaaattaaatacataagggtttaagaaaatcttacattaattgtagcgaaatataat

SEQ ID NO: 121034 - DNA, 1859 bp, Cannabis sativa
gagattataattagcactcattttataattatagagttttgcttcctaaattaatttttggttaaaaactttcatccaactataaaaataattgaaaatttatattttattcaacatataatagataatttattgatgtggtcagattaatatacacaatcataaatttattcttaaaatattatctatgcaattatttttcaccttacactatcgaattagaaaattatttgcaaataacaaatttgttattattttcatagttcaaggacatttttttatttaaaatcaagtgtcataatttaggagataaaaatcctatttattttattaaaaaacatcatataaaatactaccatcttaatttgagtattttggtacaccactttctatgttggccgagatttttgacaattaatttttatatgattaaagatgataaactgcatttagagagagaaatttttacgtgattcaagcattaataattcttaatccacgagtcactatgttgggagttacaacaatggtggattgtttagagaatttggcagcacttttacttaataccaaaatcaaataatgctcttatttgtagggaaataggaatgggccttgttagtagaaggccttttgtcgaaggttaccctaacagtgactcctttttagtatttttgtctagctaagaagtgttttccttatgttacaccttcggtttaggcccaaatcaagtggtaggtatgtgtggataagacttgtccactgatgatgtgacaggcgagggcatgagctgcctatggatgcaaggggaaggtacatgctaggaaaggtaatgagagaatcccaattcttattcgctttataaaaaattcattttgtcattggtataaaaaggacatactaaaatgtttttcccaatttaggcgctgataaaaaataggagaccacccttattgagagatagactcgttgtctctatagaacctaataggaccctccaagatcatgaggggttcccatcccaaaaggagttgtttgttggtttttatggtccaaatcaaagcaaaaagcagaagcgctatatatttatatagtaaaatttgtttttcataacctgaaccataagccccaggaacacaatgtatttaaaaatattaatctacactacgagttaaagaacattatacctttttatgaactatcaatgtatcattgattcttttcgtataccaatcaaacattcaatcctcatgacaataatgatggtgacagatctcacaccaagatcttctaaaccagtctcaacactctaggatgagtgtggggacataggaaaattaggattgagtattttttatcattgtgtgtactcaactcatgagacattgtgataatgtgagagaaaggaagtgaaactagagtgagagatatgagaggggagactatattagggtttttctctagtgaaaaataatgattaatcattttaggttaaacttataatgatatatttataaccttattgtctctgcatcctaaaacaacaacaacaatttaaaagagacctaccaaagttcacgcctgggcgttgcctaaccgagtggaagagcctactccaaacatccgttctaaggtctctctgtaaagatcatggatacctctcacactcagtttaacgcagattttcgttaacgattatgagcctattttcgtaatagatttggcacagaaactataagagatctaagaaaaaaataatagaaatagaaataacactaggtttttatgtggttttgctgttaactctacatagtccacgagtcaatcttattcatatttttctgatacaaaactagggt

SEQ ID NO: 121035 - DNA, 666 bp, Cannabis sativa
tttatttaggatataaaacccaacaatttctacattaaggtggcgtttggttgatatgaataaaaacagagaaataagaataagaacgggaataggaataagaataaaatgaaataaaatttaaaatacataaaaaaaaattaatgaaaaaaatccttaaattttttctcatgttatattagaatgacttttccattcatttaaaaatgaaatagttatttcgctaaaatagtcaaaagacattgcattaaaatgacattcaaatactttaaccgcgtaaagtgttttgagctgtgcggtttgattattttcttcctctttgccatgccatattgatctcacattaacttcctgtatttaatttccttaattaatagaaagataatggattattcttttaatctcgtattagctagctgcataattaagaaattttctatacttagctatatatatagaacctattctcactcacaacccaaccctcagacaattactctactaccctttttatttagtatatgctagcccaccatgtaatgaaaatagccatgtaatgtttaagcatggttttgatttattattaaaaaaaaaacttttatttatggattatctcttatcacaggacattaatcattatagtgataatgtaggccatatatatat

SEQ ID NO: 121036 - DNA, 1623 bp, Cannabis sativa
atcaccaaaagaattatggatcatatgtgcatgagggggagacatattcatgttgcactctttttcccttagctcaggttttgtcccactgggtttaaaatgaaaggtgattattacaggtgccttgctgaattccaaaatggttccaatcgaaaggaggctgtcgaaaacaccctttctgcctacaaggctactcaggttagaccttttagttcgattctattaatttaatttggatccattcacttttagtttttctagagacgattcgactcattttatttggatccattcgattcgtgactgttttcatgtttactgggtctgtaattgcatcaatttttaaatcttcttttagctcaaaatattggggttgtcttttattccaatttcttcaatatagtgtattttggtttcaggctaaataataaagaaatttctttgaaatatttgtaactaataagatttggtagaacttaaattaataaaatgtatattaaaaccaatttagacctttcatagctcaactctgcttatgggatgttctcaattaccaataagttgttgtttaaaaaaaagtataatgtgacttactcacatttatttagtttgcaattgcatcaaattttgttttttgttttttgtttttttttttcatcaaatcttcttatcattatgccaatttttcttaacatagtctattttggtttcatgctaaatatataaaaggactttctttaagtatttgtaattaataatactaagttttttgggatgtcttctgctccattaataaatattggaggagcaaaccgtaaactaaatatttttgcacctgaaaagagaacaatctttaaattgtttgtaaatccttcagttatttccttgtgcagactgtatttgagaacagtctcatggagcatcgtgttttttttgcctccatatgttataagaaagattacttacattgcaccagtaggttaatattctttgcatgtttgtttcttattattttaaaattacatatgagattaaatttagttcattgagtattcttcttattgaattgttttacatgtgcatgaaacaaaagaaacatttctactgatatactaaagtagcaacaatcaataaagattgattgtgttaatttgtttcattcatatttgcaggatacagtgttaagagctagatctctaaggagttacaaagaaaattaccatgcttcacgttttttaactttgctgcgacactgcttctgaagctgacaattgtacaaagttcagtgaaggcaaagtggaatcacaatttttcggagataatggatatggacctacatttgatgtatttggtagcgtatttcaaatgagatgtgtctttccttcttaaatgatttgaatgattgattttattctttcttccacgcgaaaacaataagtactaactattgatttttttttttcacttactcatatctaaaactataacttaaatattcacggtagatataatattaagatattgaaattaacgtactttttattgttaataacaatgtacatatcataagtttataaacacaactatgttttacttactaaatacactgacacaagtttactt

SEQ ID NO: 121037 - DNA, 798 bp, Cannabis sativa
gaaattgggctggggcagtaaaaatgttgtttttgccgtgtcccaatataattgtaaagttttggtccaaaaacagtatttttgtaaaattccctaaatttacactatatagtatataaaacaaaagagaatctctaaaaggtattattagtgttcagtatttttttttttgtgttatattgttattagtataattaagtgttaggtctcatataatttaagaaaataatttttagagaatatcgttaactaattatagagcgtcacctataaaaaatgctgagcaatattgatgcccaataaaaaacctcaaaacaaaatgatgtagctgtagccaaatcaagttttccactttatccatttcaagaactaatcaacgtgcttctatcttttttttcttttcttttttttttccttagctattgttgaattattattattattattattattattatttggaactcatgtctttgtatttttaagtagtaaattgtatttattttttatgtatattgtaaacaaattttataattaaaaaaatacatttgtattttattacgagttgtctatataaaattttattttaaaataaaattattttttttaatataaaaaatgaattatttatttatttattaaaatagtaattaattaccatggttgtaaataaatgctaaccatataagattgaggttattatagataaatgtaaatggtactataagtactcagggctgtttatccgatccaatccgtacttttttggtcaaacaacatccaatccgcactaagtgc

SEQ ID NO: 121038 - DNA, 1380 bp, Cannabis sativa
  modified_base (1271)..(1280): a, c, t, g, unknown or other
aaaataatttccaacaaagtcaacatctgcaagcacccatgagggtcgacgttcgctttaggctttcctagtgcacatttgaggtgcccctcaaaacaagtctccctactagacccttccgggtctgggaggaacatttcttatactgctctacggaaacaagtgctgcggcaagtaggcttttgcatatctctttaacctggatgattcttgactggaggagacctttcaacgactgagcatctttaagggactctaaatcataaagcattaatcgagacttttccattgaaatccacgtgtcaggtcgtgcatgaaatgagataatatttacccgtaagctttcaagatacaacgcagtccggaagcttgcggcccttctcaaattttttgtgataaactcatggcacatgggggtatctgagatcgcttcatattccaagacttgaccccagttaatgagtcactggccataggcattattagcatggtatgtgggcagtatcttaaatgcaattgttggcattatatgagcgtgggggtgagtttctcgagtggggttactgtgacagttaagtgattgagatgacccttcttttaatgagggcattactcgaggcttgtaatgatgaacgttaagtataagggcttaacattaaatgctaactcatcaactccccgactgttagattagagaatacttcttaataaaaaataattagagccattcatttcaaacagtaaaggcttcaaccagtgtataagctagtttcaagagttcgctcatcttcttttcaacaacttcaacctttgaaagtctttctgctttctttgaactaagcgaagtcttgacacactctaccccaaattcgatggagacttcgattgtcgaaccttccacgactgcacaacaggggaggcattgcatacctgggcctgtcagcatgatattcttctctaacccgtcccactatccagtaagtatctcaatgccctattgacttttacgcaacttcatgtctaagatagaaatgtttagttgaagctgggtttgatacgtaatgcatattggatttatagaacactttttcatagaaacacattattaggattgaactgcgtgtgaatttctgtatcttgatcatgtcagcctcattcgaatgggttgagcacggtcatgctaaatttttgaacatgctcgcatacttgcatggcttcgaaattgggattggataaccatcataccgacattttgttgggttttatgcccnnnnnnnnnntcatttcaatataatcagagttacatattaacatagatcagaaataacatttaatgttgcatggttcacatgattcatttcatgattatatatgtacata

SEQ ID NO: 121039 - DNA, 1646 bp, Cannabis sativa
ttatttttattttgtgtctggctcttttatattattgttacagaacttggtcatcacgggctaatatgtttattgtttagttagcttttattttgtttgacgttctatactaccatctatattgtactatgattttttggtcaaattaatttcattcagtaaaagcactttctttttcaaggctttttatgttatttgatcccaattgaatgaaaactctttgccaaattgaatactcgaactaaatgtattaaggagtctaatttagctactaaagatgaatattattatacccatacttcgagcaataaataaatagatctagttacatgacacgtgtataattaaattaacaattcaactcgcttaatgaagaatttagggcataagcacctatctcgaaatacaacggttggacgatgtaatggcacattagaagtgacttcgatatctcctcggaggaaactactgtggtctatacaagacgaggagaaacaaaccacgctccttatgaacgcctcagaagactcatgacctagactaaaggagctaagcttgtaaatgcatctagcaacattcctggtgttgatattgttatagttgagaggcttaacttgcttaagtttgctcctagttgtcatctcgagagattcgtgagtcaaataaagatagtctttcaacatgagtaagacaagacagaaaaaattccttgcaacagtggactaagaagaccgtgatttgattgaaccactatacttccttatgttcattgttttctattgtctaggcagtctcgtttgaatactcgtagttttaggttcagtactcgctgttttttagttaaatatcaactgtttatttatatttagtgttgtccaaattcttatgacaatatttggcgccgtctgtgggaagtttcttttgattttggaggaaaatctacatggctgcaaaccagacaaacagaaacacttgatctttcaacgttggaacagtgaatgtcccacttccaagtgatagaactaatccgactgacacaatcaatgggggtgtgggacgaactaatgtcactcctctcaatttgttcccaaaactactcgtaatgtaggagcgacatcgacaccggcaaccattgtgggccacttcccgcctatcacgccgaccgtagcctctaaatgaattgtccagttgacaacaacacagtgtacggtcatgcaggaacatatgcgggcattgcaggctaaagtcaatgggagagtcaggactcgacgtcaaccccaagttccgaacacgtgtttaggtaaccctcaggtaactatgacaaaaagatggcgaaatgaacgtcctaacaataatcatattcgtagagaacgtgtgaacgaacaagagggtctcgatctgaatcaacccacacataactccatgcagaatagggagccggttgcacctgatgccagtcgtggtagagaagagagaccgcaagaggaagaacttgaatggtgaaacccgagaagtcgagtctggccgcaagtggagataaatgaagtaaaatttgattcttcttctactaacagttgctcccctagtatctataccaggtcgggttctgttgagacacaacgaggagggagataccatgttcatag

SEQ ID NO: 121040 - DNA, 869 bp, Cannabis sativa
tttttttttttttagctattttaactaaattgagctgaaaagtaatctctttagatcaatagcccctctagaccttttgaacattctttaatctttaattcaaagaaattgaagaccacgagttcatatatttttctatcttatacttattgacatctcataatgttctctactacctttttttttaagaaaaagttgatctcattgaaaaccactcctaagagggaaaatgatatcaaggaaatatcgtttatgaatagaatcagtcgtataaggtcatctccaatggtactttaaaaactcaaatttaatgtaattttttcattaaaaatctccaacccaactctaaaagtatttctattttggtgggagtctacagtatcccactattattagtggaacactgtagatcactgtattttactttttaataatttaataatctttttccattcaaaaaataaataaataatcattttttaaaaaaaataaataattatataataatataatttattaattaaataatataataataaagaatatattttttagtataatttttagtgttatggttgaaattaaaaaaatatttagtatttaaatagtatctatttaatgttgatttaacactaaatttaaattttgagttgccctaataaggtcaatacaatgaaattgaggaggcacattctccctaaggctagtttggctgtagttaactatagttcgaatttaataaaaaagaaatagtttaagagatctataactattaaaagagaggatgttgtttttgggctttcttaaagtaaatgacaaaaatgtcattgattttcttaattaattacttttaaatccttctatttttt

SEQ ID NO: 121041 - DNA, 2214 bp, Cannabis sativa
catttattggaagtatgggatttcattattttcattacattaatctcaaatgtagaagctgattttcttttctttctttcttgggctttatcaggcatttgaatgtgattgcattctcttgggtaaaagaagaagacaataaagaccaaatatatggtggcaaagcaatactattgataacttgtcttcccttccctgtttcaaaattttcaacaaaaaataatgtattcaacatactagaaaaaaataaatacaaaataaataatctcacagtttgctcaattgttgaaaaaacattaataatgaatttgagtacgatattcaaatttttgctcagtggctgacatatggggatggggaaagaacgaatttggtttcaagagaagtttattaatttttgtatgctgctgacctgctgttttagtttatgaaaattggtttggtgtttcttgactttcttctattgttttttttttttctaagttaggtaaaataaggtagcaattgtttggaggtaataaaataaaatggaaaaaaaaataatttcataaaattttataatgcaatcccttgaaagatatgtattgatacacatctctgtctcttttagtatccgaaataattttttagtcaaaattttgtgtaaatactattttggatcctatattttataaaaattatcgattggaccatctattttgttaaatgataaaatcaatcctgtattttccaaaatggtaagaataagaccctgagcttaattttcgacaatttttttttaatataactaatgttatattcgaaattcggctacacttcagaagctaacacgtgtccaacaaaaagaatatgaatcaactttaatgatataatagtgttatgtcattaaatgcagattaaaataactcgttattatttcataaaggtttaatagataatatttaaaactagttgattgtataatcttaagcgagacaataataaaaactatttaactgatattaacgagaaataaatctgcctcggaatacatagacaaaaagaggatattcatcaacttaagcagaataaatgtacacatacaatagtctcgagttgcacttggagagacaatcacctcacaatactgagccaaatgaagggatacagcgaggtgaacgacttaccaacacttcacattttttccttattaagatgaataaggaggataactcataataagcgacatacaaccttccaagtcagcaataaccgtctaaaggataacaacaaagagcagtggggtagttattagatattattctacatgtgattaaatgaaacatggggattgtccacgtttcatgaataattatatttgaattgatcccaaaagaatagctctcaacctatacttctataaataggggcaaattccacaaaaaagggacgacacatttgagagagattattattatccaaatattgtattctgtaatcataaaaattcctaataaggattcgtggaatatgtagattttaactacaaaattacgtaaaaatatctagagtgatctaattatttattattaaattctgtaaagcatttattactaaaaaaagctaattttggttaacgaaaatatgcgttaacaactaatttaaagacaattcttaacacgaacaaatacaaaaaaatgtaaacaatttctcataacacttttagattaaattagtattaaattttattttgataaaaaatcagttcagggtcctatttgtactatttttgaaaaatacaggatctattttgttatttaacaaaatagagggtccaatcggtaatttttgcaaaacacaaggtccaaaattgtatttacccttcatggtcatgtaaattatagttaattaagacatcctgcaaaattttaaaaaattcggaaaagtttaacacgccgaaaaatacgttcaaagagtgtgttgcacacgtgactattttattatatggatattggcggctaaaccacttaaactttacggtttgtaacagttaactacaaaaattaaaattttggcagcataactacctaaacctggttccattttgctctgtacattccgtccaaaaatcatagtcaagtgccacggtggactgtccacgtgtacacccttgtacacgtggtaaatttttagtggtccacgtaatattagttttaaaaaataattaaaaatatt

SEQ ID NO: 121042 - DNA, 1735 bp, Cannabis sativa
atacaaagtaattgacttatgcataaataaattctcttttattatatgttgcaagcttgatgtattttaccttctcaaattaatcttgtaaaacttcaaatgcttgactccattcgatctgcttgaaaagtgcttgcttcctcctgaggcaagacttaaaaagctatctcccgaaagcttgaagaacattctcccaaaggtaggcattgtcattcttcttttttgtagacttgattacagactcaagacaatacaaaagacataacacagaggtagagtcgaactcactctcctatacaaaacaaagacatttttttctaataatatgaataatattcaaagtcaataaaagagatacaaaacctaactactaaaatatgtatttataataaatatacacattttagacaactcatatacagcctagacaagaccacatctcacaaaaaaacttccctataaaagatcttcaatcaacttaggaatttttacttatgtacctacaaaattgtagcagtaagtgggactctctttttatagaaaaggaaactcttattttgatttttttcacacaagatttgatcaaatcatttagaaaattaatataagatcataatacactaataaacacatctgcaagataaagaattgattcttcattaaaacttactaattgtgtcaacctttcccaatttaaaaaaatttgacacttaattcacctttaattaaataaataaatgagaataaacaatgcaccttagctgaaatcttataaacaaattataaaaaaaaaaattgtcaatctaaatatgaaaaaatagaattaacaatagatgccccagaacccacaattgaaacataactctggaaaacattcaaaacagaccgcaataattgaagccacctccccatccagaagagtagccttgatcacacgaggaagaggtttagagatatctgggaaaaaacaaactctaataaagttcccaagacaatccagtaaagcattcacatcaacctcctccatgctcccaatcatcccaccaagtttctaacccattcattttgataaacaatagataggctgatcatgtaattaaatcaaaaaagagaccagattgaaattttgattagaatactctcctacttcagtcggggtttctaacacaatcaaattatcatcaagaatccacgggccatcaataaaaacacgatgaaattccgattctaacccaaacctaaacagaatgtgattatccttgatcgactccacctcgaaggtgcctttaggtttccacaacataccaaccaaaggaataacatgttccctgaccaccgtttttgatgtacaaatcttactaaccaagattttggctacccgaacagccccctcccattggttagacgcacttaaaaccaattgaggaatgtcatcctcatcctccaaagccaaagcttcatgaagcaccaccctacatggagtacccatagaaaaccactggcaaaacgaacaaaggtcgacgacggctgactactttcattaacaaaagagagtgacgaagagaaaacattcttgttagtgtggggactttaatattttaacatgttacatttatatttttttttagacctcgtgaaattaggtaataaatcatgctttacaatagaataattagcaattttccccttgaacttttgacaatactgattatgcctcctaaaatatacggcttgt

SEQ ID NO: 121043 - DNA, 1423 bp, Cannabis sativa
  modified_base (1396)..(1397): a, c, t, g, unknown or other
tctgttaagccttgtaaataggtgtatgggcacctagatacaagtcaacattacatttcatattttgtgcttttcttactgattctgtcaactcacaagtgttgtttgcaatatgtagtttaaggaaaggctaaagttgagaaccaatgagttaagaactcagcaattattgtacatgtgatcgacctagagagtttggtctcgggacaattcaagatttattttgttgtcgctatgcgacatgttattaaatataatttgtatatgaatatgtggctttttaagatggaatctcttgtatttttgtataaatatttatgtatgcatatataattataaaagttaaagctttattaaaagtttaaatttatcacgatttttgagaaaattactatagcgcacccaagcaatagggcgttacaatttttggtatcatagccactaagttatttactaaagaccattaagatatgtacaatcatcatcagagataagttctactcacggtttagtaagtccttacttatttagtaatttatttaatttgaaaagtatgacaggaaacatgttatttgtttaaatatattgcctaaaatccatgaaaactatattaggaatatatgtgatcgttatctaacctacctaacttatggaaacgaggctaagtcccataatatgggtgtccagtgaaacataagaagttagggtgaaatggttgagaccagaggtggtcgggtggtcaaaacccccaatatccctgtggatgcagtagaggccgtggtagatctcaaagagttagccaaaaggagtccacctcaggctcctctagattggaagtaagggtttgtagaaatgtaagcatgacttaatcaataagaagaagaaattcggaggctagatagcaaggttctcctaccgtgcttgttaggattttatgccctaaataaaacttatttcaatattatcttatttgttatcaatagaagattagaagttatttaagtcattttacaattggaacatacctcgtggggtcataagcatttgaaatcttcctctctaaaatctcttcttcatgaacatccctctcgaaatcccttcttgtaggaccccctccttgatttggtctgctatgagtctaagtttcttggggttcttttcttgggtgatgcaccgtttcctcttcccttactcgctcatctggttgagcgtttttcattatgaggaagttttgatttttctgaggagatgtgttttcttcaagttttaatttcaatcaaaggctgtcaatgaaagcacaaaattgttaacatagaatttcattaacaatgttaggttccttaaaatgaaattaactgagatcgaaggaataacttgttgggttttgtgctctaannaaaacccatttcaatataataagatt

SEQ ID NO: 121044 - DNA, 1181 bp, Cannabis sativa
  modified_base (1085)..(1097): a, c, t, g, unknown or other
cgtgaatctgttgttcagcaattggccacattcacacatatctcatttatttatttagtggattttgcacacaatgtacatgactccatattgtacatttaactagaaaagtttgtttccacttctacacctaacacatattaaaagttttaattttttatcatatctattagttattagaaatattaagactacacctgtgactggcttgtttatttatttataaacaactttttacaaaccattaacgcaatatataacactattcacactaaattttatcaactatcataaacacaattaaatgaatactttattgtacaataagtacaagaaaggatagttataattgtttattatgttagttgatccatcattattgcctgttacaccattcatatctctatttatcatcacaattcacacacgtgtacaaataccccatcccaatttcagcttcaagttatgacatctattcgggactatccattaattaagcatttcctctgttgcattcaaatctctaagcataatttacttaaaaggcactagtagtgcctaatattttgtttagtgttatactgttattaatataattaagtgtcgagtgttatataacttaagaaagtaacttttaaaaaatatcgttgatcaagcactcggtgctacttacaaaaggtattgtaaaaaaacttctgaactatcatactttatagtttgttcatatctctcttctctctcttcttttgtgaccaatattgacctatttacttccaaaccaactatgaggtggagacggctcagagggctatataggaaaattgtcttggaaagaagatgaagtggtcagttgtagctaacgacaccaaggtcactgcaagggcaagaacctcaccctcaaacttcaaggctactctattgggaaaaactgtcgtcaccgcttacagcaagggcaagaacctcaggttccagcttgattcgcctactatctcttccttctaattcagtactttttggtttaaaaaacctcaaaaaataacgcagagttattctaacagggtctttatgttggaaatattttaccnnnnnnnnnnnnntactaacaagtatgttgtttaaacatcctaaatgtgaacttccaaaacgatattaaataaacacatataaagtatcagaaacct

SEQ ID NO: 121045 - DNA, 1758 bp, Cannabis sativa
  modified_base (1704)..(1704): a, c, t, g, unknown or other
tcttctcctagattaatctgatacctactcattactcccactcagcagtaggtgtctggtctaaggtgtgacctcctacaaacaaaggttagaccacagaggactcatccccttaagcccagctgtgagtgccataacccttgcatccttgctaagacttttggtcttagcggcgtcctataagaaccattggatgtagtccttgaggggcttgtcaacctgtttcttgacatccactaaatcattgggctcaatttggtgttgtgaggaaggagcaaactggttaccgaaagcatccactagatcttttaaggagtcgatagatctatgggagcttaaggtaccaacattttgctaggcttggtagtgtaccagggaagattctacacctgacattgtctctcacaccttaaagatcggtctacactttgaagtaatgggtgtgagacagtggatcctccttcccggtgtattgatgccaaaacttcagaggaatgtgaagggctttgattcgtacagagagtggtgagtgtcattccccatcgagcttgaatttagacaacttaattgtcgtgatccccttcactaaagaaactaaggtgtcaaactctacccgattgaccccatgaatggtggtttgtgtcctagatggagcttcgatcacccggttagggtcttctctagaagttcccatgtctgttgttcttcttttattcaagaagtcatttaggtctctttgtcttctaggtcaatcatgtgctccaattgacctgggtcttgttgttgtctgctgaccacgggttagtgaaggaaactctggtgaggcctccagaatgaacttaggattgtctcaagacaacccagtgtgggagtgttcattcagtgcattgtagtggctacttccctaaaagtagtcttcagcaggatcacaagtgcaaagagaattgaatttgtcactcaagttgaattattctccatgaacttgagggaagtattggtgctattttccatcggggccacgggtaaagtaatagcataactgctctctttcatctcaaaatacttctaagtataaagtggctcattggtccttactcaccgaacttcatagcctccagtttcaaagtagggtctcctactacttccttcaggttgagtagtaggtccatttccccttccagggtctcaaggcttggtttcttaagaacattaaggaggacttcatggaggagtcctgttggttctctagttgttgcgaggttattcaacaataggtggaggacccattagttggcaccctcgagcttgagttcttttgggcttttaatcaaaggtactatccctctaggagctctccatgcctggtgtgttcctagtgcctgctcagttaccaggtgtagtggttgtgttctatgcattcaaggttttaccttggacactagttcccacgtgaccagctggtcgacagggtgtctctctcaccaactcagagcaataagcctctttaattcgttgagataggttagctctctgttgttcctgctcaatgtgttggctttcgatgttcttccaattttccacgaaccagtgtggaaaccgtttgtgttgcttatcgagagagtctcatagctgatgttacaagtcagccatagtttggctgagctgagctacctaaggattagtctgttggaaattattttaccnggatcttagatctactcacaagagatcggaagagcgtcgtgtagggaaagagtg

SEQ ID NO: 121046 - DNA, 940 bp, Cannabis sativa
agaaggaaaaaagagccccttgcatgtgacctgggagtatttaattgatctaaatgcttcattaattggaaaaaaatacatttgatagatataattaaaccattgattataggtatatggacttgtctaattttgtctctacaactttgttggaaaagtttgttggcatgtcaaatcaattttattgagaagtgtaccaattagtgggtgtgcccaatatatgtgtcactatttgataaaaatgaggataacatatagttccaaaatgtttattccgcctttgtttaatgaagacttcaaatatattttccttgttctgtggaggtatggtgactcttgaaatggtagagaaaaatccaaaaaatattagggtttgaagagaattgcactaagcaagaagacattgatattattgtcaagtacctaagcctagccaatattagttattggagataattgcaacaagcctaaagacactagtcctattctcaagtgcctacatctacgcgacattaggacttgatgcgaaaaacaagttgactagaaaaactatatcactactacaaaaatgaattttctagacgtttttaaacactcgtttaaagtattcccgttggtttctataaccgtagtctatatgaccgtcgtaaaacgaacagaataggcgacgattcaaaaccgtcgctaatgtagatttctcaacggtttaaaaccgttgggaatataaaaaaaaaaagagaaaaaaaatacagatttttctgtcattaatggcagaaaaatctgtattttctcccatttttttcctgcattagttttataatttgacctaaattaacataatacaactaattcattttgttacaataacaactaactttaaaacacattaatgttatattatttgatataatataatataaattaaaatatttaaatgtga

SEQ ID NO: 121047 - DNA, 924 bp, Cannabis sativa
aactcaaaaaaagcgaaaatttctggaaatgacacttttccagttttttctaatttcggcaattattttgaatttcggtatatatactgacgtggcacaacggtatttgtgtaaataattctcttaaaggtatttttaaaaataaaatcaattttaggtataatattgtaaaaatccctagtatttttgtaatttttttttctttttttgtatttttctgtttttttccctagtttaaaagcaaatagaaaatgagacctttattaaatacgagtttttgtgcaacagcttaagctgcctaatgtttgggtcaatcttgtgctccattagggtcgtctttagtttttatggagtgtaggacacaattttgaaaatagactttctatttgagaaataaaattatattcaaaataattttttaaggtaaaatttcataagttactattttgataaaatatttacacttttatgtaattcttttttacttttttatggtattttataaatacaaaaaaaaaacataaaaataacataaaaaataataatattaaaataacattagaaaaaatatataaataacaaaataataagagtacaacataaaaatacattaaaagaacatattttatgtaaataaaattttaaaaatcgctaaagtatttaaaattctataccatcttatttttgtaattttttttttgttttatatttttttttgaaattatccaattttttaaaccatttttaagaaaaataaaaattggggagcttgggaatcctcttggaataaggggccttcccatcatagagattgccaaataaaggtggcgtttggtaacacttttttaatgagttttttgtttttaaaagtagaaaagtgaaaatatttttcaaaaacatgttctataaaactgtatttacttt

SEQ ID NO: 121048 - DNA, 1719 bp, Cannabis sativa
  modified_base (1662)..(1681): a, c, t, g, unknown or other
gggctgaacctctataaaatctctgtgtcttattattgctttatcatatatctgttattatatatcatttatcgcttataaaatagactcattgtcgttggctaaaagcgaagtcaacaaatacacttaatgggattgtttgggagaagaactaaaatagcaactaatcacctttaacagtttaggagaataaccaaatgtcgcctttaacagtttctaccccagagtgagtggttattctcatcatggatcctacgatccaaatcttctatttctttctcgttctcttttgtcagaatcaccatcaacttatgatcaacccttttatttttgagttccaccctatagcattctcgagttaacagttggtcgcctttaacagtttctaccccagagtgagtgggcaatttttgtgacaaatacttaatcgagcttattgtccccaatcctattaaagttggacgacccatcaacacattgtaaacagaagagatatcacaactaaaaattcttgcatttgagtcgcggacaatggtggttcccccatggttaaagtaagttcaattatgcccaaacttgcgactgtcgcccgtgaaccttcataagtttaccatgcagggtttcaattttgcatcctctaatcccatattttttaaactttccttataaagaatgttgatggaactcccattatctatgagaatcctttttatcctcttattcgcgagctgcactattatcaccagaggatctgcatgagggtattgtacatgtaatgtgtcttcataaaaaaagataatgggcggtttatttgattgtgcccttttaagaggttcaagagtgaatgctgatgtctcattttttacctcattaatgtaccttttctatgccatatttctgtttcctacaaggtgcggccctccagaaataactaagatatccttgccctctacagggggaagttgtatccttgggttattcgagttgttgggctgattattctcttgtgtcctcacatattgccttaaatacccttgtgagattaggttctcgatttcatctttcaactataggcattctttggttgtatgcccaatatctctatggaaacgaaaatacttatttggatcttgcttgttcctcacatgtctcattgggtctggtctgtgaaatgcgacctgattttcatcagcgaggtagatatttttccgagtctcatttaatttagtatacactgaataaataagaacatacttttcatgtttcttttgctttttcttatccttggatgagtctcttgattcatccttccttttggtatttaaaccattcagattttccactttagtagtcacggtgcttgctgttgctgtactagtgctggatttatctcccgagctggactttaatagctcaatttcattctgtgcctcctctttttgcacaaaaaattgtgctctttcaatgaactcgttgatatttctaacatgacgtccttgtaaatcatcccataattctccccctactgttgacaagtcagttgtaattccaacctgaagggctgttaattgaatggtgtcattcaaatttctgactttggttgtagccatagtaaaatgacttaagtacgccataagggatttgttggaaattattttaccnnnnnnnnnnnnnnnnnnnnaagtatgttgattaacactctaaatatgaacttctaaa

SEQ ID NO: 121049 - DNA, 1309 bp, Cannabis sativa
  modified_base (1239)..(1274): a, c, t, g, unknown or other
ttgtcctcagtagagtgattcattgattcatctatcagatgatcattctttttctcttccagcagttgaaacgaattgctagtggaggcaacaccaatagcattctctgtcttagtcttccaaccttaaactacaggttgaaaaccatcagaatccacaacttctttctgctttgttaggttctcactattcttttttttttttttttgggttcttcatcacccactattgtttctatcttggctccttctttctacaatcatccgtagcatgccccataccattacaattagcacatatcacaggtttccattcataagagatggcaaatgttgtattacaactgttttcatcttcgaactcaataagctctggaagatcctgtttaatagccacttcattgagtaccctagggaagtttaacttttctctccttttagtagcctcatcatccataattggttttcaatctgccctgtaatcttgtacagagagactttacccccaatatttcaaatctaagtcatcaagatggacacaaattgggaccatcctaatgtcttctttcttaacattgattgagggttcccaaggtttcatcacaattagtcttcgattaaagaagatgtaccctcctgaagaacaacatctctgtctgtaatgttgttgaacctaactatatagatgacatatgataacaaccctactctttcaattttatcagaccacattctcctaacaaatccttctaacacagcaaggggaggatgagctcctaaaacataacacacaatagaaggtttccagaaatcaacttcatcttgaatatcatcatttgttatcttcactttgttgctcgaaatgttgaatatcatcatttgttatcttagcaaagcattgctcattagcctctaagaaatgcacgaaatccttcctgatatcatcctgctgaacaattgacctgagagaggacttaggggatagtggagcaggttcctgaaatcctggaggaatcgctccaatcttatcaccagaatcttcatcttcaacatccaaaaattcaatgggagcgattcctaaaactgcatccattgatttagtttttcgaacatccgaaacagagttagggcccttcctcttcgcaaccttagttgaattcaccttccctcgccctcttcctcttgttttcgccattgctccagcacgagctgcaagagtcgagagagagagagagagagnnnnnnnnnnnnnnnnnnnnnnnnnnnnnnnnnnnnagagagagagagagagagcgcgagagagagagaga

SEQ ID NO: 121050 - DNA, 1019 bp, Cannabis sativa
aaatattaacgaactctcctgatagttgattggtgttcacaataaaatttgccaagaattccaaatttccaatttcaggtgggatggttccaaccagattgttattggaaaggaccagaaacgtaaggttttttaggttccacaaagaagttggaatcggacctgtgagatggttcttcgaaagataaagtcgtttaagtttctttaagtttccaatctctaaaggaatcgaaccagtgaaattattgttgaaaatagagaagacctccatattactaagactagaaatattatctgacaactctcctgatagttggttggtgcttacactaaaatgtgagaggagttttagatttccaatctgtggtgggatggttccaaccagattgtttttaaaaagttgcaagacagttagatttttgaggttccataaagaatttggaataggacccgtgagatggttctcagaaagatccaatattttaagtttcttcaaatttgaaattggacctgtgaattggccaatagaagatggaatactcccactaaataaatttctatatagttcaagaacctcaagatcatgtaggagactaatctcattaggaatatcacctttaagaaaattaaattgtaaacgaaggtgtttgagcttagaaagttttgaaatattagatgacaaatgtcccacaaatttgttatcggtaagattgaaaaattggagtttgatgagattggaaaacacagattttggaattgacccactccaactattttgagacaagtcaaggaaagtcaagttcctacacttagatatgaaacttgggaatgttgaattgaattggttcctaaaaagatcaaggtatgttaaaaaaggcatgcttgaaaacttagaccaatcagaattctcaaaaaaatttgctccaagtgataagtaccataccttttgtagattggtgagctggtaaggtattggcccctcaagagaattgttgaagagactcaaatattgaagctct

SEQ ID NO: 121051 - DNA, 1113 bp, Cannabis sativa
  modified_base (46)..(72): a, c, t, g, unknown or other
aagttctatgcgtggattcaataaagaattaataagttagtgaatnnnnnnnnnnnnnnnnnnnnnnnnnnnttggaagctcggttatatagaacacattaaataactagttatttttaagtttttttcattagtttttattttacttgattgaattaagtggtagagtctaagaatttaattttttgatatgtttgtttttcttagtaaataggtattctaatacaatttattttctggttgttattttgagacctttcaggtagttattcagtgttacaaagctaaatctctagcttttctggtatgttgtttgaggacgttatagttttatcatctaaattcccgaggcaatttcgccccatgtttttgctcacttattgttagcaattcatggtttagcaaagtgcccttcggttagacgaaaagttatcttggttcgatgagagtcctgcgcgaagtttgcaaatagatgcatcgtaaattcttgagtgatactaatcactatgtaaaaaaaaaaaaaatagggtgtaattgtagttgtgtggaattctactaatatattattaggatagttttattaatttgtaccttaaaaatttataaaagatactctatttatttaataattatgattatatataaaatataaatctttactttataatagttttttatttatatttttttattcttaaaaaatgtacctataaaataaaaataaattgaatttttaatattatgacaaaaaaattacacataacttaaaaaaaattataaaaataaaattataataagtattgtaattaacacaaaacaatgtgagaaagaaaatttgaaaaaatattaagattattttttttttttttgaaaattaccttaagtttattttttatttctttaaattaagatgcacttataattttgtggggtgaaaataaaatttctattattttattattagtagttcaaagattagtttgtttttatacaagtgcttcatatcaatgacaagatactgtatcaagcaaaatgtgacaatgaaaagaattagctacttaaaattaaatcagtatattatttatcaataatatatttattgggatatgattt

SEQ ID NO: 121052 - DNA, 3073 bp, Cannabis sativa
gaactaaaattctttaaactcaatgacttgagttataggctccatggcatttttaacacttgctggtttcaagatttcgatcacgggaaggtgtttggcgatggggtagtgtcggagggagatgagatagaaggtggagatcatgaagaggcgttgggtgattaccctagagaatcgcgttctctgggggggtcactttcggcgccggagaagtcgacttctggtggaactcaggagacggtaaaggaaatcgtacaacctatggctctacaaccaagaaaatctctaaggacgtgcggagatggttcggcggccgaaacagctgactgcctcctaggtctcgatccttacgagaccactgatttgagccttcgtgaacaggggaaggtggtgagtctccctactatatttaaccgcctattgagaagtctgagggtgccacgtgttagtagaaatcccacttttaatgcttatatcaatctagattacagctgtcaaattgttgacaaaagtgaaccttttaagatgggccttggggtactgggccgaagtgctaaggtcccagctctgaatgatgagttgggccggtccattagtggcccttcaaagaagactcctgtccatgatgtagcttcggataagaatttttcctatttgagtgggccgactatttatactcatctgggggacctgtggtatattcaaaaaagcccttttatcattatcttggaccaaaattctggttctcaagatttgctcaataaaaggacggagagtatggtgttagtgattttaatggggccagaagaaagacaaaagctttgcacagaaagatgaatccagaacaaatagtacatgaatttttcaaaggcagactgcgatcaatcaatcctaaagctcgagagaatttcacaaaggcgataatacaattttggaaagattttgctctggaaaaaagaaaagctacacaatcagtactccactttgagaaggaggtggtaccagagaaggaaatcagacctgcagtcactattgtgtataacaggaaaagaaaatctattacttatgattgtgtgagccactacaattcagaaaattactctcttgagtcggaggaaaatggtgaagatccgaaggaagttgaattcctagacttaagttcggaggatgaggactccgaaggggaaggagaagatacagagctagatgtaggagaagactccgaggatattctatgcaacataaacgaattgtggaaattggaggttgaagatccaccaaggcaggaattaggtgtagagaaactgggtgatgcaatcgaagttaagaaagatgcactctcttgggaaaagatcattgattccatggatgagattgatgtggctatttcacaagagacaaaagatggtgatcaaaagggaggagaagaaaagtgtgaaaggaagaaacaaagagaactaaaaaaattaactttcaacgtcaactatgagaaaagttacaaaaagtcaggggcctccaaagattcattatgaagatttttacatggaacataagaggtagtggggataagggcaaaagacacgctatcaaagcaacaatttgcaaggctaatccagacctggttattttacaagaagtgaagaggacatcagtggatagaagattcattggcagtatttggagatccaggttcaaagcttggataattatcccagccatcggtagatcggggggaactttattaatatgggatactaggaccatcacggttcttgattcactcgttggcgaattttccatctcagttttgattaaagccgaaggcaaagatccctggtggttctccggggtgtatggcccgtgctcttataaacttcgacctgcattctgggatgaattagcaggtttgagcgcgatctgtggagactcgtggtgtgtggggggagatttcaatgtgactaggagacctggggagaaattgaacagtagctcgtgcacaaggagtatgaaactctttgatggcttgatacgggaattacgactgattgaccccaagttagagaatgggagatttacttggtcgaactttagaacatctccagtttgcagtagactagatagattcgtatttaccaataactggaacgtcatttatccgtttgccagacaagaaatgttggtgaggctggtatcagaccatagtccggtcgtgattgacttaaccccgccgagatggggtcctagccctttccgatttgataatcaatggctagagcacaattctttccccaagtcatttggaagatggtggaaggaggccatttctaacggttggccaggcacaaagtttatgagtaagctgaaaaagactcaagaaaaggtgaaggagtggagctcatcaactttcgggcagaacaaggccacaaagagagcgttggaaggcaggctggaggcattagatagactagaaggaaccaattcttgggttcaaagcctggtcgaggaaagaagaaaattaaaagaggaatggcagcagctgaattttgaagaagaaagaagtatctggctgaaatcaaaatgtaaatgggctaaggaaggggatgcaaattcaagatttttccataatctactaaatgcgaggaaggccaggaacaccatttcaagaattgaaagagaggatgggtccattattgataaggaggaggaaattgtggaggagctaattggttttttctcgaaactttatacctctgaggcaagaagggggagtgggattgagagcattgaatggcaacgcatcgcgtactcctcagcatgccaacttgaaagttcttttgaagaagaagaggtcaaaagatcggtttttagttgtgaaggaagtaaagcgccggggccagatggttttagcttggcggttttccaaaacaactggaaaactattaaggatgatctaatggaggtgtttcggacctttgagaaagagggaagaattgaaggtagcatcaatgaaacctttatctgtctgatccctaaaagacttaacagctgcaaggtcaaagacttcagaccaatt

SEQ ID NO: 121053 - DNA, 2770 bp, Cannabis sativa
agttaataatagttaggttgtggggtttgttgaattgtggtccatacacaggtcaagtgggtagatagatattaaagtattgcacttttgggtaaaaatgaagtagtcaaaggttgttagggaatcttatgcctttgtcttctacaaaaggaacatttgcacattttttttttttgtatgtatgtaagatgcgggggctaaatgtttaggggttttgtcaaagaattgggtaaagttgttatgttttgcctagtaaacatctaccattaactctatttatgttatccatgcaggtttgaacttggataatttcacagtgaaattattccatggggatttctggtatacccgttgtggcaataagatgtatgagggtggtcgaattccatattttgatcactatgggtttgaagggttcaacaggctgcatttggaagagatggctctggaatcgggataccagttgccatttggatttccatttaagcctaaaaggaaacaccttaatatgggactcaggatggttgaacaagaccaagtcgatatgttgttagatgatttgaggtctagaagctacagggaggcaaatatatacttggtactgccagatccaacatgtgcattggattggcatttgtctgaggatgttgtaaggcataatccaggaccaccatctgaaaaactaaagaagtgcactttggtgaagctaccatcaaattgtggaattgtggcatatgttgttgtcaatccacatggtcattatgaccccaatgacatgttctacaacaaatttgtcaagtggggagatttagcagcacagtgggtggatgaggaagttcattctcgtgagtgcagcccccaatcgggaaatactattcctgagataatcgtgatatcatcatcatctgagtctgagggagatgatggaagatggatgaagatgatggagatgattaaaatgatgatgaagatgttgaagaaaatgatggatctaatggagatgaggaggatgattaagatgagggtgatcatgaaaattttgaagatatgatcgcatttgctgaggaccacttagctcatctagatgatgatggaggcctccctaccttccctatcctcccacccccccatgcaccagaaagtcctcctataccagatgttgcaccagctgcctaggttatgattatgcttttttaagcattttgttagatttgattgcattaaattagtttttcattgctaataaatgaagtttgctattgcaggaattaagtggattatctagtgattcagaggttgtgattgttggtgtaaatgaaggtttagaggagacaccaagaagtaaaagactcggagagaggaggatgcatgattcaattgcacctaatcagatgcaatcccaatcccaacctgaatatgagcatcaaatcccaaccgaatgtgaaccagacattatatcccaacctacatatgagtttccagaagttgaattttcagaacatgattcagaaccccaaattgagactgaagttgaaccccaaattgagactgaagctgaaccccaaattgagccagaagcagcaccccaaattctctatgaagcaacaccccaaactgaacatgtagcagcagcccaaactggacctgtagtagaagcagcacaaccaactgaccacctggctagaattaatttatatgcattttaaagattttaatccattaaataagtaaaacacacacaacttaatttgataccatgttatctttgatttacaggagaccccagaagcaaaagacacaaactgaggaggatgaggagacaacatactgcaacccaaacaacaccccaaccagcaccccacactacacagcaaacaaaccctgaaacagaactccaaacaacagcccaactaacaccccatactaaacagcaaacagaccctgaaacagaaccccaaactgcaccccacactgcaagccaaaccggccacacagtaccccaaactgcagaccaaatagcccagacagtaccccaactagcaccccaaaaagcaccacaatctgaagctaagtttgaaatgcatgaggaggagtataatggtggaccagatgtggagttgaataagaatgtgcaacctgagaattgttcttgatggggaagtcacaccgagttagtgcatgataatgctgatgaaagtgatattggtgatgaagttgaaatgggaagtgtgcatagtgatgaagagaatgaagcagcaaccccttataaaattccatttaaccctgagacaaacacagaggatatggaattcaaatgttacacggaatttgtaacaattggcttgcttagaaagactattaggaaacactttattcacaacaacaaggagtacattctgttggctaatgacaggcagaaatttagggtgaaatgtaaggcagcaggatgcccttggatgctgtatgcacatgtgaaacaagatgggacaacattcagggtaaacaaagttaagcctacacatgagaattgtgggattgtcctagaaaacaagcacattaatgcacagtggctggcagctcacttcaaagaccggttagaaatacatccaaacatgcattacgaagcatttctggacatcacaaaggacacaaaatactcaaagtgcagttattggcagttttacagagctaaagaccaagtcagaaaggaagtggaaggctcagtcatagagcaatatgctatgctggaggactgttgggttttatgccc

SEQ ID NO: 121054 - DNA, 1560 bp, Cannabis sativa
tgtttttatcttgcattgaaatagtctttcctttcattttaaaataaaatagtcattccactaaaatagtagaaagatcattttgttagaaaaagaaaaactagtagggtccacatacaacgtatgattatacctccaaccaaacacaacctaattatattctttcttcatatatatttttctctaatttctttctttttaaaccaaacaagtgttaggaatgtcgtggttgtcaaggagatcatggttgatgatcccaattattgacacaactacaattagtatgttcacaatacattttcaagatcattaagagcatctcaaagtggctccctaaaaatggcttcttagcaattttagagagctcctttcaaaattaacaagagagctaggaggtttgccttgaaacaaccacttttgaaagagatgcgtgtaatagcttacagatcgagcgctcttgcattgaagatgaacggggttaagcagtctttctttgttaatatcaattgaatgagactgaaatatgaaatcaaaactcacaattcacacttgtaaaaaaaataaaaataaataaacacaagaattttgaaaaatggaacaaacaaaaatgaaacatgcttcccttgcaaagttcaattgaccttggtagtaaatgacccaaaagcccatccttactatccgtaggcatcatcaagccaaactttggcatccactagttttgctacctaaagagatggcgaatgtgagattaagatagtagagaccgagaaaagagataaatgtggtatagttcctccaaatgaaaaagatctccaaaagtcattcttagaaagttattcactcatggaagccagtcatgaaaagctctcttgtccttccgggaagggtcagctagcctttctctaggaagaaattctagatggctagtttttctttctggaaaggtaattctggatagttgactccaactggctctatcctatagggaagtcccttcagtgagtgtcctcagtccgtgatcctagaacttcgtatatgttcctgtatgctcttagacttatgctgacgtagagatctcgctcaaagaagagttggttaagttaattattgtctaacaaacttaacaacttcgtttcttccagccaccgaccttaggatcttgatcctaaggttataaatatcatcatcacttatcatttcagagatataaagaattggcaagtttcaaggggagacttcgagattgagagagaaagagattgagaggcagagagagaaaggtacagagaaaaaagagagattgggtttgagttttttaagaaaaatcttatgtagatgaaaaagattcttgggaaaagtgtgagagttgaagtactttgagagaactcaacagagaatctttcttgactgtattatacccgttcttactcaatcaataaagagaacttggtggtgtaccatgtgacagtcagtagtcccatgatccataagggaaactgggtaagctgtgcaatcccacactgcctggggaaggtcaagtgagatgattctgagactgtg

SEQ ID NO: 121055 - DNA, 2338 bp, Cannabis sativa
  modified_base (147)..(155): a, c, t, g, unknown or other
gatgatttgttcgatcagcttcagggatagactgtgttttcaaagactgaactacgatcagattatcatcagctcagaattcgagaagaagatataccaaagactgcatttcgaaccagatatgggcactatgagtttctggtaatnnnnnnnnnttgacaaatgctccagcggcctttatggatctcatgaacagagtattcaaggattttctcgataactgtgttatagtgtttatcaatgacattctcgtatactctcaatcaaaagaggagcatgagcatcatctccgaatggtattaaagcgactcagggatcataagttgtatgcaaaattcaaaagtgtgaagtctagttgttagaggtatcatttcttgggcatatagtcggataagatggaatcatggttgatctgggaatgattgaatcagtagaaaatgggtcgaggctaaaaactgtgacagaagtgcaaagtttgctcagtctagcagggtattatcgacattttgtcaaaggattttctaagatctctatgccactaaccgagttaactaagaagaatcaacattttatatggtcagacaagtgtgaagcaagtttctaagagttgaaacaaagattaataactgcaccagtgttagccttgccattggatcgggaaaaatttgttgttgatagtgatgcatccagactaggtctaggatgtcaactgatgcaagccgacagagttataacctatggctcccgtcaactgaaggagtatgatcagcgctatccaacgcatgatttagagcttgctactgtggtatttgctctaaaaatatggcgacactacctttatggagaaaaatgtgagatttacactaatcataagagtcttaagtacttttttacccagaaagatttaaatatgaggcagagacggtggctggaattggtcaaagattacgactgcgaaattttatattgccccaggaaagccaatgttgtggtagatgctctaagtagaagaggtcccgggcaggttttcaccactgtgatgatagctcctcaactggcctcagaaatggttaaagatgaaatcaaatttgtatttggaaagttgcacaacttgacacttcaatctaatttgtaagaaagaattagaagggcacagttggaagatcccaagctaatcaaaattcaagatgaagtattggctggttggcctaaggacttttcaatctcgaataacaaaatgttactatataaagctcgagtttgtgttcctaataatggtgagcttaagtagaaatccttgatgaagcctacaccacaccttattcgttgcatccaggaaccaccaacatgtatcaggatttaaaaccctatttttggtggaatggaattaaaagagatgtggtagagtacgtatcaaagtgtttaacctaccagcaaatcaaagtcgaacatcagaggctgacagggttattgcaaccattagcctttccaaagtggaagtgagaggatattggaatggatttggtggttggtttgcctagaaccacgagaatgtttaattcagtatgggtcatagtagaccgttttacaaagtcagctcattttctgccagtgaagattacttatacagtggatcagtatgctgagttgtatgtgaaggagatagttcgtcttcatggagctcctaaatccattgtttctgacagtgatccaaagtttacatcgaaattctgggtaagtcttcaaagagctacgggcacaaagctgaaatttagtacaactttccatcctcaaaatgatgggcaatcagaaagaacaatttagatagaagatttacaacgagcctgtgtcatggacattgagggttcatggagtaagtacttgactttgatttactacaataacagctaccaaagtacaatagggatggctccttatgagatatggtaggaaatgttgttccccaattcattaggatgaaactggagaaaggaagtacttgggtccggagttagttcaaaagactaatgaagttgtagagaagatcaaggctcggatgcttgcttcacaaagcagacaaaaaagttatgatgatccgaagcacagagatgttacatttcaggtaggggaacatgttttcctgtgtgtttctccagtgaagggtatgttggtttttgttctttaaataaaatccattacaatttgatagttatcaatttaagaattttgaagacattatgattacatgtattttacatgcttatggtttaatatatatatatgcacaaaatcagttaaatccagaacatatatatattcacaattacattattgtcaa

SEQ ID NO: 121056 - DNA, 903 bp, Cannabis sativa
taacaagaaaaaatttatctttgaagtatttttctcttactatgtcaccattgtatcgtaactaaattgttatgtccaattaatagagctaagtctttcaagaaggaaatatactaattaattaaacttgcaccatacataaaatttgagagattaatcaaacttaactaatcaaatcccaattaaaattaactattttaccaaaaaaaaaaaaaaataacaaaactcaattaactaacaaataaatgataaaaacaatgatgtaaaataatagaaagaaaattcttctaaaattatttgaatataactaaaaagaagatttaaaacttatttgtgaaaattgatgatagcactctttgaagttgtgtatatgagcaaaccagtcaaaaatatactacaaactagctaaaatatagtacaccaagccaaataaaatggctcaaactaaccaaaaaagtgaaatactatatccaaaactagtagagatctaattttaaattaaaaataaaatagtaaaacttttaagaaccttaattaaaatactaaatatgatcttattaaaaaatatataccaaaagtatttctaactagttatagacaccttaaataatatttgaatttaaaagaaaaacaagtaagtatattattttctatattttgtagatgagaaatgttaaaaagtatcagtggtgcttagtacttttttatgtgtcaatattgctattggtcaaactaagtaacgagtttcttataatcagggccggcccaagcattttgggggccttatgcaaaatttaaaattaggctcttttaaaaaaaaaaaaatcgtgtacattaaaattacaattctattactagcattttttttcataaattttcaattataatttttttatttatgta

SEQ ID NO: 121057 - DNA, 1093 bp, Cannabis sativa
atatatatatatatatatcatgcggagaaaaggtgatgaaactaaaaataaattgaggttaataataaaaataattcgtgatgaaactcattatgttttaattttttataaaattactttcttattttttttcattttagctttatatttctttacaaatttgaaggtgacagttaaattttattgtcatgtgttaactgagtttatcactgtatacacctatatataaatgacactaacagtaaaatttcaaaactaataaaaatatgccatatataagtgtatacaataacaatttagttaatatttacggtaaaatttaatagatgtttctaaattacaaaaaaaaagtgttgttaaacgtataaaattaaaatataagagtttcaccgccaattatcgtaataataataataatgataataataataataggctactcaattcatcgatgactcaactgtgaaaagatattatagaatcgattattatagggtgagtttgatatgtattttaaattaatttgaagtattacaagggaaatttgtgattggtttaggatttgaatactattttatgttattaaaaattaaaatggtggaagttcacctaagaattcttgattggttgagtgttttcaaaaataaaatttgaatactattttgagttttaggctaaaaaatgaaaacatcatttttatgtttttatgtttttatgttttcaaatcatagaatctaaaaactctccaattattctcttacttttttattttgagattcccaacccaaccaatcacatattcaattttttaaaactcaaaaacattaaatcacactacaaccaatcacatatttagaactaattttttacttacaaaatttaaatttttgtttccaaaacatatttttaaaaaacacaatttttgaatcacaaaccaatcaaaccaacttaatatggttaaaggtaaatcataattttttaatatatcacctaatttaaaatatagtatctatactttgaatatcttttactcccaaagataccattacatttcaaaaaaaaaaaaaaaaatttttttttagttttttttttt

SEQ ID NO: 121058 - DNA, 778 bp, Cannabis sativa
aaaaattactaattagccttgatattttgtagccatcactggttactactatttatcatcgctgatgtttatgattatctttcattaacgccgactaccaccatctttcatcacaaccagctaccaccattgtcactattgtggctattttcatgttttttatttaaaatataattattaaaacttacaaaaaaattatactggttcaggatttgaaaattgtatttttaaaaattgtgattctgaaatgaaaatttgaaaactatgactgaaaatatgtttctaaaaatgtgattggttcaatatttgtaaactttttttaaattttaaaatagtgaatctgtgattggtacaaaagtatcaaaatatatgagtagtttaactgaatttgaaaacaaatttaattttaaataaataatgtatgatatcaaactttcatttatatatataaattaaattatataattttaaaatttaactacattaaaattaataaaaatagtatcacaacattaattttttaaagttaaagttacatttttttttttttaaaaaaaataactatgctctatttttattgttataagtaagttcatttgtccagcaatatcatctctaatattttctatctgagccatataagtttgattaaaattaatctctggcgtctcataaatttctactgttagattaaaaatcctatgtgggcacatatgcataatgtatatgctactataaaatgttatacaaaattaagtgaccaattatgttatgggta

SEQ ID NO: 121059 - DNA, 655 bp, Cannabis sativa
tatcaagctccctatatacgaatcgactgctaagctcgatcgagaagcactctcagtagccataccctatgagtcgaaacttcagagcatggatataagaaacaatagagagaggggaaggggaagatacatgttttttagggtttgtgattatttggtcttttccttaggatagaaaaggaaaaagatcataaaaataaaagtttcaattcccttttacaccgttcacccaatgggaggccaccacattgacgcaatcttggacttgttggtcttttcagcaaggaattgtatcctctatccatctcccccttacctgtctatcgcatctcaacaccccgattcggttcgtcgatctcttcaccgatgaatcgtagagaagaaagaagaattacaataaatggggatcaagaatcggagagaatggtctttgatttcatgcagtgattgaaatatcaatatagatttaagagaaaagaaaaaggaatcttgttctcggtttgaatcgcaatatgtttgtttgtaggtttgaagaaagagaagaacaagtcaatcgcgatattagtttttaatgataatattaataagttaacggcgttaatgataacgttaaaaaaaatgaaaagatcgttaaaccaagaaatgccgttagata

SEQ ID NO: 121060 - DNA, 1197 bp, Cannabis sativa
  modified_base (1142)..(1143): a, c, t, g, unknown or other
aagttgcaaactatcttttcattcattaattttgtataacatgtcattcgattattgcacagttcttggccaaacacttgaaattattcttttgttttctgtatatgtgtaattaattccgcgtagcctatgtattatatatccttgtcaatctatagtaattatatttaggccacaaaaattgatagtgtgtgtagtgttactttattcggggaccataatttaatttatatttcaattgcttatttagacgtttttcttttaagtacttttatatttatatatagctaactttgatgcatatttgcatgtgctgtaccaaagggcattaatcatctatcttttcaatatggcattattagaaatataactaaatttatgggtgtatttgggaaaaagacactttataaggaaagattgagtgtaatttgaaataattataaaagtttaatgtgtttgttcaactaagtaattgtaccatgtaaatagaggtaattaaattatgtcacactctcatactctcataactgtaagaattaggtgtaaatgtaattattatgtgtataattacaaatattgctataaatcattaactataattagaccatattaattaactatatattattaactattttatgacaaaaaaaaatatatatattttttaatgttagaaaaattatctcatatattatttttttaaaatttataaattggggttgcttcagtaattgttttaattgtttttatgtttagattgctatagattttgattgcaatttaagttgctctattaattgttatataagtttctatataaattttcataaaaataaaaaatttcctaaatgtaattactatttcaaaatcaaaatatatattttaaaatggagcctaattacaacattgtataatactactctacaaattatactgcgtaataattaggcattacaccccaaaattaaatttgattaaagaatctcatgtttaaaatgtgtacaaaaacaaacgtaataaatatcatttataacaatataattaaattatttattctgcttaataattaattttaagatggggttttatatttcttagggtaaatatataaccgtatttaatatagggtaaatactattttnnaccctgtgttttgcaaaaattacagattggaccctgtgttttgttaaatgacaa

SEQ ID NO: 121061 - DNA, 1106 bp, Cannabis sativa
  modified_base (1072)..(1081): a, c, t, g, unknown or other
aaaatattttttttgtctaacatttatattttatattttgctcacatactcggatcctagatccaaaatcatacccgaacctagacccggatgggttaatgtcatggtatggtgtggcctggtactctttgttgtcctagtctagtacgtttctcaacaatgtttgacttcgtacgtccactatcttgctagtatatgcacgtaggttatacccctaaagtcttcacgcttgtttgtactcgtcttggaccatcttctattctaaccattgagttgatgtggatatgtctcttataagatgtgagtgttgggtttactctttcaaggcttaaatgagttaaactccccctttcccacacctgaggtgttaagctcgcccctttctaaaacctaaggggttcaatcttgcactttttgaatgagttcatcttctctaggctgagggagggcttggccttatcctttctaggccaagtaggagctcaccttgtcttggccaatggaggacctaaacttgtcttctttagaataaaggaggacttaacctcacccttttagggccaaggagaagctcatcttgtttaggccaaaggaggacttaaactttatcttgtctaagctgaaggaagacttcgtctcacccttttaggacaaaggatgagcatccgttatctaagccaaaaaaatgacttgaactagggaagacttggcctcattttcaaggacaagggatagctcaacttgtcttctataggttgagggagcacttggcctcaccctttcgaggagatgggggagctcatcttgtctaggcaaaggaaggatttggcttcaagttgagctcttgaattgtcaatcttgtggttacgaatactcataaccacagcgtgtacctgaacattttaaattttattttttatgctgtaaattatttaaaaaaatttgaaaacgtgtatgatgcctactgtaattattgtgtaaaccatcatatagaacaaatagaagttaatttgtgtaataaccgctttagtaaattggattagtaaaagcaattagcactaatttttattannnnnnnnnnatttgtgaattaatttaattgtgga

SEQ ID NO: 121062 - DNA, 729 bp, Cannabis sativa
taaatttaataaatcaaatacataaatattcaaatttaatatgctaccctttgtttatgctatatgataatattgtatataaatttaattttaatattatttttaatatgttattccgtgtttataaatttaataaatcaaatacatatatgccattattttttaagtacaatccttaccaaagtaaaatacatattgtaactaaatatcatgaaaatgaattatacactgaaattaagattaagagattgtcttctcgaaattactcctacatactcgattactctattaaaataaattatatagcaaacacgagtatataatcatataattctattcacgatcatataaatcaatatttttaataaaaaataattatataattaatataaaacactaaaaatggaattgctattcctaaagaaagaccattaaagtgtttgatttgtttattgtcattggaaaactcattccataggaattgtaattcatgtaaactaaagaattacttttcctaaataaaatgacttgaaaagctattccataccaaccaaaaattatttttccttatctacccttctcataaataaatgattagagttataattatatgagtaacattttttattttaaaacaactacaacatccaatattacaataatatgtttattatatatatttttttgtacataattataggaaagtaatattattattattataattat

SEQ ID NO: 121063 - DNA, 650 bp, Cannabis sativa
ttcaaacaagcccatttatatgttttatttttgacaagaaagatcttatatacatgttagtttaaatatatccggttaaaagaaaaaatacatcaactggaagaatcgatcgaagtgatactgaacgaaacgacatagaaagtcttttttgtatgtatagcagtgataaatttagactccatatatatatgtgtggctaaaatcaataacattaataataatattggtacgtactcatctggtactcttgctcattgttagtatctgcttctatattattatgtcactattttgtcattatcacttttttaaataataataatgcatgggtaataataatagaaaaatatctatatatattttgatcaaatatctctctctctctctctctctttttcttttgcttaacttgatcaaatatctccatcttactcatttcaattacaattaatacatggaccaacagaccaaaataaattagataaatttttaattcttacaatatataaatattttatttttttttttttaaaaaaaaatccagaatcatagatttattggatggttattctgtgttgagaatcatggggttccatctaaaaaccaatgggcaataggggtgttcacaaagtatccgatccaatccaatc

SEQ ID NO: 121064 - DNA, 610 bp, Cannabis sativa
  modified_base (29)..(39): a, c, t, g, unknown or other
  modified_base (93)..(102): a, c, t, g, unknown or other
ttattttttgaggtcaaacaacatccaannnnnnnnnnngcggattttagatttttcaatccaatccaatccgcattttgcggattggattgnnnnnnnnnntgcggattggattggatcggataacttgtgaacactcctagtgtctatagcacaatagtacttaaaagtgttgccaaacaatcgattagtaatatttcttaacatcgatcattttttatggacggtgtattataagttaaatttgatccaaaatatatcataaatctatatttagccaaattttatatttgtactccaatacacaaagtacaaaataactataaaaataaatactaacattaatactcattgaaaaaatagaaaacatttaattttttttatattgttttatattgttttaatatcttataaaaataaaaaaaaaaaaaaaaaatcgttagtagtatcttatattattttatataaatataaatataatttttttcaataatttatggtttttaaagtataaatttataaaaatataaatttttctcaaaaaaaaatgagaaaattttgaaaaaagttaaaaatatgaaaaaaaaaaaagaaaagcatgagataccca

SEQ ID NO: 121065 - DNA, 1575 bp, Cannabis sativa
  modified_base (1419)..(1423): a, c, t, g, unknown or other
cctcacttgcgtgagtatactacttgattgcgtgcacttgcgtagtaattaataattttcgtgacagcagcaaacatctttgagatctgctcttccgcagacaaagggtcttggtaacatgccaactagttaggatccaggagcctctcatttttagccacctcagtaaggatgatagccagatctattgcaatggcttccttcacctccttaagaggctggcgttgccctcagacgttgatagtatcaacactttgaaattttgtgattaagccaaacctacggagaagctcatttctcactaagtccccaacctttagctgctcctcagatatagccgtgtactgagcttccttcttggctatctccacgctcttagcgctttaggaggatgttttggcaaatatcacatacattagcaggtttttacaaataataacaaaaaaacaatagaaagagcaagattcaagttaaatgatagtagtatttggaagatgaaagtctaggcaaagagaaggcaccatttttgtagggactggaggagaagaaccagtactcgggcaggtcggggtacggtctgtgtggctgacggggctagaataatttagatgcttttccagcctaaagaaccccaacttctttttattcctcctcatgggattagcattcatgctatagaagtaaagacctcttttggagagggtacttctagatttttcatcttgcagaacaaataccatctagctagaagtctatacgatgaagggattagctggaaaggggaaatcccaatttttgcaaccattggaaatatgggaccagctccatgcgctaaatccctccatactgatggaagtagactcttttgtggaggagagggaaagaagagtgaaaaatggattgactattgtaagtatttacgggatgactataaggggcacatttcacacaaagcagacgcttcggttcgccccaagagatgtccgatgattggatgtgagaagttaaaaggatacctcacttcccaacagatggctcccatcatttcatgcatcgtagaaaatgctcgaaggaaaaattgcgcatgtccaatcgctgccgttttgagttcccaaaagacacgcacccagcacgcgtgaaagagtctagaagtgagcatttaaaactctgacatgaaagcgggagaaatcatgcctcccacacaatgacgcttcagtttgatggctgctgacgtacagtattaaaaggcttgtcaaaaaatccacatgcgcaaaagatctcatagaagaagatactgcaagctctggactatggcatgtaacaccctaactattttaggcatgttagcgtgatttttaaacttactgtgcagctcgttgctaatcaatgaggttatcgaaaatcgtgattaattaaaannnnncttatttaattaaaaacataaagtgacatacatattaaattctgggatccagtttacaaataaaaaatatttacaaaagtttaactatacatatacaaaagtttgtcgcctagcgactatacaaaaaaagccctgatgtcccaaagatcgta

SEQ ID NO: 121066 - DNA, 1485 bp, Cannabis sativa
ttttttcgaaaaaaaaaaaaatctattttatagtataaaaataaaaaactcctaacatatattcttatagcataaatagattcaataattattatatttggacttcaagatatttaggtggtgtttgctttagtaatgtaatataatgagaatgataattgtaatatgaatagtaatgtaataaaataagaattgtaatatgaataatattatgatatttgatttaacttcgcaatgaatattgtaattaaatgaaataagttgtatattatcaaaaatactcataattttattatttttttttcaaaggagaaggattctcattaatcaacaaacaagttacaaacaaagccccacaaaaatcaaaggctcgggcagcagccaaaaaaaaaaaaatcaaattaacagcctacttttagcctttggctattggagtcaatcattctttgtctatagctatacaatctatacattacaattcttttaatctccttaactatatgactaatcgtgtaagagctattatcatgtgtacatttgtttctatttagccaaatatggtagacaaccgcagcaagcagcataaccaccactttgtccttgaacttgctacctattatggacagaaaagttctccagcttgtgaattgtgtcttccaagcctgaaagcctagccaactgaaaatctcatacacaacctgtttagaaaaccagcattcaaagaaaaaatactgatgagattcagcttccaacccgcacaccagacaattcggagccaaaatgttgatgtgaagaattgcaagctgatctctagttaggagttgggtgtgtaccgtttgtcaaaggataaatttgtgtttggggatgttatatctgttccaaacagctttgtagtacttatcttcctcacaagacatcatgctattataaagaaacgctgcattgaacttgttattccttccagcagccacaatctactattgtttgaagtctttccttaaatggcgaaacttcttccagcttgtatccaggccaagcttgtagttccagatgtcatctccttttaaatagacaacattaacctatttgacccatagaacttcatgcttcttcataatagcccatagaaacttagccaagatagccttgttccaaacttgtagttttattatttttaatatttaaaatttaaataaaattaataaaaaggcaaaatagatattttctaacaatgtaatcttacattggttttataacgtaataggaattacaatacataggatatgtttggtttatataggaatggccgggaattgtaatggtaatcaatatatccattactttatttgctttccttttttaaattttgtaatctattgtattgtatatggtaatcttcattacaatgaaaaatcattgtaatgttcattacaattacaattcattacaaaattaatataatgttattgttataaaataatataa

SEQ ID NO: 121067 - DNA, 4492 bp, Cannabis sativa
  modified_base (44)..(68): a, c, t, g, unknown or other
caacataaaatgttatttttttatctttattaataagtaaatcnnnnnnnnnnnnnnnnnnnnnnnnntagggcacaaagcccaacatctacttgtaatttatgtgtgtgagtggaaatggaaaaattgtcctttgatgtgtttatggttacatgtgtcctttaggggcaatttagtcatttgaccaaataagctattattcaacaaaattagattttttaacaaatattgaacaacattttctgggttttgaaactccttaacctccaccctctttgtcaccctctccatttgtgatttcaaattgatttttggaagaaaagtttggaatttcgggtgtgagtttatgcttgatcttgcttggagcttgaggaacttgtggtaaagatctttaatctcttttgcttatgttaattctgaaatttaaagctttataatcttgttcttgatgttcttatgtttgtggatgcacgttgatgagattaagggaattttagtgattattgtgtagtggtgctattaggtttgtgattgatgcattttgatagttttcgatgattgtggagtcaaatattgaagttaaatttctgggaatttgctttaaatttttgggtttaagcttgaagtttgagcatctaagtttgatgagttttgtactatattgatccttttataacatgctttctgatgtttgtgaataggtcattttgagcttttatggaactctattggtctccaatattatgttgatttagtattgattggagtatgagtttattatggttttcattgagttttggtatgagattggataaaaatcaagtgtatgaaaaatttgtttttgttttggggtttcagggcctgtcgctgcggccacagtagggctccctgcggtgaggcccctattttccctgggtttttcatttttctcatttttgccataacttttgactcgaaactccattttggatgttcttggtatcgttcaaaagctcatttcagctctatatgttgatatataaatgggattcaaattatgtatgtgtgtgaaaatgaatttgggattaaccttatttgtaaaatcttgcaaatgtatgactaggattaccagtgcttgcccagaacactcaggcgttgggaatctccacatacttggatcactaggtaagatagaaacctagcacatagagtttagcatagtggtgctcatgtatgttatgtgagaaaccgagattagggttattaccctaaatttagcggttatgtgatctagggttattactctagaatttaagtgtatgaatataataatctgttgtatacattgatataaagaattatgcacttaaggcataatttggttagactcagtaattagaactgagataaaccaatcttaaccttagtgtaaataaacttgtgagtgtaacatgtacgtctatgtcaaatagacagtaggtgcattggcatcaatatttatgtgtttttaataatattaatattattatttttattgccattctgggcctttgctcacgggtgctctattgtgcagtaaagggtaagttagttgttgatcagccatgagatcgaggacttttgtggtatattgtacatgttcagccaagctagaccacaagagttgggtttactaggggaaaattttgtaatctccacttttatcacttaggtcgacgtgtactaataacttgtaatattttgaaaaagttttatgggatcccaaatgtgaaagttattaattacaagttattatttttaatctgtatttttaaagtttaatttttgcgcttagctctagtagattctagtttagcgagataagtttatatttagtcacagtgtgtgacattcctattgttaggttgttacaatttagtatcagagcgccaaggtttttaaacttcttgtagagtggctaaacatgtacaatcatcgtcaaagacaagctcaaatcgtggtgcagtaagtattgagaataaatgcttaactgcttttgtaattaaatgtttaccgcttttcattattggcagcatatgagcatctagaaaataaaatgttatatgaaaagcatgatttgtaattaaattgataaatgattatttttaaaagaaaattagtatgtgtgagttagggttaaggcaataagtgtgtaagtgtggatttggtgcctgaattgctaaggtttttgatttcagggctatttgagagaaaatggattctaatatcaactataccacagggcaagcttgtagagcctggtaatgaccgaaccaatccaccaacaccgcttatgcctccgtagaatttgggggttaacaatgctaatccacctaccgactggcaccaaatgttcctcaaaatgcaaagcattatacttcattaggaagatcagtcgcatcgatataagcaaccgacccaggaagctcatgtggtacaagtgttccaccatctcttgttccagtggtgggtaaccctagatttgtactgccacattgagacttgattttctagcggtttttcaagctacaacctctgacattattgggaggtagtgacattattaaagtagaacattggatgagcattgtcacccgcattctggataacatggtaataataggaacagaataagtcaattgtgctgcattcatgtttcaagagcattcccgcatctggtgggatattgtgggacagactcgagatgtaagtaccatgtcttgggatgaattcaagagtctatttgaggaaaaattttataatatttccatccgaacttctcacatggaagattttttaaaattgattcaagggaagacgacagtggccgagtatacactagaatttgatcgtttatccaagttcgttagcgatctagtaccaatggtcttcactcaaaaacataaatatgtaaggggattgaatggcattatcagtcgggacttgaaaattaccaccaatcacgatacattatacaagaaagtggttgagttagcattcattgctgaataggctaaatagcatatgactaaagatcaggctactaaggatgtcgtcatggcattgaaccctagtgttcgtggtagtgtaagaaagtggaccgacagtgacaacccagacaataagcgaaaggctaaagcttccggaacaccgaggaataatagaaacttttgtggtaatagaggtggtcgtcaaggtcgcaagtcttcatttaaaacttacctggagtgtcccaaaatgtaaaaagcaccatcagggtgagtgtcgagccaaaacatgtttccagtgcggtatattgggactttttatcagagactgtccacaatctaagaaagaagaaccaaagaagaacaataatcaaaatccagggcatttgttcactatgactcaggctgacgttgatgctagtccatcagtggtgacatattagttgtctataagcggttgttcttattcagtgttatttgattcgggagctactcattcttatgtatcaagtagagtaatagagagttttcataatccgtttgatgtgtatgctttggggtttgggaccgtgttaccctttggggacttaatcgtatctactcggtggattaggtctttgtgtttttggattgacagttatgaattaactgccaacctaactaagttataattatctaatttttatctaatcctgggaatggatttcttgtctaagtacggggcaatgactgattgtaagcagaagatggtagtgttcgaaccttatagtgcaaacccagcggtgtttgtgggtaaggtacaaggatcgcgaatacccagaattacaatcctaaaaggtagagacctaataataaaggtttcataggactcctagttacaacagtggatactagccagcctattttatctatacctaaaaatacgagattggtgtgtgactttctagatgtatttccacaagatatacctgaattaccaccttctcgagagattgaattcgttataaaattagttctagaagcaaaaccagtatcaaaagctccttaacgaatagctgaagcagagttaagggaattaaaggttcaacatcaagaattactaaacttgggatttaccagaccgagtttttctccttgagatgcttcaatgttacttcttaaaaagaaagatgggtcgctttgcatgtgtatcaatcacctggaactaaataaactcactatcaagagcaaatatcctctaccccaaattgatgatctgtttgactagttgaagggtaagatgttcttttcttagcaatgtatcaggtgtatgtaggtgcgtcaatgattgaatggaactgtgaaggatttcgccattgccaggtcatggcacagatcaaaaccattgttgggtaccatcttggcaacgtatcgggcataggtacgggcgtcagtgacatatgataagtaccgagcgtaggtacgggctcgtttgattagacgatgcg

SEQ ID NO: 121068 - DNA, 702 bp, Cannabis sativa
tttttatatataaaaaaaataaagaaaattctgacctaacgaaagcgaaaataatatctccccgtttccactttttgctataaatttccaaaaaggcccacgcgcttttcttctctcttgctctacgcttctcacccttcggaagcgtagttttctctcagaagggttgtacggtctcagatcccatttcttagagcttctctttctctccttcgacatttttctcaatttcactcaggtaaccttttcattctctcaatttctacatctacttggatcttatttgttattctttcggcaaattccttgctagtttccattgtctctgtccctaagttattatctagggtttttttttgctcgttgatcaggaaaagttggactcttcgttgcatgttttggtgttatatatgtatatattttggcagactgctctgtattttgggttgctttagttttggctcactttgttttcatttttcgcatctatctttgaagttgtttccttttttatttattatatttttttattgctatgtaaaagacttattgattttcatggtcggattatgcaactttaccatttaccacttttgttttttcgcttgttaggtaattaggtttcattgtccggttttgcttgtctttagggtttttgttttgttttttttttttttgtatagccaatagccatggtttttt

SEQ ID NO: 121069 - DNA, 1955 bp, Cannabis sativa
atttagtacatgtcaaagttttagaggcaaaaatcctaattatccttaaattaataaaaaaactctgtatagattaatgtttccattctagtgctaaataagtaacttcaatataaatcctcttaatttaaataaaaagcattattagaggtccacccctcatcgaatcccaaggcggctagagcccagcgcacatcgtctccgttcaccgtcttccgcctattccaattgtgattaaatgatctaaagtataaattgtaagtcatggtgtcttgtcttttgacatgcaaagttcgtattggttttgagtgctctatttttttcttcgtttggttctttggcagtggtaccatggcactagacatggctaaagctttagccattaaaaaggcgttaagttagatcaaggataatgttgaactcgagtccgattgtctctcaattgtccaagctattcgaagtaacatcaccatagtttcacctcttgggggagtggtgataaactgtcgaaagtttttatctattttaaacaatgtttctttattttttattaaacgatctgctaatatgactgcacacaactttgctagagcgtcatattctttttcagatcgagttttcagtagaagggatgttcttactaaattacagtcttgtcttttggctgatttagcaaattaataaaattccaatttacattcaaaaaataataataaaaaataaaaaaaatgtgtataggatagagaacataacaaacaaagaaaaaaaaacaaattaaatagagtcttctaatacagaaaataaataatgtacaaaaatagtaagtcgatttaagccaaaaatgaggtgatgacacaaaccaccacccacaacatttaatagatcagtactagctaacatctatcattataggacccatgcatagaggaatcaacacacaccttagaaatccaatcaatagtctaccaggcaattttaattagaaacccagctgattaacttaaagcaaactgaagaccaagtttgaataatagccaataattcagtaacattattcgaaaacatgatccttaacccaagtgcccatgcagcccatacaacacaaataatatataccttcacaatctttaatactaatagcaacgcccatctacgtaggtaactatattttgttaaaaatgtaaatatggtgggtcggcctcaactcgcgaaagaccttcctgatggaatgggagggcactacaaacaaaaatataagtagaaaaaataaaaaaaatttactttttgtcacaacaaaatttgtgattaaaagtaaaaaagtattagagagtcccacattgctaatatatagaaagataatacaatatataagaggaatgtactactccttttattgtcaattggttttgagatagaagctcattcatcttattcataaattctaacatggtatcacatgactatattttaaaaaaaaggaaccaccaaaaatccaaaaaaatgatctaagagccaaaagtcaaaaaatgtcactaattcgagaatgatcgagttgtccggtgaacatataaaataaccaccatcttaaagggatggactactcctcccaaagccaattagtttagagatggaacacattcatcttatcccccaattctaacaaaaagttatgactaattatatatcattatttttatgttgtgactaaaatattcatagttaaatgtatcaataataaaaatcacaattaatatgattaaacgttgttttagtcacaataaatactaaaaattacttactcaccgaattttggtcattacaatatccatatatataagtacaactacaacatatatttaaggtacgtatatcataccaaaactcttttacgatattcagcaagagcccacagtggaaatatatttctatatgcagcataatgtagcatacaattc

SEQ ID NO: 121070 - DNA, 781 bp, Cannabis sativa
caagttgacatcaacaatgcatttctaaatggtcaacttcaagaagatgtttacatggctcaaccacaagggtttgtggacaaagaattccccaatcatgtttgcaaacttcacaaagccatatatggcctcaagcaagctcctcgagcatggtttgacaccttgaaaacaactttggttcaatggggatacaagtgcagtaaatcggataacagcctcttttactccaatactaatggcaagctacttctcattctaatatacgttgatgacattttaattactggtgttgacaaggctgctgtccacaatctcatctcccaactacatcaaagtttctctctcaaagcactcggttctgtcacctatttcctgggattcgaagttcatcgcactgcctctgctatttacttaacacaacaaaagtatacacgggacttgttggcaaggactcaacttctagactctaaagcacagcccacacctatgtgttccaactccaaactgtcagccaaatcaggcactccattggataatccaacacactatcgcagcataataggtgctcttcaatatctcacaatgtcaagacctgacatctctttctgtgtaaataaacttagccaatatatgcaagctcccactactgaacactggggagcctgcaaaagagtcctcagatacttggctggctcaatcaactctggtttagtcttcaaaccagccaaccggttagacatcactgcctattctgatgctgattgggcagggtgctttgatg

SEQ ID NO: 121071 - DNA, 1664 bp, Cannabis sativa
tataaatccaatactatcaaagaggctgctggttggagagctggctaattcttctggttcatgttggaatctccaagctcttgtttcaaccttcaagcccgaaacggtgaacaaagtagcagctattgatagaaactccctccctgacaatgatgtggggatctggaggtcgaatccgaaaggaaatttttctttaaagtcggcttattgggatcttaacaaggtgaggttctcccagaaggaggacatatgctgcaaaatctggaagagcaacatccatgagcggctcaaactttttctctggagattgtatcaagatgcccttccttttggaggtaaactttaatctatttttgggagtcctctgggattgtgtgtgctttgtacgcaggatcaaggagatgaagtgtgccattttatggctaattgcccgataacaaaggcactttggttttcctccccctggaatatccgatcagactctctttcttttgctaatggaagggaggctgtttcgtggttgtttaatcctcagatgcatagtccttttaggattttcaatgttgaggagctagctctttatggtacgatcctgtatcataaactgtggaatttgagaaatgaattatatcacaatgggacgcaggtgatggtggagacagttagacaacaaatcaaaaagacttttgaggagcataaagctgtgttgggagaatctggaggtattgattcagagcctcggacaatctcgggtctgcgatgggggcttcctcggtctggtcgtataaaagggtatgtggactttacaatgaacaatggggtggtgcagttgctgtggttttctttgatggttcgggtgcagttaaggcgactggagctaaaaaggtggaggcgagttctattattcggggagaattggaggctcttcagtttggtgttttgatagctcaagacctttttgctaatgatgtggagttcttttcggacaaccaagtgttggtaaggtctctgatttcagggacttctccttcttgggaccttttctttgttttcaataagttagttgatagtttgttgtgtggtactgtagcggttagttggatttcgcgtgtgtgtaatgtgggagcccatgccttggctagatggggtctgaaccataattgtaacggtttaattcagttctgggaagtgagtccccatgtgctcactaagtttttcgttttagcttaatgaagatgatgttttcagcaaaaaaaaaaaaaaaaaaaacttatttagatttgcaagataaacatatacaggggcggagcagaagttaggaggccaaactattttataaatttagttgacaaatatttcaagaacattattaatttcataattaaaatttcgttcataaaaaactttataattaaaattaaaatgcaaatatttttttacgaaaattatggataaatgaatacttttttttagagtaatttacggttaaatcctctcaattatgattttacttgcacttaaccttctaatcttaaattttgatggtaaaacaaaaccctccaaacggctaaaccattcacaaatttaaggtgtcatccattatcttagttaactgctgacatggactgcctaagtgtaccattatgtacatgtggcacatttat

SEQ ID NO: 121072 - DNA, 791 bp, Cannabis sativa
gtgtttatttcattgtttaagaaattcatattaggatgttaataaaacatacttgttagtaaatctagatcctggtaaaaattttccaataacagcattgtcagcaaccttttgagccacattgccatcaatttctgacactgtgaacttgataaaccagcaaccaattctttttctccattagaactctcagacttttgctcatctcctcctgcgaaatttgctgaagctgatttcattggagggcctttagaattcctattaggaaactttccatgtaatttgtggcctggtggataaccaatgattcaaaaacatctttctatggtatgaccagacatacaacaattagtacaagaaaacttaggtcgaaatggctgaaaatttccagcaaattgaccctcagtattcagattgcttttctctgcctcagtactggaactaacaccattagttaagcctctttgcctttcttcttgaacaacaatggcataggctttattaacactcggcaaaggatctcgcataagaatttgtgacctagccaagctgtaagagtcattcagaccaacaagaaactctaacaacctgtcttcatcttgatattcctgaataatcctcatagcaccacaactacaaacaggttgtgatctatattcccttgtctgatcccacagtgacttgagccgagtgaaataagttgtcactgtgcttgaaccctgagttaaactttgcatcgttttctttgcctcgaaaatccttggagcattcttctcattgaatctttcatg

SEQ ID NO: 121073 - DNA, 1204 bp, Cannabis sativa
taatagaacatataatgtttctacaaattactttaaaaaaatgtattgatgcactttttacttgttttgacattcagaaaaatttattaatttaattttttttataatatacattatagtaattgaagatattctataaaattttgaaaattttgaaaaattcgaaattttgaaaaattcgaaattttgaaaaattcgaaataatttacaatatagaaaataatattaataatacctaatatgtacttaataaatattacaaactgtattatatttaaactgagaaactaaattttaataaaaaaaagtatcacatcactatagattaaattattataataagatttattttactttggtttttcacatttatcacatgcattaatttgaagtcacactttgtataatataatctctctctttcatgtgatcaatctgaacaaattaaaatgtcatttgtactatttagaatccaaagagtgcatcattgagatattgagactctttagaaacctaactagtgtaatagtgagtatgaaagagaggatatgttttatgatctgaaataatttgaagggtttaatttttaattttttctcccaaaattaaacatatatatcaactcatcactcatcagtcatgctaatcaattaattagaatcaagttaatattattctcacttttgtaatctcaaatatgtagactatttttcttgaaagcaaatttatttcagataatattgtgattttgtttaagatcatacattatttaaaaaagataaaatatagacgcaatggttttatggctttaaaattagacatgactaaagcatatgataagatggagtgggaatatcttcgagttgtgttgttgcatatgggttttgatagtagatggattaacttaattatgacttgtgttgaatcgatctcttataagtttatccatgttggtcgtgaaatgggtctagtggtactgtctcatggtattcgataaggggatcctatatcaccatatttatttattttatgtggtgaacgtttttctcctttgttgaagaagtataaggccagcgaatggaaagatttatgggtgtgaggttgctacggggctcccatccaaaaaactttaagattggatagttttttgcaagcaaattgatagttgggggagttttactgtaaattactcttaaatttttta

SEQ ID NO: 121074 - DNA, 1582 bp, Cannabis sativa
tttttatagtgtaaaatgtattggttttaaaagaaaaatttaagttttttaagtatagaaaatcaaatttcccatatagaactacaaaacaaggagctaaacaataggtaagttagaaaattttgaatgaggatgggaaaaaagtcaactggggcacttttagtttggttggccagtttgcctaatgtaggatttagggatttagactaggggtactccttagatttgtacacaatagataatgtggattttttcgcatatgaaattactgctctgtaagtagttatgttacttatttttatatagtctgctgatgtattttttttctaacttttttggtaaggtgtctgctaatgtatttttgccatcaatgcaatcgcacagtgagcctagacccctttaagaaatacaggctggcacaagtaaagtacagcacgaatctgagcacgacaggaaaatatcgggtctacgagccatcaagccaggcctaccctctaaatatattggtacgatacggtacgactcatatacttttctagtacaatccattttttaaaaaataaaaataaatacatgccaaattagcaagacacgtacaaatttacaacactactaaatacaagtgttattagtagaggttgaaaagtaaaatctaacctaatctaaactcacttgttagtagatgaatcaaaattaaaattgagtaatgattacaaggtacgttttttcttgatttgttaattgcaaatttgcatatatttttttatgtgattagagttttgttcatttaatcaagtgtgctatataatataagattattttgtttgaccctcaaatttttttgacaagaaaattttgtttgacccgtaatttaagttagtaaataattatttggtactcaatattttatcaaaattacagattggtacaccctaattaatttgacatcctacatgattggttttctaaatctaaactcaaatgtatatacaatcaataaaattttatttgatcataccgattaatttgagcctaagatttaaatatttgggtgcaaaataaatgattatttttttgatatattgtggtaaatgattaccctcaaaactgattattacagcagtaataatgtctaagaaacacaattcaaaactaaatacaatcacaaaatcaaaagtaaaacttaattgaattgaacaagaataaacttagctagaaaatgaatgaatcatggatttttattgtttgaatagtcagtagtacacaacgtcccataattggttttccactaaaatcaatctaactcatcatggtctgttaaccgatggatcatgttctttttaattctttttattttttttttcttagatacataaaagtgttttcttaatcccttttatttggtctttttttaatcccttttatttcacttctaacattttcaagatttcagttccaaatcaaaaataaatgaaaactaccaatgtaaagcttacagaacttgatatagaattagcagctaaagttttgaatcttgctccaacaaagaagatttcttcatgtcaatgggacgcctttttgc

SEQ ID NO: 121075 - DNA, 2221 bp, Cannabis sativa
gaacatatatttatatctagctatccatatagcataaaagtgtgtcatgacgctaactctaagtgtaagattcactttcttatttgaattccaaagtatgtggaagattttagttcacagatgatttcgagcaggtgtcggtaatcttagtcacaatctcaaatttaaacataatagagtaaatcctcaattccataaaatatttatatacaattaagactcgcatactagaccacataatagatctcttcacaagctttttaacgaaataaagaacatctaaaacggagttcagaatcaaaacttatggtcaaaacaagttataaattttttggttctactgaaccgagagggtcgcgaccgtacaacaaaggttgcggatcttggcccttacagagagaaaaattgctcaaaaatcacaggtcgtgaccttcaagaacagggtagcggcacttagttcagatctaataaaaactagatttttcactctgaaaatgcaccaaaacacactcaaaactcacataatgtatgcaattggtttctatggcagaacggaatgtatgcaatctcaaaacatcataaaataacacatgcttaatatacacccaatcaaactcaataatcacatgattctcataatcaaagctctaagaaatctaattcaaatccattaccgaaattcaacattttgacaaaaatcactcaacgccaaattgacctaactctcagaatttaagtctaactcaaccaactataataacactttgatttcatccataaaattaacaccataattttatttcaagaatatcaaacaagaacatcatacaagcttcactaatcaaagatgagatttcaaaattaaaagtaataaaaagtaaaattaactacctcaattgctttctccaaactaactcaacaattacacaccaaaatccacttcgatagcttcaaatcttcctcaaaaatcaaagtaaaattctcaaagacaaaaagagagtagagtggaggagtcgatggaagctaaacacaacaagaatagacatgttaaaaagatccatttagttagagcgggttggtgctccaatccgacggatcacctctaatccgaaacattcggatacttattggatcttggatcagctccgctccgccccgcctaatttttttctggatcggatctgatccgatccgatttcaatttattttttaaaaaaaaaacttcattcaagactcggatcccttgggacctggacccagacccggacctacccgagactaggaccgggacctgggacccagactcgagacccagaaccaggaccgggaccaggaccgggacccgggaccgagacccgaaccctgactcaggacccgaaccaggacccgggaaccgaacctggacctagacccggacccaagacccgggacccaggcctgctccggaacccaatcccggacctagacccaagacccgaacccagacctggaccaggaccaaacccgggacccaacaccaagaccgaacccaagacccaagaccaggaccgagaccgggacccgagatccggacccgggacctaggaccgagaccgggatcctgaccctaactcgagacccagacccgaacccgggacccaaacctggacccgaactcgggacctagacccgggacccaaaacccggactgggacctaggacccgagacccgggactcgggacccaacccgaaatcggaccctgacccgagacccgaacccggaccctaacctgggacccgaacacggaccctgacctgggacccaaacccggacccggacccaaacccgaactcgaatttttacacaatctattaatacatgtcaatgccaaacatagtattgtatttaataatactaatacaaaattaaaatggatataaaattataagttaatattaaaattctttaaagaaaaaagagtcgggtcggatctgatccgatccgagtatctaatctagcgggacgggacagggcggggcaaatccttacatgatctgaatcaggtcagatcatagctggatcagatccgacccgacctatttacactcctaaacaagaaagaaagtgttattgtatgatacattatgaaagtttattataattggctatttttataatttgtattagctaatttattatatttggttgttttgttaattttttttaaaaaagagacattt

SEQ ID NO: 121076 - DNA, 874 bp, Cannabis sativa
aattgaaattgaaagccctaacatttctttttttattatgaattatttggcatttggcttgaccccataaagaaaatgttattaattgacaacagtcaatagttttagttctaggaatggatatattgacaaactggtttgattcttggctaaataacaaattattgcaatcaccataacattccaaaccagatatcaaataggagtcctctgcactaaattgaatataacgggcaacaaccttttcctaaaaaaaattcagattgggttgattaacctccttcaataaaacgatgtgagcagtttggggatggaatttgtactctgaaatgttcaaaatttgaccgaactgtatatttcggaacatctttaataaattaccagaaatagtattctttatgttaaaaataacagaataagtgtatgtagtaacacagtttgatatgtaataatcttaaggactaaatttgtaaacgttctatggtaattcttatgtttagtccttgatattatagatatgcatgaattccacagagaacataagcagaaaatatgtgaagaatctaaagaggaatatgatcaagaataaacaataatgtctataaatacttttaaaattgtcaaaaaaaactacaaaataataataaaaatacagtcacacataacaaatgtataaaacaaaaagacaaagccataaagatatatggaaacaaacctaatataaacaacaaaatatataagaacactaaaatctgaaaaaacaaaaaaaagaacataataaccaaaacataaaccaatttaaaggaacagaataatatacacaaaccaataaaaattaaaataactaaaaaatataaaccctaaaaagaaatca

SEQ ID NO: 121077 - DNA, 1993 bp, Cannabis sativa
gggaagtcattcgtgggctagtttgcatacgcgcatgggacggatgcaccatgttggaaagagacagaggtctaacgtatgatactagtttagttgcttgtctcgagggcctgccaacatgcgtggaggcatggtgccttgaggattggaccatggatgtatgggagtccttggacgatgaggaagattgttcggatagtattgaatggggcatgataagaagcgttgacacgtcagcttaatgttggcatcttgccacacatgctaccttggtcacgacttactaggtgagcgacagtattgagatttatcttatcatagtgtgaacctatagacagtgcgagtatcttggctagagagccttgatgctttgatgcactcatggatgcttgcgagcataactcagcgggagttgttcgagagacgaaagtgtgcacgaggtacacggtcgcgcaaaaaatgagcccattgttactcagatagttggaaggttgactttggcttagaaaaatcaaggtgtcgcacgagtattccgctgcctggaaaagtgagcctgtaacactaagcatgtgcccttaagatatactacttattaataatatttctcgaaatattatttttacattaacataatcattctatcacactttatcattggtagacttagaccatcactaatacaagatgtaaaatttgacacaaaaattgagtttgtattatatttagtttactatttacaattgtactctaatgtaaaaatattaaaatatataattattattgtgggtaaaatttggcataatgttatattttgtgttaaatttaatacaatttttaacatatgtcaaatttaatatattttttagagcaccactaaagtaatatttttttatgtatactaaaatataataatacaccacttttttaatactccattaaagatactcgtagcactctattttataataaaaaaataataacaattaacaataaaattatgagaaatgttaaatggcaccagtagtgattaacattctcttatatgtcaatatcactattaatttaagtatcgagtctcatataatttaatataataacttttaagaatattattagccaatcgcaaaatgatatatcaagaagtgttagacaccactattggaatgctctaaaattataatttaactccatcacaaaagcattcaaggtgttttctttttagaataaattgcatatatttaaaaagaaaaatggattatgggaacttgaacccttgagataaatataaattaacacaaccaccccaccaaatatttcatttttatcgaataattgcttaaagttaaaacatgtacaataattaactaaaatacctattttttttttttttaaaaaaaagtaataattcaacgggccagccgccccctcttgtttcatatgggtttaaattagtaaggttactataaatatagcataaaagataaatgtcattaaatataatattatttaactatttttaaaaaaatttaaaattcataaaaataaaaatttaattgaatcaccataaaaaatattaaaatttcattcatatttattttttttaaaaaataaaacaaatgaaactaatcgtcagagttgtcactcgtgccgaaaaagtcactggagtttgttgttggaactggaaaaatcgttggagtagctgtcggtgccggaaaagtcgctgaagttgccgtcggcactgaaaaaacttcaaaatttgtattgtcgccggtaaaatcacatgaaaaatcaccaagataataccatttccgacgactattccaaagattgttgtgggtgccggaaaagtcactggagtagctgtcgacgtcgaaaaagtcgctggaattactgccgacgtcgaaaaagttgtcagaattggcattgtcgccagcaaaattaccggaaaaattaccaagaaagtggtttcttcatcaagaaatcgattttttca

SEQ ID NO: 121078 - DNA, 982 bp, Cannabis sativa
ttaatttattccaattctgaatactgtatagtaaacgtgccattagagttgttaagtgttggagtaatttttagtagtaagtggccaaaaatgatgtggatgagagacaaaaaaatattatattttggaatgatgtggaattttgtgacaacttttagaattgtttgcattggagatgctctaactaaatgcaattttcttgaagtttgaaaaacctaagacttaggctatctccaattataattgtacaacttagtattacaccaatatcaaatatgcaataaaattactttttttattctaaccatactatcacaaaaaaaatattttttggcatgaccttttaatatgttatataacacatgatgcatatatatatacaggttaatacgtgcaatgcacgtataattaatttttttaattaaatttaattaagtaatgttaagtgcaatatatgtatttaatttttttatttaagtaatatatatatatttttttaatttttgaaataggcttgagatttcaatatttaaagattttttttaactattgtggttaattgatgtgctctttaaatgtaattatttatacatattttatatgtacaataaaatctaaataagatatcgtaatgaattgttgtgtacccaataaacaaaatcttatacaaaatgtcattaaaatacaaaacgcaagctatttttgatattatttaatatttatggaataataaataataaaagaaacttagcataataattgatgtgtttattttgatgtaattgaaaattattgtaaaattattaattattagaggaaaaatatcttaacatctattcaaattaggtaattccaacaaaatagccccatgagtagcaaatatttaaaatatcaataatatttattacaaattaaaattaaaattttttatataaaatatctacataatttttatggggagttaccccatatactatttttt

SEQ ID NO: 121079 - DNA, 1355 bp, Cannabis sativa
ccagtcacataactataatatagctcctcaaagaagtaacaggctgaatttccaatatgttcaatgcactaaaactcagcaaactcattcaaattaaacaatgccatattctttattaaagcctatgactttgatctgatcagacatttttctgaatcacgaactaatgtaagcacaaactcatccatattaaacaatactaaattttagaaaaaaggatagatttttacttagtttctgaaagtatatatgtatatatgtagagtgagcagtattaggataacattacatgtttgcaagggaccccaagtttcttgagtttaagagtacgagtaacaagaagcttctggaagtcaccaatctcggattcaagcttacccacatgggtttcaacccctttaccaatcccattcaaaaattctggtattccaactttcactgcagccaaacaattactacttcagttttttttttcccttaattattagcaatttgttcacataatttcgaaacaggaaaaaaaaattcatatactagggaagcaaaaaacggaagtaagaagatggggaaatggttatgaaatcctgagacttaccctcataaggaaaggattttgagaagaatctagcaaaagctggggttgtgtaaggtgtagacattgtggttttggcgaagagtaattgcttccacgccatcttcaaagattgtctctcccgctaatgctctttggattatagtattgacactacacaacaacctcgcaacctcgccgccgtttatggttaccgtcgtcgttgggaactggaatttgggggggggggttggggttgatgtgtttaggatttattgcgatgatttggagacgggtaaaaaagtgggtttcaccgggtcgagacacgaaataatataacattttagacctgtattttgcaaaaattatttattggatcatctgttttattaaatgacaaaataactcttgtatttttcaaaattataaaaataagactctgagcttaatttttgacaactttttttttgaataatttgtggcataacctccttagtagtcaggtttttgcaactaaccctcaattctaaaatatttatttttaaatatttatatttaattttttttattttttttaaatatttatttttttggaccaatagttaactgtcaaaaataaatggaaatggctaagtgctaacagaacttgggtttaagaggttttaccaccaaaattttagaactgggagttagttgcaaaaatctggccacctaaagaggttatgccgtaaattactttttttttttttaatataaccaacttgaaaacaattcctaacacgaa

SEQ ID NO: 121080 - DNA, 1635 bp, Cannabis sativa
cactagcttgattaattacacaattaaatgacacaatatgctattgttttaaaaagtaagaaatactaaaggacactagtggtgtttaacattctcctaagtgtcaatattgttattggttcaattaattatcggatcttatatagtttaatttaataacttttaagggtatcacaagcccatcgcaagatgacacgtttaaaaaatgtgaagcacactactggtgcctaatagcaatgcttctcaatttaattctacaatataaacatattaattaaccttatagccatatttggctaattaatataaataattattttacgtacctggtggttcgatcggtagctgaagcaaaatcaaagcgtccataaagatttaacgatgttccgatttcacttacatatgtttcgttgtttaaaggccttaattccaaggctgaaatgaatggaaccccaaaacctgtattgactaggcaaacatgaatgtaatccgacaacgcaacatgtacgatttcttcattttgaacactccacgtatattttagcaatatagtgctccaaaagtcaactccaatatacaaatcgaattttgggattgtattttcgttatcataatttccatacatgaaccttgctcggatcaagtaacgttgacctttgccatgaacaggtttaagggtataacagtttctttttccttgagggaagcttctcagattccagaactgtttttcatcggtttgtaatttgttagttggtgttatttcgtggttttcgccagcttctgtgaagtttgtgtcagaaatgtaagctagacctgttgtttcatctgtatagcttgagttctctgatattccacagtcaatgctaatgaaccctgaaataaaagtgagccataattaagctgcatattagttataattatttaacaaaagtcagaagattatatggttgtttatgaaacccgattgagcctgagccctagcctctacgagaagtacagtgatcagaacaaaagcaccttgaagtgcagcaaggaggagattcttagacaacatcatgaccaatcaatgatccttttcaaaacttcctcttatagatgtttatccgtattctttaaaaattattttaagttattttaagattaaaaagttaattctcttatatttacatccttcctccccgaccgtgatgccttaattacataaaattaataagtactaaatactaagaaatctatttgactatgtctcaactatgtctcaaagaaatctcaaagaaaaaaaaaaaacaaaaaaaaaatctatttgacttttatgtaatttttatttattaattagctgcatattccttccacttatatagatattattaatatccgtcctggctttctttctatatttgtatagtcaaacgaaatgttgtgcaactcataattattaatagtcgaaataattaatgcgtgcaactcatgatgattctagcgagtcgaaattaatggcctatttgatcattttgtatatattatcatgctaaacaaccaatcattatcgtcatgtattttcattttttttttgtagtgaaaagaaaatatatattaatttaactaataggatatattttgccaacaaaatat

SEQ ID NO: 121081 - DNA, 1026 bp, Cannabis sativa
tttttgttgtatatatgtgcttatagttataaagataagattatatatattaacataactatcacagacacagagttggtagcctaaaaaatattagaaggtgagattgactcaaatcaaattattcctttttataaatattaaaatatctatctatctatataaaaataaataaaaattcaaattatgactagttacataagttaatcataaacaaaataaataaacgattaacaaaaatcatttataaaataatttaaatatatttttaaaaattaatcttaatatattttttttttaaaaaaatattttcatattattttgtattaaattcaataattattttacttttatttttatattttttaaaagttacttgtagttattattattattattttttttaaaaaaaaaaacaaaatttcacattattttttctgttttagtgtctaaaatatattttatttttattttatatgtatattttttaagaatataagataaaatataaaaattaagaaaaactaacataaattaaagctataatttttatataaaataaaaaaaaaaaattaaataagacatttctataaatttttaagatgcaaataaaactatcggtaccaaaattttgttttgaaagtatatttaatgaatgtactaaaaaaatcactctcatggtaatggtaagtctattgtcttaaaagagtgtttggataggctctctatttttttcatgagagctttttaagtctaattttttttaatgatgtgtacactataattagttaagattacttgtaaaatttcagaaaattttaaattgtttacaatgttaaaaataagttcacaatattttgtattacacgtgattatttttttaaaaaaattattttacaaatacattaaaataacaaaaaaattacgaaaatacagttgtacggaattttaaacatttctcatgtcatttcgtgtggggtaagttgaaaaatgcctcttttgttattcaattaaccaaatttgcct

SEQ ID NO: 121082 - DNA, 1341 bp, Cannabis sativa
agaatattttgacaattaatacaggaatttaaatcaagaaattaaatatttgataaatcgtaatctgaccatatatagaatacaatctaattaattgtgtcaagattttgtgaatataaaatattcattgtttctcatacaagttaaaatcaataaattaattgtatacctaaattaaagcctttttcgtgatggatttgcaaagaaataatagtagtaaaaggaaaagaaataacacaaagcttttttacgtggttttgcagttaaaattttacatagtccacgagtctatcttattagatttctgatatagaactaaggctcattttgtaaaggatttttcgtccctttttcagtgtatcttgcccctatttatagttacataggagagaagttaattacattcagattgatttcccacaacaataatcccttgaaattgtgggatttgattatgttccacataaattaaatgcggttattaatcgaaaatcacacagctgtgatttatccgcttttactggatcaatgttgacgtggatttaaacacgctccaaagtgtatctcgcaaagttaccttgctgggattgcaataatagccccgacagcgagctgaagcttttccatgtctttccgaggttgataatataaataccgtcgtttcagctattgaagacataaccgtcgtttcagcaatcaacatcatttgaatgtcagctcctatctgagagagctgactcgacagagcaatggatcccattgaaagatgtctgaagctaattagtgaaggtaccgtgagtatgccttcctatagcgagatggatgccttgttattcgttgttcagattcatccaactgttatacttagtttgtataatgtatattatacgctaagtgttttaacagtcatcatgtctcgtctatgtctcttcatgcgtagcgaggttgatgcctcactttgcattactaattctatccttatgatcgtgtcttcatgtacgaaatagttttttgtcaatatgtgaattaatagtttgtatatccgtgtctcgctcaagattttacagtcaatgagttataggtatattctataagttctgtatttaatgagttattccattttaatattctttcatataattatcattatatttgttgattcgtattcttctaagttgacacgtgttctcttctgaagtgcagctaaattttgggtgtaatattttttattatcaataattgaattaaaatctagtttttgttataaatattaataattatgtggatgtctaaatcttttatttattgctattaattgtaatcaatattcctctttttctt

SEQ ID NO: 121083 - DNA, 1169 bp, Cannabis sativa
  modified_base (1129)..(1143): a, c, t, g, unknown or other
tggctatccattcttgtttcctttccactttctttctacaatcagctacaacatgccccattcccgaacagttactacacaccaatggcttccactcatatgtaattgctactgaagtggtataaccattctcatcctcaaattcaaccatactcgggtattcttgctgtaaagaaacttcaataaggaccctagcaaaactcaacttatctctcatttttgtggcatcatctaccattataggtctccctatttgcccaataatcttgaataaggacttctccccccaatacttcaattcaagatcatccaaatgtacccaaattgccaccattcagatatcttctttcttgaaattcaccattggatcccaagctttcatctctaccgatctcttattgaagaagatatatcctcccttaagaacttcatccctatcttcaattgactgaaatcgaatcagaaatatcccatatgaaaccatgcctactctttccaccttctctttccacattcttctagcaaaaccttccaaaacttgcaaaggagggtttgccccaagcacataacaaacaatggaaggcatccaaaactcaacttcctcatgaatatcctccttagtgatcttaactctattgacattctcattcattgcaaacaatttctccaagtttttttggacaatactagatcgcagagtagagggattagggttacctttcatctgcgaaggggtatgtcgagagttctgtgcttccagtaaagccccaaaatctttcctgatatcctcctgctgcctaatcaatcgaagtgaagtcgttggcgaaaaaggctctcgatagagatcctgagggattcctgtttcattcgactctgaaatcaacccgtcatcatcatcagagaaaacgattggttccacaccaagaatagcatccagtgatttagttttcctcacatccgagactgaagtctgacctttcttcttcttcttagtcgccgtgaattgcttcccctgaaccttagatctagttttagccatggctgcagctcgtgagctgaacagagcaaaagagagggaaaacttaacatattaggatttatatcttttgatctaagatcaactagtgannnnnnnnnnnnnnnatacaacggtaagtattataatatct

SEQ ID NO: 121084 - DNA, 1452 bp, Cannabis sativa
aaaacactttttattttatctcaatgttcacaatatatacacacacaaccattttaaagacaactagtttttgaacgtgtgttgcacgtataataaattatttaaaaaatatataaagatcgtatatattattataaagttagttgaatgaaaattatggatataaataatttctatcataaatatatttgataataaaattcttaaatagttattacaatcattattgataatattttatgttaaatatatatcgaacatataatttgaatacaatatgtattaaaagacattgaaataaaagaaaaaagttaaaaaaatggggcattaataaagaattttactaaaataataaatttgatactaaactttaaaatgaaattaaaaattacacatacataaaaatttgatataattatataaaattctttcaaaatcaaaattaaatatggtagaatataaagtttttctaaataaaatatataacataaaagatttactaaatagcaaccatcaaaggacttaccatcatttccattatatgtataatccaattctatttttttttatatatattttaaagaaaatttttaagtatcaattgattaaaaatatatttatattattttaataaataatatattaaattctaagcatatattaatgtatagtaaagatatttgatataaaaaaatataattaataaagataaattaaaattacatattgagctaatatatataattgtattagttattttgaaattgattactgtaatttaaaataattattaaattaaagacacatgaaatataaacaataatagtatgatatattatcaaagaaagctataaatattaattaaaaatatgtatttttttcttaataaaatatgtaaatttatgctaatatatattgtatttatttacaattcactttgctcttcgaaagaaaataatgttattaaaaaacatttacttatagtctctaattattaaattaccatatacatttttttttatgaaaagaattaatgtgctcatctttaacaatgtaaatttaaagaatgaaggaaaaataaataaacatatgaaagagatgagatgagggaggggtgaaagtcataacagtaatttttttattgtaagctataaatattcattaaaaatatgtattttttgttatggtaaaatatgtgtatttaagttaatatacacggacaaaaaaaaaaaaactttaagtaacaattaaatttgtgattaaaataaaaaaaaaattgtgagtaaacataaattatcattcctacattaaagcaagtttaatgggagttgtacaaggagttacttgttgggagtggaggtagagagatttgtaaagttaacgtaattgagtcgttgttgtatagttatggtgctcttttttttttttttttttttaaaaggaaaaaaaaaa

SEQ ID NO: 121085 - DNA, 1623 bp, Cannabis sativa
  modified_base (1552)..(1576): a, c, t, g, unknown or other
gaggctttgctgattgtgaataagatgagggaagttggagtgagtccaagttcatcagcttgtagaatactgttcaagttattgattagaaatggtgagtatagtagtgtgtggaagcttttcagagatatggttagtaaagggcctcccatttcgactcatacgtttaatatgatgattctcgggttttgtcgaaaagggtttctctcaactggtgagagcttgttacatgtgataagaaaatttcgttgtgagcctgatgtttatggatacaacattgtaatcaatgctaattgtatgatggggaagatttcaaattcacttgaatggattcattttatgatttcaaatggatgtgagccaagtattgttactttcaatacagttataaatgacttatgtaaagagggagacatggtgaaagccaggagtttctttgatggaattcttgaagtgggtgtttttccaaacacagtaacgtacaatattatgatcgatggttatgttaagtcgggggatatcgatgagggagacaaactttacgaggaaatgaagaacaaaggtgttaatcctgatggcatgacatataatatcctgattgcaggtcactacaagtatcgaaaggagaacattagggacatgttaagggatttggtagtacaggaagtgtttccatttagctctttgtttgatatttcgattgcaggtttgtgttgggcaggacggttggatgaagccatggaatccgtaaaaaatatgctcgagaaaggatttcctctcagtgttgttgcattcaactctattattgcagcttatagtaaagcagggttggaagaacaagcctatgaagcttattcgattatgagtagactcggtttaactccatcgtcttccacatgtaattatttgctattgggtttgtgtaagaagggttgcttaaacaaagccaaagagcttctatgtgacatgatggaaaagggttttcctattaacaagcttgctttccttgtgcttttggatgggtacttgaggacaaggaacccgaacggggcatgaaatcgccccgatgctgtttcggttgctatcttcatcaatggactggctagagcaggtgttatggaggaggaggcatatgatgtgttactaaaactagtagtgggagaatttgtgcatagtgtttctgcatatagttttttaattaatgtatcatatatcatgtttgtaaaactctgaattgacactaaaatatcctattatctatttgcaaattcaatacactaaaattctatgatgaaatgtaaatttttcgtgtttttgacatctaaataattttaatttttttactagttttttgcagttaaattttctcaattattattttatttgtatttaattttttaagctcaaattttaacggtaaaatcaatagtttgggagaatttatcccaaaaactattttttcacttatattattaaaattaaaagtatttagaaattgtaaacccagcatctaaattttatgaaaagaaattaggctaattagtaatttttnnnnnnnnnnnnnnnnnnnnnnnnnatcgtgccccctgaatttttttgatcgttaaaaattccccctaaact

SEQ ID NO: 121086 - DNA, 675 bp, Cannabis sativa
tcattccacaagcttcggccaataccttaataatcgtgtccgctattcaataacattgcggatacaaagaattaaaacagacaaatagagtttatatgttctatctccaatcatcgctggtacaataatgatgaaagcaatcgagtttccttggctttctgcaattggaatggaatgttttgtttactatctccaatatataatccaaacttaaaaccatactcgtagttggagggctttagagatgagattggcactttttcaccaaaactcctcaccgtttgctcagatttgaatgttaaacgtcaaatcccaaatcacattgcaggagaagaggaattaacatttagaattaggggtactgtattgaaaataatttatttagagattttttctataataaactaataaaggcaacattttacatttatactctataaaggaaaaataaacataaatagaaaataaaagtttctatttacaaaaatactagcttaacaaaaaaaacaaggaggaaactccttcttctcggtgaggaaacaccccaatccaccaaatccccactgttttctttcagaaaccaggtaaatcagctcaaatcaagatgtagatctcaaggaaaaagcaataaaatcccgaaaaatccaaatacaaaaaggaaaaaagaaaaaaaaa

SEQ ID NO: 121087 - DNA, 1855 bp, Cannabis sativa
tcccaatccatatgtatatataataatgaatatgattgaggaccctcaaacacaaaattacagatgtatccttctagctgaaaaggtttggtagttcactagtattttttttaaccattaagtgtgagtttagaaatatatgacaatatattattaaagagcattgctattattaggtatggtgtctaacaccttctcgacatgtcgtgttgcgattggctagcgatactccctaaaagctattatattaaattatatagaacctaatacttagttggaccaatagcgatattgactcataacaagatgctaagcactgctaatgcctcattattaaattagaagtattaaataagctaaaaaaaatatgttactatgtattttttagttcttaattaacacaaaataataagaagaaaatctctaattaatacatattaaaattaataataagaaaagagaagaatgttttgttagtcttcaccaatctggcagtctttagccggtaatctaccggtcaatcctagaacaactccttgcacctagatttccacaaccaacagctgactgacacgtgtcaattgacttattatataagcctttttattattatgttagacaaaattttgaaatcatatgaaatttcctaagctgcttttttaggagcagaaacaaagaaagaaaagtccctttccaaaatccctttttgtgttttataattacatcagtaatttcagaccccatttcattattttcaatgtgtcatcattatatatatgtatgtatatctatatatatatattttggctctgaaagaagaagctacaacaaaaacttattacaagaggtattaatgatcttctcttcaattgtgcaattctctcatcatcggagtaataagtttttctcaggtgagttctttatatacataaatatataatttatatattaattaagcttaattatttgttatgataaaactgcacttaaatttactttcttttttattattttatttctgggaataatttgtctttttaatatatatataagctttgttagaatagtatatattaattaaatttagcgccgttaattgtaaaattttaatgcatttatttacttgttttattaagtatactccttaattatacatgcacgccatgataagccctgcaaaaaatattttaataaaattaatatatgtatttttgtatgattaataatactattatttttggggttagatagactcagtagtcactgactatatatatatatacataaagcaaaacctaatccactccattcctactatatatattactatatactactgtttcttaattacttatgaaaaatgactagttgtggaggatggtcttctacttttccttggttactcctacttccccgtgtcctttctttcctttacttccttcctatgatgtttgtccctgttgttttgtgtgacccctctccattattcttcttccttgcattactgtctgtttctcaaatcctttattttgtcttctttctgtcgtgtggtgtttggttggtgggtttaaaaactcatgtgccaaactcaattattcaccacgtgcaatggttggtgggtggggttaatatcattatcatggataaattatgtaaagggtgttactgggttggctttagtgactagtgggcccgtctgcttaaatggtaataacattgatggtccccacattcacacacaacacatcttattgctatgcttattagtagggctgtacagaaattttcgtaaaccgcccaacccgaataacccgactaaaccaaaccgacaaaaccgaaaaaaaatacaaaccga

SEQ ID NO: 121088 - DNA, 651 bp, Cannabis sativa
tataagaaagtaaaagctaagaaagtaacttcaaattaaacaaatggagataataatttttacgtggttggagcgttaatgagccttagtccagaagtcagtttcattgattctttcattaacaggcacatgtaatcaagatggttgcaactagatcaacaagtgttgaaagaagcaccacaattggtcaacccactgggggcacgctagttgctggagttggtgatgggacaacacctacatctcaaatgctaggtggaggcctcggaaccagttccatagctcgtccatcaagaccaccaacaactactagtgtttatgccagcggccaaattctacctggaaagccacacgtggagttagaagaccccgaggaagttgatccttgaattgggcagcttagccaattagtgactgacttacagaaactactgcgagagtttcttaacaagaaacataaagagttccaaaacctagttcatggaacactaaaggaacattgagaactaacgtgttgagaaagagtagcgaagagcaaatctcgctctacgaatttggaaagcctatagatttggcaacagagtggctcctccaagagttgctttgactagagcaggaaacaacccttgtgtgccaactagccatatggaa

SEQ ID NO: 121089 - DNA, 1545 bp, Cannabis sativa
aatgtgtaacataaactattgaagacaaaatgttattatacccaacctacataggcccaataagctttataccattccagcatttctattttcaatatcttctataaattatttaattaaattaaaaaaaaaaaattacctattttatgagttcttatataatgtgtgtaaaaatataatttttaataaaaaaaaaaacagttatgagttactagttatttccttaagataatcaattactttcttaggttaaccctcgatcttatactatttttctatattttggaattttttttaactcttttttgtaaacttaattgctataacatgatgttccattaaacgaaaaaaaaaaaaaacacatatatgcgtagttataatacatgcgtagttatgtagtacatgcgtagttataataataatacataatattatattattgattaaactactactaaaaataaaacaagaacaatattttcaaataaattttttgagttgagtcgcgaattaggttgctttctttaaagcaatcgcggaaatatccaactatgtgcaagcaatcaaaaattgtcggtcatccccaagataaaacatcccattcaaaataccctatgttagagctctactgcacgataaagaaccgtcgaaacactacacccaaaaactactactcgaactacttatataatataattataaataataaactgtaaatatataatttttccagtgtgagaaagatgtattagtaacagaaagaaatatgttgatcatgttaagtggaatcgtgagaatgatgctgaaaataagaaggaaattttaattaattgaataaaaataataatttaataaataaattttctccaaaaaataaagtgtcacaccacaccaaatagcccggcacagtcggacggactgtgcacacgtgtgtagtgggtcaagtgtgcgtgtcctctctcattcgcacaaaactaagtacctcttgtgaccctatctcaagtgtcatagttgtactttatatacttttgtaaacaaatgctcatattctatgtgaaactcattctattatacacactaggacactctctcattttgtcaaaattcattaactattgagaagaagttccaacaatccctcacttaaattttcataaaatatttgagcagtaatctaaacaataaaattgagcataaacaaggtatcttttgatttgaacctttgtgtagtgaatacaacttagaatatactagagtaactcgtagtcttgaactctatctctaacgatgtaccatgcacaaactttcttgggtgtagtccaaaagctcatgctttagtggtcatgcacgtctatcccagtatagtgaacactctagaaatttgtcctaaatttaggaagctgccccactccctcattcatgtaggtgagtctatcaagaatactcttgtagctcgatactcgattccacatggagtataaatctcattaagagtttatattgttgggaatattttagcaggatttagatttattaacaagtatg

SEQ ID NO: 121090 - DNA, 1503 bp, Cannabis sativa
  modified_base (26)..(40): a, c, t, g, unknown or other
aggatgttaataaaacatacttggtnnnnnnnnnnnnnnntggtaaaatatttccaacatccttcaccggccagcttgttgattccatcaccggccaacctgcaaaggccatggtcagccagcctttcggaggccaagtcaatgttgtagttaatcccatctacacttggttggatttgtccgccaacatgattgttcttggtaacacttcttagaggttgtattgggataccacgtctgtgtgttatgctgtctaggattggacacccagtagctattcccctaatccctactttctggcaaggttttggtttggaggtatggttctataagtgtattcatgttggttgtcaagcatgtttgttccttttgaaacaagcatgcttagttctttgaagaacttagtgggtgccaatttatccttggttgtcaaggcgcaactggctaggtctttggggacctgcctttttgtacaacctttgagatgacaagtcttaatattagcttaagtagattgtcatcttttgcattgagttgcatattcaactaggacatgacctacgactagttaagagtcgtggtgtatgtctaggtgttcagtccgtgcttctagtgctagcgtgagactagcaattgaagcttcaaatttagcttcgttgttaaaatctttgagtctgacctttgttccctcgtgtagccatagcccctaggtgttttgagggtcatgcctgcattgagcaggtggtcaatgcacattctaggttgagttgtcttgctcttgctctcgcttcttctatggctcttgcttttatcatgaaccttgaaagatttgaggatatatgctctttctatttagccatgaagttggcgaaagcttggcctttgatggccatgcttggttgacaagtggccttatgttggccgagcctcggtggtccagttgagcggttgggcaggtgcttcaggtttttgtgacacttgtcatcgtggttgttctaatggaattgacgccaggcgaaacacaaggagccaggataactcgatcgaatccaatgatggtcaaggagttcaaagtcccttgaatatacaaggcagtggcagaggccgtagaggtagagcacgcagtcggggagatgttaacgcgccgcaggctgcccatgagtgggaaaacaggtttgcagcaatgcaagccaaaattaacgagaaagatgatgaaatcagacgcctgagccagcagagtgctagtatcagatgtatgaagtatacattggattagactgatattgaacttggataagatatcataaacttactgttatgtctttcgaagtcaatatcattggttgatcttaggtctatggatcttaattctgatatggttaagttaagcatagttgtgttatttatgatcttcaagttgttcgtggaagctaacaaatggttttggcagatatttacatctttggaacatagtagttcaattgagtgagaatactaatcata

SEQ ID NO: 121091 - DNA, 2225 bp, Cannabis sativa
tatttttactccatatcattaaccgattggcacaccggtccaaagttgcagcaagagtatgagaatcgacatcaacaatatcaacatctcgccacacttgaagaacaatatccttgcactcctcatccttaagtcaatgtgtttcaaaaatgaaatttcttaggaagggatgcatgagcttggccaacaatattctcaagactggcaaaatatcaagacgttacataagccctcctgatcaaaactcttgccaagcccaaagcgaggcaacgacgtcagacgtcctaaccaagagaagatgaacaaaacttacgaaagaaagtggcactttcttgcagtgctaataataggttgttattaatatatgtcttgttacattctcttgtacataattatgatatttattgtgattataaataaatttaatcttaacaaattaaagcaatggtatgtgtcttaagttatgtatgattgtaatatataaacgcttaaataaaaaaaaaaacattatatatattaacaataattatttagtctaatttccatcaattaatatgtcctaacaaaaaagtaaaatgtatacatagtagtagtaaataattttttgtttaaaatttgaagttaaaaaaaaacttttgaaccttattaccaccgtcattttttacagctattttgacaaaggcacattgaccgtctatagccttgggcatgactcttgtttaccaagatttttagaaattaaatgaataataaattaagctaagaaaaaatatttaataaataatgaagaagaggatttatatgtagttggtacgttaataagctttagtctatgagtcaatattattaagctctttagctatggagtattttacatatgaatgttcttgccaaatttctacagagtgtctagccaaagtttgtaacccttttattgcaaaatattttgtcttgccaaatcatttcaaaaagagtcgctaaagggattgtacatttgcctaccttttcaaggtggttagcgaactaagtttgcagtgtgaacttgataaattcaactaaagtagttattgaatattttttaaattcttctatcacactgttgaagtttttggcaacagtgctagtcattattgttgtaccaatcgcttggacaataaggacgagtccactttttaaatcctatactatcaacatatgcaacaatggcaggatccatctgtctaagcttctcaaattatctatcacaatcggtcttcgaccacgagtaagctacaaactatatttgcttgtgatatcatccgccttgaacttggcgttcacgtccataaaaatatggtgatagcaagcacagtggtatgtttaggggaaaaaaagtgctacaacatagtcaatactttgatgtctatctgagacaaacactaaattttcaaccacctcaattgcttcctcaagtattgcaagaaatatgtccaagagtcgttattctcactgccaactattccaaaaacaatcagaaataattgtttgtttgcatcgtatgctacaacaactaacattatgccaccatcttcaagaatgtgtcgtcaatactattatcacaggacaacagaaagtaaatcccctcctacatccactaagtgagacaaaacagttcttgaaccgctcctcctctacatgcaggtcagtatacaggtatctagattcttctgttgcagcatgtacaagtataaaggtagcttcgtataagaaaattcaggtgtactcctaatatatgtaagggccttctcccggcacctctacgcctatacataacccatttagatcccatagtcgccaagcatatacctcattatgtctttaactttgtacttagtttcattgggtgtacttttctttaataaggtggctaactacccacggtgctgtttggcggtggtcagaatatttagcatccagttacatgtgtgtttgttgtgaaatacggtaaccttaaagttgttagaacacaccttcttcttccctcttaatctccatttgcaatttgaatccttgcatgtaatgtacaacacatcggtcccaaacttcttcaccatccgctaaaaattattattaagtgaaacctacccactacttgtattaattctttgttttcacacaaattaccaagttatatctccactgattccttactttgtgttgacttcgcttttagccaacgacaatga

SEQ ID NO: 121092 - DNA, 1924 bp, Cannabis sativa
  modified_base (1070)..(1080): a, c, t, g, unknown or other
tatcatggtcgcgaccagacctatgataatcgcgaccactgggtttaaaaacccagaaaacccagttttcagcttcgaaaatatgccaaactcacacccaattcaacccaaacaggcatatatctcaaaatcatttcccacataataaaaccaacataagagagagttaaactacacatttaaagctcaaaatcaaagctcacatgcatcaaaattcagatttaaacatactcaatcataagcccaaacatgagcaaatcttcacaacatgcaaattcaaggactagaaaatccccacatgcttcaccatcatccagcaacaataaatagggaaaaaataagatttcacaacttggaaaaacaaccctaaaacttgctaacaacataggtgcaaaatccataaattaaacaagttcaagttacaaagaaatcaccacaagctcctctctttaacccgaatgcattcaaagcccaaaaacattactcttaaaaaatttcagcaagggaaattaaatttaaaacagcaagaactacctcaaattatagcaagaacaatcctcaacacctcaaagctctaagctccaaaagataacaaaaatttaagcttgaatccaagctattaccaacaagattcaagaactagaaagaggagtttacagagagggaggggggttggtttcaagggctgagaacaaatgcttaaaattgcttttcattttgcaaacaattcacttttgttactaattaaccaaatttgccaaattaccatattgccactagggccatttaatcacataaaagctttcaaagacaatcatgtcattccatacacaaataaactcaaataattttcagattattcacacatttataaaataccaataatttatcgcacaattgtattttgcccccgaacctagttcgttccaaaatacttggttgttactataacgtgccaacttatcagaacacacctgaaaaaggacaacacaggcatactatataataatatattccaaaagaacataaataaattaaattcgccatcaaaattactaaaatgcccctgnnnnnnnnnnngggtcttaacatgtcatatatcatattaattcacatatagtaaattatataataatataattccatattaatacacaattaactaatttagggtttgctaatccactttcataatttcagggtattacaattaccccctccttatagaaattttgtcccaaaatttacctgaataactccagatatttctgctgcatattcgtctcgagttcctaggttgcctcttctactttactattcttccataatacttttaccagtgcaattgtcttgtttctcaagactttctcccttctatcaagtatttgcaccggttgttcctcatatgataaatctagttgtagtttcaatgcttcataactcaagatatgggatgaatttgagacatcaaaacatgaaacacatcatgtacagctgccagagttgggggcatagccaacctgtacgcactttccctatcctctcaaggatttcaaaagatccactgaaccttgggctaagctttcctttcttaccaaagcgcttgatgcctttcataggcgatacacgaagaaacatcatgtcaccgatctgaaaatcaatatcccttcactttggatcagcataactctcctatctgctctgagctgcgagcattcgtgctctgattttaacaactacctcacttgttctctaaacaaccttgggacctaggaactttctttcacctacttcatcccagtgaataggtgatatacatttcctttcatataaaatttcataaggagccatcccgattattgcctgatagttgttgttatatgagaactcgatcaggggaaggtactttacccatgatccttca

SEQ ID NO: 121093 - DNA, 1464 bp, Cannabis sativa
gagagagagagagagagaatcagagaaaatatggaagaagaaagcatcgattcctatttattaataaacttttaccgacacattttgttacgtaaatgttcatgagctttatacccatctgtcataaaattaaactcaaatcctaaaatttaatattgttatgatagagaaacaatcaacaataaatactaataattatataatttcatatttaagagtaactaactaaaaaaatttgaaaaaattaactaataactgaattaatgtacgtatatacttaaatacaaggtattatttttataaatactattaaatacatgacattatttttataaaaaaagatgtttaatttttttttttgaaaacaaatgtaaacttttattagtttgccaaatcaacgaacagataaggttgtgcctcaacaggaacatcacttctgttgagcactcgatctgaaaaagaataagatgctctagcaagcctatgaacaactatattggaagattgtttaataaaaaacaaagaaatattatttaaagatgcaagaagttaacgccaatcttctataataaccctaaaagtataggtaataaatttcgaatagttttgactactaccaagcaatctgactctagctccactttctgccatggttgagttttaatccaacttagcacttcctttataccaattccttcaaccaaatccgaaacgtatataccagcaaaactattcgacttagccatcactacttccctttgagagtctcgagagactatgccataaccaaatactgctcaatcacaaaaaatgggagaatcaacggttactttgattatattatcctgtagcttaacctaaaattcagctccatcactagcttcaaaaactggcaaagaagcctttgaacctctattttgggatgacttccattacacaagacacctcatagatgagataagaacaccatccaaagtagcatacttttggttccaaaccaactcgtttcgagccttccataacgcccaatacaacataacagcctccccacacttgtccttactacacctttgcaaaatttgatcaaaccagtcacaaaaatcaatagcaacaattggcctaactccagccaaacacctcttccaacattgagcagcaattgaataggaaataagcgcatggaacttagtttcctcacctttttaacaaactagacacatgatttgagctgagaccctcttaccacttaattgagtcaaggtggacaaataatttaaagtagcccgctataccaaattgagagctttcggcagtaccttcaaattccagagcttgcgccaaaacttaaaagaattagctgcaatctaatttcttttatgagcttgtatcaacttgtatgcactacgcaccgagtagaaacaatgatgcttcttataccccaaaaaaaaaaaaatcatcaactac

SEQ ID NO: 121094 - DNA, 1057 bp, Cannabis sativa
acattaatataattttcttagaattaattaatttaataaaattaaagtttctatatagggtcactaatggaatattaatactaaggaaaaaagtatgaacaaagaagctatatatttcacaattttttacaattattaaagcaaataatggacctaccaaaggaaaaaaagtattttgaacttttccctagaaattaatttcaataaattccaacacattgcatcaatgaaaacagtttgaatcatagaaaaagaaagcctacttattttgtccattatagctttgctattattattttgaagaaaattctaagtctccccaccattcatattatttttactcttgacaattttaattaaatccaaaaaataaattgaaaaacttttagtcttacatatatggctcaactaaaacctaattttaccaaactgatatcatcacaatgaaatacgcgtgtcatattttcattggtagatacttcaaaactgagaaaatttaacttaaagtgtataccacacaatatataaaaatctataatataggaagactctcattactataatattgtctctccaaatattctcaaaccatggcatcatcagctcccatctccaaaacccaactcacaattctctccatctttctaaccctaaccctagtttttgcccttggaaaagccgaagatggtttcgtcagagccatggataggaagcttctagggctaaaaaagcaaaagttcagccactttcggttctattggcacgacatatacagcggcaaaaatcctagcgcgatggcaataatccaaccaccggccaatgcatcgaaaagcgggttcggggcggttagcatgatcgacaatccattgacagaagggccagaagtaagctcaaagttgctaggaaaagctcaagggttttatggattagcttcacaagaagagattgccctaattatggctatgaattttcatataactcaagggaaatacaatgggagcactctcaccattcttggtagaaaccaagtgtttgataaggttagagaaatgcctgt

SEQ ID NO: 121095 - DNA, 2074 bp, Cannabis sativa
tttggaaaataatggaattaatttgtataaattagtggagggtataaattttaaaataggatattttattagggtcaattaatgaaattttccttagaaaatgtatatatacataacacagttgtcacatatgacatatatatatccactatctttatgatcatttttatcacgtataattagtagtaattaaataagatcataatacatgtacatttgaccactgctttccggacctgcattattttagaagatcaccactataaaaataaatatataaataataaaaagacaagagtaagataagatatataatatagtatgtatagtatgatcacttcacactaatagtaggtataaattgtcagaaatgcaccatcattagtcttatgtgtagtgtgtttatgtatatatacatatatttgagattaaattactacttatcattatcaaaccatggcatcccatacttgaaaataaatcattgcttgactttacaaaactattctccgacctggcatgtcaatggagtaggtatattgtgtgtgttgtgtagtgtatattctcaatttttttaatacttattattatgattgtactaattttcaacaaacacttaataattatatacatgtaagtgtaaggataaaaaaccatatttatattcttcaacttcaaccattctcaacttattaatttggttaaatggttaaaagtggaaggtgcaactctgacaaatgacaactagaatttggaaaaatggctttgttttcaaccattaaatgtgtatttaaataaagggctttaattggatttatggtccaaaatattcactcctagtcctccatgaggttatcctaataatttgtagggcatttgttctcctctttattaatattgtatttttatttcaatggtgttgccaccatccatcacacccttacccaagaaaataataaaatgaaaaggtaattttctaaacatgctgaactttatggtgtttttgcaatatattttttaaatcaatatttacagaaagaaaagcattaaatcattcacaaataaaccattatccataagggcgctcctactctcaatagaaagaaaatacctcattttttttcgataaagaaaaatacctcaatttataccttcaacaatagagaatagaacatgcagtttttgttagttgtttagtgataaaaaattaactaatttttttaaaaaaacaataataataatttgtttgtttagtgaacagagacaaaacatacacaagtttatatttcttgatagatttaataataccaaaatacattacagtttttttaagaaattacaaattttataaacttttatactttttgtgctaaaatatgacttttcttttcaaaaaaattattttaggaacaaattgaagaaaaaataaaataatatagaaaaatggggataaccaaatacgttatgccatttttttctatatacttttcaaaattttctataaaataactaaatttttacaaacttatattttaaaaatagtacaaaaggatatttttttttttttgggtggagtacattagatacttttgattgaggaaattacaatgaatacccactttattttatttgttttaatttttcctttcaatttcatattcttttaaaatatacctacttttattgatgatgtcctcgttatattctttaggttaacgtaaatcatatataagtggagagtaaaaatatattaggcaacccacttggtaaattttaatgaaatataattcgaggatattttaattaatagatggtattcctcgacttatccccttttgattaaaaaaaaaaaaaactttacatacttttgacttttgaggtggtagttgtcgtttttattgctccggacatttttccttttatcttgatcttattcctatttcacaatatttttcatatccttcttctgtcgtcgtttactgtgaaaatagtcgttttcattgtcgttcttaccaccgcaataaaaataaataaataaataaaacttccatctttgacaaaagggccggcgttg

SEQ ID NO: 121096 - DNA, 3004 bp, Cannabis sativa
aaaaattccttaaaaaaattgtatgttggtgaccatcactttttatagtggcactctacgatttgttaacaatattttttaaaaattattttcttaatttatataagatctgatatttaaggccgatccaaacatataaaaaaaaataggagaagagagaaggtaaagagaaaaatagaatgagagagtgaatgagatgatttctctcagtagtttatttcaacggagtgaaccctatttatacaaaaatataactagaataataaaaaactaaatcaatgaaataaagaaaaatacaatagtatttatggtataattgatttggctgatttggacattcatgtataatatttcataacactctctattgaatgtccataataactgtctcattaaaaaccttcacaaaaaactttacaggataaaaaaaattttaagggaaaaatagtgcaatatgaatcaactcccactcattttggtattcgtggagatcttctaatcgacgaattccgaccttatatgtcgtcttctcaaatgttgatgttagtaataactttgtcaataagtttatatgattgacgcttagttaaatattttggacaccaatatagccattttcttaaagatcgtgtagtaagaagaacttggggaaaatgtatttagttctatctcctttattatagctttagttgagcaatgatgatactgctttattaagtgtaatctatatgtttcctgaatattttatgtcaatgatgtcactcccacacattctctactaagtgcaggtatgttagtatgatttaaagttatctcattaaaaactttatcaagaaaatacagtaagacaaaacctgagctaagaaaaaaaaaagagtgcaatatatatttcatattcataattatttacaagttttctcgttaaaaaccttgtcaggatccagtaggacaaaacctgaacttagaaaaagaatgcaacatgaatatgtcttcgccccatgcacgtatgatctataattatttcgatgataatgtatctcataagattattgttatcaattttaaaatattattgtggattatctacgatcatatatttactataattcttctaaagtatgtgtgaatttctaaattatagatgaggggttcctagaacattaatatttatccaacttaatgaatccttcatgtatgtgtgtatacattgttgttcatgctaaagttttaaatttcaagtagttatataacacatgaatgataatataaatttttatttgttataaatgacagtactctaatgccatatatttgttctattattgttgtataaccttaatttccatatcaaatgatcatatatcaataactcttaatacatatgaagtacttcaggacttctctacttatgaacaaactatatatatttaatatttctcaatatatacaaaaaatgaaagttagttcttcactcatttataatgtaatcaaaaactcttcaagagtctatcagtatcacaacatataatttaagaattttatttattttttgatgtaactattataaattaattaaaattaattttgtagcttaaattgtgatggaagagagtagtggttcaatcgataaaaagaagaataatgattcaatcaatgtgaagaagagaaaaggtcgatgtggcgctgaatgtgtagtaagaaaaaataaaaataacgatgaattattttatggttgtccgttgtggaaggtaattttgttgaattttgagaattcaagcacatatattatatgataaaatttattgattatttgctatcagaataaaattgaccgaggctgtagatttcaaggacttgttgaagatgaaaggtcaactgctttaaaattatttgataccaaagaaatagatcaattgttggcaacaataaattcaattgtgcggttgttgttggagataaacattgttttcgataaaatagttgatttgttgtcgaagatgaaaattatgtttgctaaaatattacaatgtataattatttattttgttatttatttgttatttaaatatttgtatatgtgaaagttcaataataataaatattttaatgtagtattatgtgttattgatcaatatataaatgtaatttaaattatcactacaagaaaggggaccttttagattgagacttgttatccgacttttagatttggcggcctcaaatatgtagtaaaaaaaattttagacaagggctttgtttggtagaacgtcaaaaaaaatatcaaaggtataaaaaaaaaataagttcaagattcgatttttatgggttagccaaacaaggattaatgtttttagggaaatcttttatcctgattattagttaaaaatcgggataaaagggtttagtgtaaaacccttttaaataaccaggataaaaagtgttcccctaaacaatacatctcgtgaacagatatcagatcattacacttgctattaacctcgacagacctcccaaacccagaaaccctcgcccaaaccccatgtgagactcaatcgcccattccagaatcgcccaaacccaccggagcagctgatcaaacgattaaatgtatgctttttttttctttattattttctcctattttgcatttttttctaccattttttttctgggttcaagaaaataaaaataaaaatctgattatgattatattatttttttttttgttaataatgtcttctagtttagggattatttattatgtatcattttttacctttctagttcttaaaaatttaatttttataatattcgagtgagttattgatagaattttttataaaatggcagaaatttttgctatgacaaaaaaaaatatttatgtatatatacttagtttggaacttttgagttatagtaaatttaatagtcttgacaattggaatggcaattgaaatatctagtaatgtaatgtaatgagttatatagttttagttagaaactt

SEQ ID NO: 121097 - DNA, 798 bp, Cannabis sativa
  modified_base (48)..(58): a, c, t, g, unknown or other
ttttagaattcatattaggatgctaataaaacatacttggtagtaaannnnnnnnnnngtaaaatatttccaacagaaatatatttagtagatttaactaatccaattttacattaatgattagttcgataatttaacctctaatatctttatatataaaaagtaactatctattttttttgagtttaacagaacatactttaaagataaaagaatattttgttaaatttaacgaaatattgatagtactattaattttataaatatataaatatgaatttgattatactaatcgaagcacccgtagttatattttttttccttcaaaatttataacaaaaggtattttccttccaattgaagtagtgaattattattattattgattacaacttatcacgacactagactaattataatttaattaaagttgttcacttattttgtatattttaatttgatttcattatacataaccaaaaagatataatttggagttcttaccttgctttttaataaattcattatttaattcttattaattaattcattttagtttttcaaatttaattaaaacaaaactttctttgaactgatattattaaaataaatttagttaaaagttggagattttctaccattaaaaggtggattggtttgtgacccaaataataataagtacaaagtcataataaaggggaaatttgattaattatgcatttattggaccattttttttttctaaaactaaactattcaatattggtagaatacgtcattttttcctaaaccccattc

SEQ ID NO: 121098 - DNA, 1892 bp, Cannabis sativa
  modified_base (255)..(259): a, c, t, g, unknown or other
  modified_base (1164)..(1166): a, c, t, g, unknown or other
aatttgagtttgattagagaattaattactttcaaaatacattttatatattatgttcaaacatatattttaaaaatttaatggtagtgatagatacaatattcttaatttgtagttaggagagtgtgggtataataaagtatacaaattattagaagcatatatatagatatatataaatatatcattaatcatttttaaataaaaagttgtcgtaaaagtatggcttaaatatacataattaaattaaatttnnnnntataaaatatctacatatttttatttttaaatatatacaataatattataaaatttagaaagaatattctgttaagtcattgggatcagtgatggacccaggatttttactttatgggggcttatttatcataaaaaaatatttatagctacattataatcactcttactaaatttatctaattttatgggggctattctactattttggtttaaaattattaaattaaaaaatttacatttaattttttaaaacagtatttttgttagtgggggctatagctcccacattaatgttaatgggtctgtccctgattggaatattctgttaaagttaacgtagaaaactaaaaaaaacttcgttaaactaattctgttacgtacatagccacattgaatagatagatatatagaatagatataaatgtaatagataaatatataaaatagatatagatgtgattatatatagatgtaatttttatttttaaatatatacaataatattatataatttataaagaatattctgttaaataattgaaatattctagtaaagttaacgtaaaaaaccaaaaaaattaaaccaaaagttttgttacagagtcacattttatataaaatatatatataggaatcttattataaattttttagtacactcggagttgtgtgtgtaattttgttcctgttcaataaaacgttcgtttaagatcaaatctatttatattttatatcattttttgaaatgttgaagatttttatacattaattttgtttgtttgtttgtttttttttattttttttttattttatttttttattttttgataaaaattaaatcatttcataatgcttcttaaaagtttaatgttaaaaatgggtgaaaatcggtcggttatggtnnntttttacaattttataaccgaccgtttagaaattataaccaaataaaaccgactgtacagattttggcggtttttcggtttgacggttttggacgattttgggcggtttattgcggtttttggcggttttagcagttttttggtttaactatttttttatttcaaaaaccgaaaccgactgccatgttaaaaaaactgaaaccgaaactgactgccaaattcggtgatgatgtggaatcgaaaattcggttacggtctggtcggtttgatggtcgatttcaatttattagtttttattaacacccctaaaaacaaatgaattagtaacacatattatattattattagtacatttcacacattttaatttaataaataatattattttaaaaataaaaaattaataaataatataaaaaaattaccgataacttataaagcgtcacatgtggacaccttaagataagtaatgacgatgctccataacttagtacaatcaacactatttctaaaaaaaagtactaacgacaccaaaatttagagtaaaaacaaaaatgaaaaatttatgcaattattttcttgacacaagaatatttttgactcctaaacaaaaattttacaatacaactccttaaaatagatatattgatgcatctctatctattttagcattcgaaataattttttagtcaaattttttctaatagtcatgtacgttatagttat

SEQ ID NO: 121099 - DNA, 1843 bp, Cannabis sativa
tgattctctttgttatgtttgctgcatattgtatacttaaatcaactctaggttttgagcaagcaaataaaaaattaaatatcaaaatagagaatgaagttagaagtttggttattaagtatttatataaaattaatatgttcgaaactgacattaaatttagtatgatttgtaaaagtttggttattaggcattgtgtattttttattgataaaattatttttttgcctcttttaataaaataattagtttcttttaatattgataaaattagtttttaaagttaatatcattttttaatataacttttttcattatcttgttgatacaactatttttatacaactatttttttttttttttatttttttaatgaaattattagtttcttttaatgttgatgaaactgatttttaaagtttgtatcatttttagattataattttttatattattttttgttaggatgatgttgatgaaattatttttttttctgctgcttttaatgaaataataaatatctaataaaaaacaaacgatagttttgtaaaaaatcagttttaatttctataaaaaaaataacatttacaatcgagattattttttatttattttagtgtttcattttttaaaaaagaaaaagaaacacaaatttaaagtttttttatggcattcatctttatataaaatgatatcttcccatattttaaagtttttttttttttttttttaaaataaatgtcatatttaatgtaattaagttttttaaccatatatatcaaaatttatcttctttttttttttcccatatttttgtaaatagccttaaaattaatgtgtttggcctaaatctttaaatattctcaaatctacaaagatttcagcgtcaacattaatcttgatactatttttcactggttttgtctatagctcatcacctttattgaaaagcgatggattcaatgaaggataattttctatcaactgagccttcttccattgatcaagagatgttaatgcaaactgcacaacctcatcgattgtccgagtcttttggtcccacaccagatcattcatcgccttccaaattgcccaacacaacgtacccacccgtgcgatttgctcatcctcaactctatccatcaactcctggagccagtccctaaatgaactccactccctttaagaaaaatctaagctcaacttattccatcaacctgaagcaaaatcacataaacccagacaacgcacaatagtttcactagcgattgcagaagggacaataacttccaagggcacttttctttcatggagcctctttctagtaggaagacagttagatgccgccctccataaaacatctttcacagtaggaggcaccttcaaattccacaactacttccaaaaaacaagagttatcaccccttctcacattgcttttaataattcttgaatgatctggtaagcactcttaaccgagtagctaccatgtctatccctattccaacacaccaagaatccttaaccgcctccatcgctaaaggaatgtccaaaataatctctgcatcactctaattaaacacatccctaatcacttcttcatcccattccctacacccaactttaaataaactttgcaccttttagtcaccaaaaccggtaaagtctgaagttggcctaggaaactcatcacttggcagccacagatctagagcaaatccaatagatgagccatgtaacacccgtatttgaaaacttgctaattcaaaattaatcttattataatacaattatacaatcttatagatcgggatcccaagttttaaaacacagtcaaaactac

SEQ ID NO: 121100 - DNA, 2595 bp, Cannabis sativa
aagtgattctacaaggagtgcatgattaacttcttggttgtatgtcaatcttttgtgggatggtggttcgagttctacgggaaacatagcttcataaccatatggtatggcaaatggagtctgtccggtcgctgctttctccgttgtgcgatatgaccatagtacttcaggtagttcctctggccagtttccttaagcatcttcaagtcgttgctttaaggtatctttgagtgtcttgttgactgcttcgacttgatcgtttgcttggggatgtgccactgcagagaaactttttatgatcccatgattcgcacataaatcagtgagggactggctgtcaaattgtttgccattgtctgagactatcttgtatggtaatctgaaccgaaaaattattttctttacaatgaattctttgacttttttggacgtaatgatgggcagtggctcggcctctgtccatttggtaaaatagtctactgcgaccactgcgtattgtaccccgcctttgccctcggataactatctaaacaagtcaattccccaaatggcgaaaggccaaggactttgcatctgagttagttcgtttggtgatgcgtgaggtatctttgaaaatctttgacacttatcacatttcttaacgtaggccttggagtcttcaatcatggtcggccagaaatacccttgccttagaattttcttggatatactctgcccagctgcgtggttgccacagaatccatcatgttcttctgactaaagtcatgcagcttcttcttgtgtaacacacctgagtagtggcatggagaatcctcttctatacataactccttgtacaatgatgtaccgtgcaacctttctcctcattttccgagcttcatttctgttatctgggagttccccagtgttgaggtaggctgctattggcctgatccagtttggggatgtatcaatcatttcaatctcttccgtgcgccggtgatactatatttttcaagaaattggatggggatcatatttgctttttcatttatgttgctgctcgcgagtcgggctagtgcattggcagttgtgttttcttctcttggaatttgcttgatatcatagcttttgaattgtgcgagcagatcatgtatttttcttagatatcctatcatcttttccccctgagcctcgtattccccaaatacatgatttaccactatatgtgagttactacagaactcaatgtgttcgacttgcaattcctgagcaagtcttagtccggtgataagagcttcatattcagcttcattgttggatgccttaaatccgaatttgtctgcagcgtgcacgtactggcccccaggtgtgacaagggaaattcttgcgtcagacagctgatccgtagccgaaccgtctacatgtaacttccaggttggtttgtttttgctattgctcggctaagatacttgtactggctttgggttgttttctaaagcgctctcctctttacctgtacactcagccacaaaatgtgctaaggcctgacccttgatcgttgttcggggctgaaagatgacttcatattgacccaactccactgcccacttgagaaactgtccaaaggcgtccggtttttgtaatactttacgcaatggttggtcagggtactctcgaacaggatgagcctgaaagtaaggccatagcttccttgttgctaggattaggcaataggtgagcttttctatcaatggataccggccttcagcttcattgagtcttttgctgatgtagtagaccgaatgttggatattgttctcttctctgatcagtacgacacttactgcatgttccgtgacagccaaatatattcctaattcttctccgtcaagaggttttgagagtacaggaggttttgcgagttgcatttttagcacttgaaaggctttttcgcattcctctgtccattcaaattgcttatttcctcgtaggaggttgaagaatggaacacacttgtctgttgagtttgaaacaaatctactgagtgcggcaatctgaccagttaaattttgaacttagtttttgtaggcgattacatatctaggagggcttgaattttctctggattggcttcaattcctcgggcattaaggataaagcctaaaaagttacccgagctgactccaaaggaacactttaggggattcagtttcgtgttgtatttcctgagaacttggaagcattcatccaggtcatctatatgccccccaaccttcctggatttgacgagcatgtcatccacgtatacttccatattttgtctgatctggtccttgagcattttatttactaatctttggtatgcagctccagcattcttgagaccaaatgacatgactttataacagtatagacccatatctgtccggaaacttgtatgttcttggtctggttgatgcatcttgatttgattgtaccccgagtaggcgtccatgaaacttaatatcttgtgtcatgcagttgcatccaaaagttgatctattcttggaagtggaaagcagtccttggggcacgccttattgaggtcggtgaagtcgatacatacttgccatt

SEQ ID NO: 121101 - DNA, 1595 bp, Cannabis sativa
ccaaatcccatacattgggtagaaattccccttctcatctttgattactgtggggggtttgaaacatagactttgatcatgggttaaaagaccacatttgaagcacattttagggagtttttcatacttatattgcaaccataggtccttgagtcgttgacgacgtaggaagaagccagagaagagaggcttgtttaggtcgattgtggctctaaatcgtaatgagctcattcccactgcatcttctataccagcaggaagttcatatataggagaggctttggatgctagctcttttaggttagataggttccaataaaatggggggatgctgttgatgttcacccagattggagtcttgtcgaaccgtacttcagcaggtgatagccatgatggccatggcataataacaatgagagccccgcaaacgaaccaagggcgacgggctagaacatttaaagcatcatttcgatttgtgaaggtgaattgaataatgttatcatcaatttccttccatttccaccctttaattgcattccatgagagttttagtgacccctgaatcgcagccttcccgagtttgtatctgctgactattttccccagtagaacttgattggcctcctccggttcatccacttcacgtggattgagagcaaatgttatgtcgtcttgtgaaatctgaaccgcgtcctggaacatctcgcttacagttgcaggatccattgagtgtgaacagcaatcctaggtgatacaagtcacttgtaggatgaagagcaaaactctataaacttctaagaagttggctccttaagagcaaaacgaaccgttatggttcatgatcgaaccggaagctgccttcaatattgttaatattaccattcttaaagtttttgcaaaatgaattcttcaggtctctttttcttcatgggtcttcagcaaaaatgggtcaattttaaaacaaaacaaaggcaaatattgaaggagtaattgacaaaatttacattttgaaatataaaataaaagtgagttttgcctcctagtattaatactcaaaaaaacaaacaatacattgttaatgtgtggaaatacaatgtcatatataagttgaatgggctactcctcttattgtcaattggttttcagatggaacctaatgcaccttaatcaaacactaccaaattctaatatagtatcagagtcaaataaaaaactctcgttgtacctcctttaacctctatttgggatcttttggccaatgcatgctagttttcagtgttggggtcaaaattcataaatttcctgacatatacacccacaaatttcataattttacttcttttaaatgtcacgttcaactctatagtttcttaaagctcctatgaaataaatagaacatcatggatcttaatcaagcactaccaaatgcaaacagtgtatattatgactataatagatattacacttattttaaatttttaaaaaattagaaaaaattataaataatgtttataacattcacgtaactgaattttttaaattgtgtttttatgtaatatgttatagtgagatttttctcacctagaaactcgaga

SEQ ID NO: 121102 - DNA, 1303 bp, Cannabis sativa
  modified_base (502)..(505): a, c, t, g, unknown or other
aaaaaaaaaaaaaaaattcaacacaatcccatatattaattctccaactcccatatcgattacctatataatatttgtatactaactaccatataaaataattaaccaaattctgataattatcaataaattaatcctaaaactatatggaataatagtagaaaactatatgaaataatagtagaagtttaatggtgttatattataatgctaaattaaacaattatgtgacaaataattattaaatggtaactacatacatatagtataaagttgcaaatgtatcttttaaattaatattgtaactctcatttccattaccagttttaattactaattgtatttaaatgtaaataaataataattattgttaaaaatataaggtacgtttggtaacacttttttataccgtttttttatttttaaaattaaaaaagtaaaaatattttccaaaaacatgttctatagaattgtttttactttttaattttttaattaagannnnaaattttaaaaacaaaaaaattacttttaaaatttttttaaatattttttttaatcaatattttggtaaccccaacttagaccttaaaaaccgaacccagacccggcccagacttggacccgccccaggtcccgatctccgacccggcctcagactcgaattaaataaaatcaacaaattaaaataaaaaataaaatttacagaacacatttttattttttgtttttaaaattgaaaaataaaagtggttatagaacacatttttattttttaaaaacaaaaattttactttttttttgtaattaaaaaatctatatatatatatatatataaatgagaggtatatgacggtggagctctaaaatggcttaaaacatgtttatctattttctcatttttttctaattatttaaaatctatttatttattttttaaattttttttctaattatttaaaatataattatttattttctcattttttctatttttttttatttttctacttttttaaataaaaaacacaattttttttataaaactttataaatatctaacaattaatgtttagttcaccgtaatggtaatgaataggtccattacattgtttgcttttctcttttaacttttgtaatccattacaatgtaatgattattacattgagtattataatgaagattaatacatatcaaaaccaatgtgatcctcattacaattacactccattacaaagaaaaaaaaataatattttaataaaaataggggagttatatttgcaccccataaaattataaata

SEQ ID NO: 121103 - DNA, 1757 bp, Cannabis sativa
tcgttttagaaagttcatattaggatgttaaataacatacttgtgagtagatctaagatcctggtcaaataaattccaacacaaccttccctagcagttgaggttccccatccttagctatccacccccagggttcaagccgagtgggatgaaattcctgctttctatatttagaaagatgaccctttcgaggagtctgctgaaaactatgtcaagtccttgttagaggccattagaaagcctgatgatgacttttacatttctaaggggcgagattcaactttgatggacaattttatttcgaaaatcaaggtgtttatccaaatctatttattattttgcatgtctctttaaagtattttaccagtttgatcagaactattaaacatattttatcagacggctttgaggtgtgcccatgctatgaaattttctccacggacgaataaggagaaggagagtctggctaagggttattcccgttacaagaagagttacgagacagctaatgctacaaagaaggccgctatctccaaagttaatgccctaaaagttgataataagttgttgaagagtaagatcgacaattttgactaagaaaagaagagctgggatcttactcgcttagtcatggagtctgagaaacaaactctaagtgataaggttgcttcgctcgagactaatctatttgagatgacattggagaaagatgccttgactcaagagcgtaatactctcctttctactaatgaggcagtgaagtctgagatttcctccttaaacgacaaattatctgaggcagcaaagatgatggaccaggcaaagaaggctatggtggatgagaagagttctttgtttcaagagatcaaggttctgaccaagcaggtaagtttgcttcatgggatttggaggggttcttcaaaaggtatgtcgagttcaagagagatgagaatctcgtggatacttcttctgactcggacgggccagatatgatgaagatgccgacgatggatgaaaactaccctcttgaggagaaagctcttttttttagcaagggatacactatttaagacaatcatgtttttattttatggtttgtaaggattattatttaggctgatgccttaatttattttgcttgtgttattattatttttatttttatgtgcatgatcatttctcaaggtagtttgacacttggtagtgtttatttaatgacatttaatgccttggtgaccggtggcttcacatttccaccttccttttcttaggtttatttaaacgtgcattttccttcactattcttgttaaaacttcagtctttctatcctcgtttcttaaaacttcttctcccttctctttttcttttgcgaagatgtcaaaccatccaagctctccctttcttaaatctttgagtggggatgaaatccattctgatgttggggattgatcccctacttgccctgagaatttttcatattgcaaccagcctagtggtgaggccattgttggaaggatgatgcgggcttatcgtgctaggcgtaatgacgcatcttcatcatctgatgaggaatggcttcaaaatttctttgagaaaaaaaggcaaaatgtcccttctactactcgtgtccctcctgagtttcatgccctctgattgcttgccaagcgtcgtcgcgatcattgtcgactacgagctaggaaccgtcatgaatgggatgaagatttggaacgtgaacgcctagcaaatgaaaggtgga

SEQ ID NO: 121104 - DNA, 528 bp, Cannabis sativa
tgattatatgaaatgagttttaattagggcataaaacccaacaccaagtaccttgggatgccgacatttgttggtaaaaacaaaaaacaaattttcggcaaaattagggagaaagttgaagcaaagctctaagggtggaagatgggtcttttctctcaagcggggaaagaaattttaattaaagcggttgttcaagcccttccttgttatgtaatgagctgttttcgcatcactaaaggtatccttcatgatatagaaagtttgattgctcgtttttggtggggatcaacttccaataaacataagatacattggggtaattggcggaagttatgcaaattaaaggagcaaggaggcatggggttccgtgacttagaagattttaatcaatctctctttactaaacaggggtggaagattctcactaatcctgattgtcttctcactcgggtgttgaaagccctttattttcctaacgaaaccttctttgaggccaaattgggtcattttgggtcttcggtttggaaa

SEQ ID NO: 121105 - DNA, 1380 bp, Cannabis sativa
tcaaatcttgcaaatcttgcattggaatgcattggaatggtttggaatggtcttttattctatttcaaaataaaatagtcattccaccaaaattatggaggaaagatcattccatcgaattattggtggtattccaatagttttaaatgcaatcaaacaaaagaatggaataaaaattatttctattccatttcattacctctaaccaaacgccatctaagaggcagaggaagtgagagcatatggggttatttgtgcccctttctcaattttttataatataaattttagaatatttttacattttgatgctataattttttttttatttatttatgttcttacatattttatatttttctcggtttctcaaggtacatgtgttaccatcaaaatgcaggatttagtgatgaggtgtcttcaccttggtggatatagtaatgttcaaagaacgaatcaacttaagggtgtcctggccccaagatgatcctcatacgctaaaccttcttaagaagatgctcccgacatctcaacaaggaagcaaagtgcagaacgaggaacgtctcgactgggacctcgctcaagaagcaacaaaaggaaaggaaacattgtcttgtatggttttggcacttcttctcagacgtgattcccaccaaaaaggccagaagacttacacgcaacattttcttgcgtcagaagagtaatgtagacttgtcccttccgtacatactataaaggttggaccttattgcctaaaggtatgacctttacaaagagagtattaaacattaagatatgcacacccactcctctatctgacattcccttttaccaacacgaaaagttacggctagcaactgcacttgtcatgtcaacataggacaagtcacatcaacatcatctaccactttaattgggcttccccattgggcccaacagtttcaaatgtcgttgttaagtattgtaatcagtcacattaaaggctaattatatttaattagcttattaattaaataggcttttgctattaaggcctaagggtgtccttgccaataaatagagcaacacctgcattatgagagaacactgctaaaattgtgagagaattcttattcttgtgctcatacaacatcccccaatcgtttgaaattatacatatcaaatcgttttatttttgcattaattttacaaactaaacaaattaatatgtaaaacaacctagaattatgtttctaattgatttgcaataatagaggttcaagtgaacatacttactattaacgcaaattttcgttaactaaatttgagcctcataatattgatttcacacagaaaaaataaaagttataaaaatagaaatatgaacacaaggttttttac

SEQ ID NO: 121106 - DNA, 3983 bp, Cannabis sativa
gtatttttgtaatttttttttccttttttgtatttttttttgtttttttctctaaaatatatattaagcaataaacttaataaagcattaattagtggccttgggttccttttagtgcggaaaggacaagttttttgggggaaggtttttgaagaaattgatggatcatgaggccaagaattattttcctaattgagataaagtcaacacgaaatgacaaacacacggtaagatgttgacttttatgggtttctgtttttcttttgaaatggttatgggtttctgttataaattttgaaatccaatttccattttcacttctccttttcaattttatttttcccaaaataaggacaacttatgagtaaaaatggtgaataaaaaaacatatttacaatttttttttataaaataaaaacatcattcggaatagagatactactaaaactaataatcaataattatttatcaatgtatatacattttatgaaagccttcaattaccatctcaaatatgaatttgctaaaggagacatgagttaatgggagtgattcattatcaaatgaataaaaatattacacatggtattgcttattgagaaactatacaaatactactttagcttgacatttttattttacctatatatagtaaaaattcattgtatttccatattatcatacatattttgtgaaaaaaaatgtgcttatcggatttttctcaaaataactgaagttttataatttaaatttggttgcatatacttacattatattacattatacatggtcatatatttaatcattttttatctctttttaactttgattaaagaaagacatgtctcgtgtttgtgggaaattgataagacaatacaaaatggagagtgcatacatataaatgctagagttttcaggtagctgaaatttgatgagatgtatcagagaatataaatgcaaataataataatggagttgaagaataactgggttgaaataatttggtcaaaaaagagtgggagtgatgtgaatgtagtaagtatgtggggttagggttagggtttggctttggctttggctttggctttggattcttttgttgtgtgacccaacacagcacaagaaattaagaaagagggcagtagtgtagtaaatagtgaccttacaattttcagattgatcagtaagttgtgtttgtgtctcgtgcgtactgagtgagtgagtgagtccactaccattgtatattctgattatttctgattacaatggtcatcacacacatcaccaacttcgaatcacttacctcactccattatatatataactcaaaatcatgccatatatatacaaacatgcaatatatgtaacgccatgatcactgttgcaattctatttttaggtttggttgtgaaaactttgtcatttttttttatatgaataaagtttataattctaccagtgtaattgctcttacatcatttatatacaagtaaaattactcttatgcccttattatgtaattttttattaccaaaataaattagaaatattagtttggactatgtgttttgcaaaagtttttaattgaactttctcttttgttaaatgacaaaatagactctatattttttttaaatggtaaaaataggaccctgagctcaatttttaataattttattttataactgactttaagacaatttctaacacgaacagatacagaaaatgaaactagttttgtcataacatctctagatcatattattattaagttttattttgactaaaaatcagttcacggtcctatttgtacaattttaaaaaaatatagggtctattttgtcatttaacaaaatagaaggtcaaattggtaagcctacaaaatacagggtccaaaagagtatttgccctctatagtaagaatatttttattaatgtactactcgttcttattaccattcagaaaaggataaataccattttggaccttgtattttgtaaaaattaccaattagactctcttttttgttaaataacaaaatgagccttatattttcaaaaatggtaaaaaataagaccatgagttcaattttcaacaatttttttttcatagatccaaccttaagacaatttctaacacgaataggtatagaaaatacgagaagttcagagctaaaacagagtgaaagtgtttatctcttcttattgaatgtgaagctaaaacaaaggtccttatataggtaatattacaatgactaaccacttgacaacttgcagtaaaatataacataacagaaataacaaactccaatatagttggagtaataactaactaattatatacagttggacaaaccaatcctaacaacccccttcaagatggagtgtaaatgttagttacacccatcttggaaacaatattggaaaaaggagatggtagtaatggtttggtaaatatatctgtcaagttttgttgagaagagacatgtagaagttggattgaacattgctgaattttctctcgaataaagtggcgatcgatttccatatgctttgttcgttcgtgatagacagggttttcactgatgtggattgcagcggtgttatcacagtagaggttagcaggtttgctgtgggagacgccaaagtcattgaggagagcaaggagccatgtcaatttagaggttgcattagccattgcgcggtattcagcttcggctgaggaacgagataccacttgttgtttcttggatttctaggataccagtgacttgccaagaaaaatgcagtagccggagattgatcgacgagtgtcttggcaactaccccagtctgcatcagcaaagaaagagacctgaacattgtccttggacatactggtttcagcataggcatgtagattgggtgttgcatcagatggaaagaaaaggccctggccaggggtttgtttgagatattgaagtatcttattggtggcctgcatgtgtggaacccgagggcatgataagaattggctgagatgatttacaacatatgtgatgtcgagtctggttatagtgaggtaaatgagtttgccaatcaaactacgatagacagttggatcagggaggggttttcctttgtctttactgagtttgaggtttagttccataggtgtggaggcaggtttaacacctagatagcctgtgtctttgagtaattgcaatgtaaaaggccattgagaaatggatatgccttgagtgtttctgccgatttcaaggcctagaaaaaatgaagtttgcccatatctttgagtttgaacttggtatcaaggctctgtgtgaactctaagattactaactcactattgctagcaatgatcatgtcatcaacatatatgagtatagccataaaagtggttggtttctttttggtaaaaagagagttgtcggaaaaggactgagtgaaaccatctttcagcagtgctgagcataacttggcataccattgcgtcaaagcttgcttgaggccatatatacttttgtttaacttgcaagctgtgtttgggggtgcattatattcaggaggaattttcatgtaaacttcttcaagaagattcccatggaggaatgtattgtaaacatcaatttgagaaggacgtcctccttcaaaagaggttagatacacatcctctattcaagtatgtgtatacatcctctctctctaattgagaaggacgttgagggtgtcttggaggtagtccacttgaccatggttgatttccacggcttttctcgttaccacgagggattccttggttacctagttgaggttgtcttgcatcctcattcttgcaagacgcttctggtgcatcatttcgttcgttcccttggtttgtaaatcattgggaaccttgaggaacatctcgtcgttgctcttaattgtttgtttgattatccattggaacatcccttataccctaaggttgttcttcgtggccgttt

SEQ ID NO: 121107 - DNA, 1049 bp, Cannabis sativa
  modified_base (987)..(1003): a, c, t, g, unknown or other
taggagattgtgtttggacaaatgcttgtcttcgatttttaagttcttctgtaacaacgaatttttcttaatgaattttgcattttgttcaaaaaaaattcatttttctgaattttagaaaaataatcttttagttgcttttgatgaaaataaggtattaattatttattttttcaaatgaaataaaaaatattttaataacactttattttaatatatttaattacttatttcatttaatatatatatatatatattaattttaaacataattaagaaacaaaaaagttataataaatttcaaaaattattatcaagtttagtagcaaaattagtacagttgttgtatttttcaaaccatatgataccatctaatttcatacaatatattttaaaattctatcaaattattttataaaatatatatttaaaaaaaaaaatacaatcttgtgactttaatataagatatgaaaaaaaaaaatacttcgtataaaatatgcaattttttgatatattgaaatttttttaagtttaataattgattaatcattggaattaaatataaaagaaactagatcaaatttggaatcttatcaggtctattgctaccaatttgcctctttcatggtgtattataagagacttcaacaatatcgcgtctcaagaaaaaaagaaaggaggtcatccctacccttcatctctcatcaatggcttccaaactgtgcttcgagaatgccatctctacgatgtggagcttcgtggctaccctttcacttgggagcgtgggaaaggtacaaatcatcatgttgaaataaagttagataaaactctagttactcaattgtggctgatcaaactgtgatttctcatcttttgaccacaccaatttttcttgaacctgagattggtacccactgtaattctgttcgtttcttttgttatgaaaatgcaaggtctcatgaacctcttgttggaaattattttacnnnnnnnnnnnnnnnnntcacaagtatgttgattaacattctaaatatgaacttctaaaacga

SEQ ID NO: 121108 - DNA, 1309 bp, Cannabis sativa
  modified_base (74)..(107): a, c, t, g, unknown or other
acaagtgcagattttgaattttccaatccaatccaatccgcacaagtgcggatccgcacttgtgcggattggannnnnnnnnnnnnnnnnnnnnnnnnnnnnnnnnntattttatgaacacccctagtggtagctacctaaacttttgaaagagaattgctaaaagatatcaatccttcttagtgtcaaaccgctattggtgtaattaaataacgggtctcatataacttaagaaagttatttttaagaaatatcgctaaccaatcgtaaggtgacacttatgaaaagtgctggacactattagtgcccaataataatgcgctttttgaaatagaagtcataacctcttatttaataatggtaaagaaaattgcgttactcaagttctttggtgtttttttgcttagcatttccatgggtactaaagtattagtactataatgaggtaacatcctttaattaattagtgattatctataatttttattaaaataatatataagatttaatattgaattgcatattaaacatcgttgctaaatatcataaataccctttaacatttctagtttcttgacagttggcaatagcttaaatagtcgaagattatcaaaagattttcaactatatatattatgatatattcacctcatgtttaaataattaataccaataattaaaagatgtttgacaattgacaccatttttttttcctaagatatgcaaatatcatcaaatataaattaagtccccctactaattaatatacagtgttcaaactatatatttacttgacatgctctgtagtgatatatattaattctaatatataataggctgcttaagaaaaaaagtttgtatatagctaatttaatttactgtgtactaaaaattaaacacccactttgaatatttcatctctatgtaattattcacctaacatacaataataattgacttaaaatatctaagtatatagctttctctctttcatgtatgtacaccatctcaattatctccatgcatgcatgcatatctccccatctttaaataccactacttcaccccttttgtcacaacaaatacaaacaatatatatataatatatcatagagagaacacttctgccattcttgttcctcttcttctttaataactgttcaaattaaggtaattttttctatacatattattaagaattttgttgtaatttcagcggaaataaccttgaggattcaatcataaaatctgcaataatctcaacactttgacagtaaaatgaacataaaccaattaatctccacaatga

SEQ ID NO: 121109 - DNA, 961 bp, Cannabis sativa
aaaattggccaagacagtataaaaatagtttctaccgtgtggcagtatttttgtaaagattaggctaaaagtcagtatttttataagtttttctaatttatttaaaaagctaaagtaaactcatgcatttgcttgcattataaatttttttacttttaatcacaataaaatttataactaaaagtaaaatagtattaactaattataatttttatcttgtgactaaaaggtccgtaactaaaaatattagttacaaaaattataatttattgtaattaaatgtatttttaattacaatgcttgtgactaaaattaaattagtgacaatttgcatttaaatattatgttttagtcacaagtaacttttaactttttattatgactaaaagttacatttagttataagaaatttatgttgtgactaaaatattattactaaagataattattttgtgtagtgttgtgtcgttgacaaaggagaacagctccttccttgtcgatagaggttaacgctgtcctgcccttaatttttagtattattgtcatggagaaaaagtgtttctataaaataagcatacttaacatagagcctatagtgtaaatttgagccacttctaaattaagttaagagtaagggtacatactctcttttcttagatatgctatccctccggctatggttgggcctatggggaaagagaaatgagatttatctattgatttgaaattagatgagcagaaggaatatttgtaacaatttttatatttggtagatttgtttatttttttttttaaaagagtgggtcagaagtgtgaggaaaacaattctttttattatatagtgtttattgtaataaaaaataagattttttcgaatttttaatagactaattagtaattttttttcctaaattttgatatgtactaaatcgtactccctgaacttttttggccgctaaaa

SEQ ID NO: 121110 - DNA, 1706 bp, Cannabis sativa
cagctcagaagataataaaccggcagtggaactaaaagcacaaatgatcaagttttgtagaaaaaactcagatgaagttgctactaactacgcctacataattcaatctaagaatgttaaataacacacttttttatttttattttggggtggggtggcgtggggtgggaggggcaaagagtcactaacttataaatatagacattaacttttaaattcaatagaaatttccaagaagaagattacgttagttcattggtgtgctccagtttacgacttccttcaatggcagagtttttatcttgtgtttcaaataggagagtactgtctttaggtacctccaaagtccattttcggaaagatgcaaccataacttggcacatccttgtaatagggcttccccccggtttttggaacctgtagataggtgtgcctgcaaagaaactagcaatggcaattcccatgaacaatgcaggaatgccaaatcctagaccccacccagcattgtcttgaatatacaccagtagactgcttgatataagagcaccaatattaatcgaaaagtaaaaccaattgaagaaagatcctttctttaccctctccttcgaatcagtatcatcaaactgatctgccccgaaagaggatacacatggtttgatcccaccagtccctagcgcaatcatataaagtccaacaaagaatactccatattgtgctggactagccactggacaaacagaaccaacgcattcgggaggctttagtgctggaactgatgctgagatagtcaaaacacacattccctgaaaaaaaaaataagtaactaattatcattatgattgtatggcttttctttccttaactttccaaaccttattcaaaacaggacagtaagtcatttatcatacaactactcgaaaactgttatatgattcagaaatgattccccagaagctccctcggcattaatggtattcccatttacaggtttcaagttccaatctatacttagcgaaaagaggctaaaaattaccttttaaatagaatgctaaagaactagaataaacacttactggcaaaaaaagaataaaggctggtttccaataggacttacaataaagtaaattgtggagaaaacaccaatagtccaatatcttccccagtaagcatcagccatgatggccccgataaggggcgtaagatagcaagttcctccccaagtggtaacatttcttgcagccgagacatttccttcgtgcaactttttcgtaagataagtaacaagattagtcgaaatcacatagtaagccaaacgttcacagcactcagtacctgtaatgtaatgtatattgcaaagatttgacgaaaaatagccagtttaataaatgaaaacaacatcaagaacaaatatagattaaaaaaagcttaacagtaagagcaatagaacacctagaataaagggacaagctttccagtttccagtattctgcttcaacacacggtttcctttcaagtcaactgagccatcaccagtgtaaagcccactctcttcattctgaattaaaatactaaaacaattaagtgtctaatccaagaatctatatcagaaaaacacttccatatggctagctaatacagaaacaaatctcataaaagcaaaagatgtgattcttctcttactccctttataaaacaaacaatactaa

SEQ ID NO: 121111 - DNA, 1987 bp, Cannabis sativa
aactgggcgctctgtgtgcacctagtgtctctaggtagagttttgtccagacttatctctaaggtttgaaacttggttgaggtgtctctcatgtattctagtgcaatggctaagcaaaattgcacatacgaagttgttgggaattaaaactgatgcaagccagcatacgggttatcaacctacgcacctagtacttaacttgggccctggttgagctctgggatgtctaggtggcatcctcagtttcacagttaatcgttttgtggtcattgtgacctatttgttgaatcatagtactcagaaacgattttgttggatcttgctgcttacctagttggccttagtgtgcaagtaatactgccatatcctggaatgtggggtcccataattgtttcttctgtgtgacgtattaaaaacagtatccacgccatcaaactaatttttttagtaaacaatatatattaattaatttagttaagtttctttcaaagaaacgtacctaagacccaaattcaaaaaaataaaaaaaaaaattccaacatcataagtattaacactatgtttggtaggaaagaggaatgattaaatggagaaaaatgaagggagagagttgagaggagaggtaaaatcctttatttggtaggatggtgaaaggaagggagaggaaatgggagggggtggggggaattataaaatttcaatcattttaaatttgaaaaagatttagagtaaatacaaaataaatacactaaatgccaaaattattctttaaaagtaacaaatttttatactaataaaaatactctgataattttaataactaacttcatctttattctttcatctatactcctaattatcaaacaagacaaaggagagatactatcctctgcttcattattcatccttttatactctctgtccatcctacacttcatctttggaaattttagtgcaatatcaattaccatgtgcaataatgtatccaaatcatgggaattgtgtcagtcgtagttccacgtggatgttatcgaggttgtggggtccattattataaatagactacttgaatcggatgacattgaggtgtcaatactcaatagtcatcttctatttgaaaaatgcgaaaacaaactataatatttgtaaggctaattaatatttgtatttttaaggttcttaaaaatatttcatcaatcaactgttgtgattgttggatttaagaatttttttttttaattttagtaaaaaagtctaacataaatgaaagttcaagggctataatttagtacatgtcaaagttcgagtggatgatttggtagatatcaaagtctgggaaacataatttagtacatgaaatagtaatttgaatgatattaaacaaaagtccttaaatccaacaatctcaataattcagagggtatttttaacaactttaaaagttcaagagacataatttaatacatgtctaaattcaagaaaaaaattttaattaacttatttttaaaaagcattaatatgtgaatatgcactcaaaatattattatacctactcacagtgatattttcaactaattatatttatttaaaatcattctatttttttcttaaaaaaatgtagtacatattactgtacctaatatttaagtacttatttgcatagaaatattctaaatagcagccagtaagattgggtgtcataaaccattttcttatttattgtactgagatcatttttaatggagaaacttaaatttagggttaaatcaacattaaaaaattattattttaacactaatttttttttttcaattctaaccacaatactaaaaattaaggtaaattgagacataaatacttaatgtttctgattttatacacttaaatatataatgtttatttttggtggcaaaaatacctaatgttacaattcttttacaccgttactaccacttccgttataaattcataaatatagacacgtgga

SEQ ID NO: 121112 - DNA, 1386 bp, Cannabis sativa
gtagtggtgccaagaagagagaaagaagggagagaatagaagataaaaggaacaagtgggtaggcgtgatgtcctcttgggacttacattagtttccatgtcattttatttctgtgcgctttaattataactttgacatttacagtggtttaaatgtcggggttaacaattattttattcatttaatctaaactataattttcctatctaaaggaagcaaagaatagagtttcaacacacttagcattcaatattttctctgttagaaaattgagagctccaaaacaatttgattcctctataggttgaaccacgacctctctctctcatattttagctaccacactatagtgagttgagtagttgatcactctaatctagtgtgatgcccagggcaataagaaagaccgtaaaaaaaacagttcattctcaagtattttcaagtacggttcaaagtcatgaaataatacttttaatcatgtggaaggttgaatggctccttacgtagagtctcgtctcattgaagactaaggattttttcctttcacccatttttcttgactacttacattgctctttcccctggtttttttagtttttaagtctgcaatggcaaaggatattcacgttgaaatggttgatgaggaaatgaacaaagtgctgcaacgagatagccaactcgagatggagtttttggaactgttcgaggatattatgttggaggaggttgtctcaaacaaggcttgtgttggaaaggttatttgttgcaaagatatgctggttacgattgctaaaaagattttgactggtgtttcgcagaggttgggaccctggagaatgaaaaaatgtgatgaaggtgtgttggggttctttttccaagatgaggatgactgtaacatctttctggagaatagaccttggctggtaaatggggtggctctgaatctaaatcatggcctgtggagggtgaggtgagagttgctgactttgaggtagcaaggtttcgggtccaatttcatggtctatcaacccgttgtttgtctaatgagaacgcccctattattgctaagaaagtagggtctttcatcaaggctgattccaagagcaaagaggaactggttcggagaggctatatatgggcttggattgatgtatggctttcacaaccaatcccagtgggattcttcttgacagctgatggcaaactggagtcatggattcagttcaagtacgaaaaattatcacacctttgttttaactgcggtaagcttgcacattaggataaatcttgtcatgttctgacggctatgggatccctgcaattcgagaagcaatcccaatgtatgggatatggattaaaaatgagattggttggagcaactgttt

SEQ ID NO: 121113 - DNA, 1283 bp, Cannabis sativa
atatttcatgtaattttcacttttgactttataagatttttttttaagaaattaccacatgttgatttttatgaagaaaaatatattacaaaattatgaacagtttttcatcaattgttttgtctggaagagtattgaccttgagacgtaatacttatgcacacaataatgatatgttaatatcacctataataagtcatattatctcactcttaataaatgtgattgaaaatgttaccatatcattatctgtacaaattgtacttaaaaaatagcagctctagcatcacacattctagaagatgcatcatcaactgctttcatagaccaagttacaacatagccggcccatgggttggggcaggttgggcccacgcccaaagccctccacattcttgcccaaaaaaatggatcatcaactgctttcagagactgaccaacaatatagtcggtttgggggcaggttacgctcattcccaaagcccctacactttggcccaaaaaactcttttgaaaaaaaagggctattttgaaaaatttggaaaaaattattaaggttatgataaatatggcataaaaagtaaatactactaaatatggcattatctaaccaatcaaactaaaaatatgggtttttttttagaaaaaaacccatataaaacataaaaaagaaatctgaatttaaaatttataaaaaataaaaacttaattaaattaccataaaaaatattaaaattcccttcatatttatttttttttaaaaattaaaataaataaaactatagtgatcgccgaagttgtcactcgtgttggaaaagtcacatgagtttactgtcggcaccggaaaatttgttggagtagccgccggtgccaaaaagacgccgtagtttctgccggcgcggaaaaagtcgtcagaattagcattgtcgttggaaaagtctccaaaaaactgatttgttgacgaagaaaccggtttcttggaaaccagtttcttggtgattttttcgttcgttaatttttaccggtgacaatgccaagtccgatgactattctggagtttgatgtcggtggcggaaaaatcgccggagtagttgccggtgtcagaaaaatcgccggagttattgccggcgtaaaaaaaatcatcagaattgggattgtcgccagcaaaatcactagactaatcaccaagaaagtagttttttcatcaagaaaccggtttattcaccaagaaagtggtttcttcatcaaggaactaattttgttacacaacaataataaagatt

SEQ ID NO: 121114 - DNA, 1893 bp, Cannabis sativa
actatttatagacaccaactaccacagctgttttaactgaaaagtagttaaaacagttagagaagtccaaaacagtaagtgtccacctaagacttagtttctagaccacaatacaacagatgccaacttaaattaaggaatgtaatttgcattttaaggaatgcaatttacatttgaaggagtcgatgaatgtttaagtagtaaacttagatatttccctctatttattttgttgtaaaggattttgttacttttgaatattctaagtgggaaaccttgtaatccaaaccagcgctagtggacatactcgtttttttcaacggaacctctataatttgtttgctagtttattttactaaaacatgattacttgtttataaaataattggttacaaaaaacacaattaacaaatgttgtatatgaaaaatcattttattaaatttggaaaagacattagtaactaattactatttttttagtcattactcactaggtaactggttacttgttggccaactctattccaatttgaaatcaaataaaatatgagatacatcaacaacattagtagcaaacgatcacccgaaaaaggctaagatcttatttactaacacatattttattaattaacttaaatattgaactacttagaacatactttgtaaaagagaattaaacacgttaagtataagaatacttacaacagcgacacaacgaaataatgactcttcttgttcaatactctgaccctcgaatcttctctataacagaatattaccaaataccaaatactgaatctaaatcttcaaatctctgaatctttacagtttgtatcagtgctatgggtatcacacataacaagtgagtaatttctcattaataagaacaataaaagccaaaatatcctagagagaaaattttcaaaatttcctatataagaaagcttaataggttaaatgttaaaataataataattaatatatgattatctatattcatatggatattgggtaggaatcataggattaactcatattcataggagttgtttactaaaacaaaggctctatctctatgttgtcttgccttttggcatgtattttgatattttctctttaaaagtattggttggttttttttttgagtttttgtttttctaagggtgtttgtgttggcttcttttcgattatgcctagtagtataatgggagataatttggagactcgatatgcgaatatagaactagaagaggaggaaggtggcatgaagtttgatcacattgaaacaaaggaaacatttattgacaatcgttggtacttggtacgtaggacgatttctgaatgctcactctattgatttaaatgttatgagacacacaccatggttggtctttagaaacatggcaaaagaattagcattaaagattaaacacaaatgaaaagatcgtgcaacgactttaggattcatctcaaagattatagactctttatctattttttcaatctatctctataccatatttttagaactctcaatattttagcttataatattacaagagatgccttaagacaagatagagagttaatttggagagcttaactctctttactctattgtaattgtaatcctgtaactgttatccctgctttctagttacaattacttctaaaaaagctaacattacataaacaaaacataacgtaacaccataaaaattaaaatatgaaagaaaactattttaaaaagacaccaatggtaaaagagctaatggaaaaacataattaataatttaaagtattaattaaatagggacacgattttgttccgttaatgtattttcacggaatgtatttcgtaatgtactgtaacgtccccgcttcaagcctcca

SEQ ID NO: 121115 - DNA, 4505 bp, Cannabis sativa
  modified_base (3101)..(3101): a, c, t, g, unknown or other
tattgaaatagattttatttagggtacaaaacccaacagttttttataaagacaccttttgtgtaatttttagttaatagactattacctttattttttggaatgtaagtagctaaactcacatttataagagtgctacaataaccagatcttttcatatatgccaaaaccacaaaagagtaaaataggataatactttacatataaacactgggggacaaaagagcgtggacataactgtgctcacaaaaaataaataaataaataaatctcaaagtcattaccgagacgccactttaagtccatgaatattttttcaaaatttcacatcgaatagggggcaaagtaagtttacagatgagataaaagacaagtgagggtgctctaaggagccataactcagaaaattccacttaacaaagacatctcaaatggcctacatttgagactttgacaagtgggtggcgtgctaaaatcgagtacccaaagagttaacgcacatgccaacaacttactcgaactagcaaaaatgcaagccaccattggcaacaattaaatgttatctttaaaacttcgtgttacaaagataataagcatcggaataaaatgagcgccaaaaaatatattaaacttaagttctaaagtcgtcgagatatagaataaactaagttatgtatgctcaaaaagttccaaagatgtgaaaaagacttgttaatcctaactaataagcactccacaacaggtgaacatatacaaacccacacatgtgggtcacaacatatatgcacaaccaaaaagtgtataagaagaacaagagaatttaactctgttcacggcagaccttacttgccaaccaacttgagcaagagatttaactctactcaatgatgagtttgagaaagggatacaactctactcaacgctcaaaacttaagcaagagattttaaaactccgtaaaagtttcaaattcaagcaagagatttaactctaatctgaattaaaaaacttaagcaacaagttttaaaccttgaaaaagtcccaaaatcgagcaagagacacaattctactagacattcttcttgagggtcccatggcacttctagagggctcaaaaatgtcaaacaaccatttggtaccgggactcacacacccaagtgtgcccaaactagggttcatgggcccgcacgagcgttttcaccttagaaaccttaatccgctaaggaaactaacaaggaatttacttatttgggcataaaataacttaggtttgtgcataaaatcaacatggcatcaaaccctcaagaaaaaaggcatatgcacccactgccatatggaaatggtagtgccaatcaatattaatgggcactatcacaaggaaatagcagtgctcttcaattttgatgggcactgccacaagggaatggtagtggttgcatttttaacatacatgtatcaaatacaaatgataaaagtctcctaaggctcataaagcccatatgcgaccactgccactctctggctccaactagtggcagtggcctcccgttagggtttcagacatcgaaatgaggtttttgggtcccaagacataaaaatatgactcagcattaaaaaacaagtcaaaacacacaccgagggtctgagaacatgcatgttcgagtactgccatttggccatggcagtgctcgcaattgggacaagacaacataaacttcctttagtaaaatgggcataactctctcaatttttatctaaatgacctagttcaacttgcattggaaagataatttcaagacggatcaaagtgtgtatcatagtcatggcctaattctaaagttatcgggtccaattggctcagaaggaagactggtatattttactcgggaattgagtaatgtggttaagtgaagggtgttggaggacactgctattgcccatgtggcattgtatgcgagcactgacactccaaaatacatgttttcagtacttatcaccaaaatcatgcatttccagccgagaggtgacatcccactactctattttaaattggtgcatcctcaatcaaaaataaccagtttgttaatatttgtaggatattagcctagaaacaaggagatttttatagatatttattttcttgtaatattttaatcattaaaaagagtggtatacatgatttgtaagtgagataccccgacatgtggggggtcactaacaaaccctacatgttatatattgatcaagtagagaggctaggaaagggactttttgggaccttcttttagacccttcttcttcctttttggatcttcttcttcgaaaccttctacttgaaacttacttgacggcaaccaagaacaccatacacattccttcatatttttcattgagtccaccatactcaatcgacaccaagacctcaaacaccattcatacacactctattttctactttattggtttattgttcccaagaaccatacaactaccaactttgatcaaatttatgaatattgagtctcccatgagtcctatgttcgtgagtctcgattaagatttcacctaaaaaatcatttgatgtacttttatcaacacactcttaagaacacaattgtggtgtgtcagatctaatcaataaaaatacaagtagacgtagtcccattactatcgcgacatgggggtgaactactataaatctctagtgtccaatttatttattgtgattttattagtcaaaatttattcatcgtagtcctctatatttttacgatcttcttagatcagttgacgaaaaatcgcgtcaacaaaaatttatgtcttagtatatttaaaattgatccccactttttttttttaattattattggtttatgaggtattatgtgttattcgtttttactcaatttgttgtagaactagttttgtttttaattatttttcaatgttttaggaactggttttctctttgttctttagttataacttatttgagttattctgtgttatttgtttttattttatcttatagaaccaattttattttaattataactggttcgagttgttctatgttatatgtttttattcattatgttatagnaccagttctattttaattataatcaatttgagttattttgtgttatttaattttattcattatgttataataaaaccggttctattttaattataacagatttgagttattatgtgttatttgtttttattcattatgttatagatttggttctattttaatttatatctgagatatctaactccggtaatttttctaacaatgatgataactctaatgatttttccagcaccaattaattttttggtgattattctgacaccgataactcttttggtgactttttcgggttagtgtctgctccagcgacttttttagtgatagttattattataaattttactaactttatttatagtgttttatttaatttctcatattttaattattatttatttttaattcacattttttttatttttttattatttatttctatcatgtaaaagtcaacttcattatttttttccatatttatcaaaaaaaatctcataggtaagagtccaatacagaaaattaccacgattcttatccttataaaacgttacgtgatccgtcgggtgcattattccttcttcctaatttttgttgagagaaaaggaaagagagttgattaggtctcaaatagggtgagtggcataattgtaaatttacatgaaatgtatacccttcttaaaatagaaaaaagaatagatgacaaggatctttaaatgacttattataaataaataaatttgattgtatataaataaataatcttcttcccaatgagcctcatcctatgttatccaaaacttttgccctatctttaaactttggggttggctccacattccctcaaacaaacacaatctagtaccgacttttcaaatttcacactcaaaaggccaatctatgtcctttggaagaattatgtaagattaagaaaccaaaaccattcatcacgtgggacccacacctactttggcaaatcttgacatgccacctcacgcacttgcttgctgtactctggttggtcctccccacacgtgtctaccatgtgttcatttagacttttctttctttccttttttaacaaaacttagaatttctcttattttcgtgtggatggtatttcacatttgttttagggtttaattaggggtgagcataaaattttaaaaaattgaaaaaatcgtttaaattgacctactgaatactgttagaatcaaaatcgacgaaactgaaaataaaaaaaactgctaatggttaaaattaccattgaatggtcagtttttttttttttctttttgtaataaaccgcttgaaaaaaccgaaatcaatatatatattaatatattaagtttttttttttcatgtattatagttactaataatatattatttttttattaatattaaagt

SEQ ID NO: 121116 - DNA, 2110 bp, Cannabis sativa
cattgcgttaggaatggtctgtataagaacttcatccacatggcaacatttttctactgatttataataatacaaacaagaaatttaaagttgaagcagacaaatcaagagctaattatggaacaagttgtctcatgtgaccgctctcttctcttggttcccaattaatgccccatgagcgcaaattgacttagaatgatatatatatagggctctagagttatatttggaagttaaattttagttggaaaggaaaataaataaataatggaaaaagtatgcaaaaaataataaattaaaacaaaatcaaatttttatattccaaatgattttttttttttgttaaattaacatttcttttttccatataattctttatataccatgcacaaaaaatgagattttttaatttttaaacttcaaaacagttttttttttctttttttctttttttttttttgcatttttacggaattctacgtaaaaactcttattgtaactagcactgcaacctaaatcacaacaaaaaatcgtatagcaacccacatagaaaccactttagaaactctaaccgtaaatttgaataaaaaaattttaaaaataatatatgagataattctccaaaaattaatttattttcacagtttattttacctatatttttcttatctatttctttctctactaaaattaaacttccaaatataggtttaagtaattttatgcatatgcatttggtttcttataaatgtagttttttgaaatttttatataataaacaaaaaattataaaaataattgtcaaaatacgttaaaacagaaaaaaaaaattgatttttattaacaaatatgcgttatttagtaaaaataataaattatttttttggttgttttataattatattatagttgacatgatgttatttttctaattgttttttattattttataatttatttatagttattgtgagattgatttcttcattttttagttttttttgagaaaaatctgttattataaattaaaaggagtcatttacatcaacaaagagaatagcatagggaaattcctcatgcgagatacaaatattatcctacactaaagcttgttttgctaatccatgagccgcctgattggcagttcgtttaatatgacgaacacaaacttgaggtagatttgataaatattgtttaatatctatgactaaatcatcaaaataaggccttgaagttggtgtcacccaaccaatggtgaccaacatggctggaataaaaatagccggatcggctttgcttcgatccagacttcaactcaaaatagtacccaatcacataaggggtggaggccaacctagctccctctacaaaacaaacatcaccgacagatatttaatactcttcggcatgagttgtgttaggcacatcccaaagtaggttgcgacatctagaagtaatgatgaagcgacaacactgtcccatgttctatgtggcgccctgaccatgctagccagtccaaagggggcttatgtgcactacagttcttacaaggaatcttgcaccaaacacccccaacaaggtcaatagtaatgaccttgtcaaagggcttactagaaagagcggaagctggcaaaacccaccttgtcttaagtggcttcgaatcaaatatctctaggatgggagactgttctaacacatcatctagtcctagtacagaaggtgagccaagcctattcaacagattgcctcaagcaccataatggcctaaagcacggttagggaggattgaacatatcctaatctcctccccctcaatggagcaacctcctccagctcggattcttcatcagagcttccagtctctgaatccacctctggctcagcctcgatacaaggataggcagtctcttcctccactatgatttaaccccttgtggctaccatggccacatgtagattgtacgagggagccctacgcaaagtctactttgtccttgccatcagtacgaggtgagtagaagacctacacaactgtcacctccctaattcaacactgagcactaactggatggaagaaataaggggaggtgagcaacctgacaaagctaca

SEQ ID NO: 121117 - DNA, 806 bp, Cannabis sativa
atttgttttaattatataaatattaacacactattttttttaaaaaaatcatatattaatataaataaacataatatgaaatttaaatttcttgacaaaataaaaaatgttacataaatttaaaaataacttttaaaataacgcaggcaatcgacgttgcatatttaggttaggcgtgctactctctctctctcttccatggcgaagaagaaatgagttgggcgaaagcctatttctcgacaagctgaattggatcccccttcaatccaagattgtgagaatatagagggtaatggtgagattgaaaaagagggacttgacctgattggtgagctggtccaaaatgaaggaagtgcgaaattagttcttgatagcaatcctggacgtggaagctgtaattgatcatgggcggaggaggttaaataagaagactttcaagctaattcacaccagcaatgaaagtaatttacttttggtaagattgcttatcatgatgctaaactatcgtttatggaacctctaattcatgaaggacaaaagattgctaaagttgatgtggaggaagtgaaaatgcaagctgggaattggagtactgttgttatttgtatggttcttggtgcaaaccctccatttgcagtctttgaagggttcattaggagaatgtggggcaaattggggatagttcaggtggtgagagtgaatgcaggattcaccattgttaagttctgttaggtcattttttggcaatttagttgtcaaaatatttcttaattaatgtgcattttattgagcattcaatttgtttt

SEQ ID NO: 121118 - DNA, 705 bp, Cannabis sativa
tactcggcataaaatttaggtatttatgccgcaaattactcttttttttagcaaagttaatactatctactaataataattgcatattgtttatagcaaagttaataattgtagaaaagacactaaatataataaagttaaatagcggtataagtaactaaagttttatgtttgtaagcggtatagtacccaatgtttgtgaagctataattttttttaattttgtccgtacaaactatgctattatcttaaacagagtacatataaaacccgaattctagatcattggatttaaatagaaatatgtagtatcaattacttttaaatattcttttaataaattcaaaacatatttatgtcactaaaaataaatattaaataaatatttaaaactgaaagaaaattacagttttataaacattagatacttatgtcactaaaaataaatattaaatttatacagtttacaaacttaaaacatatttatgccgctatttacccacataataataaagaagattacatggcaatttgtttcaatttggtggtgttgaactaataatgtccatagatattattacaaagaatgttaaaagagccttttgtttcgtctttggcaatgtcctaaacaataagataagctcaccattctctctctcttctctgaatgtaaatatctcacttccagttccagtcgccataacc

SEQ ID NO: 121119 - DNA, 1381 bp, Cannabis sativa
acagtatttttgtaaaaaaatagccaaagttagtataccatataaatttcccaaaaaaatataaaagaaatttcaatattttgtatgggaatttaaaatagtatatcccatatatgttaagtttttattttaaataccatatttttttcttattaagctttcttattatattcatgtaaactagttttatttttccatatttatgtaaatacacctattaggagacagcccataagccaagaatatcggcccaatctagtctgttacctttgtcgccaagcctaaagttgcatagttgcatctacatatgcgggaaagcactgcgcacagtgcgcagtacacaaataattaatcaactcttgctgcacattattatttaaataaataaaaaaaaaactgctgagttatatataatattatatatttgtgtacgtagttattatttatgtcttggtgaagtaaccataagcagatagggatgttgggtagccatgaaagtcattccactcaaccccctaaaagagtaaatatataaatgaaatcatgattagtttaacattattattattattgtttatatcatatgactcaatttccaccaagggacaagtctctagctacgtcatttctttaaccacttgtttcatctttatccactgctctgctcatcagtccgaccaagaatttttaatatatataattaatcttcaactcatcatccaaaagaagtttcttttcacacctctttcttcatgtaaaaatatattaaaatatcactacacaacattcacaggggtatgaaaatgactcctcgttagctctaaagtactctaattacttaaaataaattaattataatatgaaggtagaacaaccaaaaggataaactttgagaaatgtcttttacgtctacaccaactgtgctgtaacatgcattatatgttagattaactattttatattgagttttttttttttgttttattttgttataataataaagtgtagcagccaaagacaacttggaatcgatcgatagctcatataaccgctcaaatggatcatgggacaaaactatataaatataatgagtattataacctgatataattaatttgaggattttagacaatatatataatatcttttctactgccacacgcagtactaaaatcaaatcaactaataatttaagagtgttgtgtttgaaccttatccttttttttttttttttatcacttccctccctcacggcagtttttaaatgaggaaatgtagtttagtgtgtttaaatgtaaaatatattgttttaatatactactaaattagaaatagtataggaaaattttacaatgcactctcttaaaatagatacattaat

SEQ ID NO: 121120 - DNA, 927 bp, Cannabis sativa
ggtaagatttgttgcttttttggggtttagctcagaagaaaaggagattaagaaaaatcaatgaacctgatgaaaaatggttactgtgtgactgacttaacactaaataatatatcaaggttaatgacaagtctagctcacctgttcatattacatgatatatattttatataagatttgatggggaaggttgtttgaaactaatgtccaatcaaatgcaatggttatggaaactggaagccgaataacaagagtcaccactcaccgccataaaatagggaagagcccaagtgatcaagttttaatgatattttttatagctgttttacacaaattcagggtcatatcatgaattattatattaacaaataataataaagaccatttaattgaagctttgttctgaaaaaaaatatgtattcactattcatttggtatagtagaaaaataatagaacccaataaaaattaggaacttccacattaggattttctctggtttcaagtgtgttgttaagaagaaaaattgaaaaaaaaaaaaacgtttttttcatggataatttaaaaaacgtgtttaaaatctcatttttgtctatgataatttcatcaaagttgatgcccatataccctttcttttatctcaggtaacattggaaagtgacacaacaaatgaggacggtgacatttataaaagttttaataaaaattaattatattgtgataaaatagccgttgtaatagttgactgatgaaatatgtaaagtaagaaattatttcagtaaacaaaatcatcttcaagaaacttgtgagcttttgcatcaaaagataagcatttattgaaaaatgaagtggttaatgctccaaggaggcagcaattatcactgcaaaataagggtttgtctacagtgcacggcttatatgccgtgca

SEQ ID NO: 121121 - DNA, 1176 bp, Cannabis sativa
gcgggcgggttcgggttcaacccgaaactcggtggccataaaaaaccaacctgcgaacccgcatgatggggtaccgggttgaactcgacccgcccgaacaaaaccaattttttaaaattttcgggttgagcgggtcgggtccaggcgggttggtcgggtccaggtcaaacccgatcaaaatgttcagtcctacatgtaagtaatagtatattgaataattaatttttcaactctttatttgcaattaaaaagcaaataaaggagtgagacgatgatttaattagagatatttttgtttccagggacaaccatatcatccttagcattcctcttagctcatccatgtgtgaggatgtttggtattggaaaaagaaagcatctggtttttactctgttaaaagctcatatcagtaccttcaatatttgagaggagatttgaatgttcaattggaatatgacttgtggaagcaactgtggaagctcaaggtcccttcgaaagtgatctattttgcttggtgtgcactgtcaaggtgtcttactactcgaacacaatcaagataaatatcaagttcatgtatcagcaactatgacgagattgagcatatctccattgatcaagaacattatgtgccaaagtaacaacatcaacagcagaccgcgagcaattcttccataaaagctcattacaagctttccaaattgaccatcccaccatcagaaattcttctaccgctccacctcttctttttttaccaaaatttagcaaaccagtcactaaaaaatgtagcaacaaaaggaaaaagatcaattgcaaatctgttccaacatgatcgaataaggggaaaattaataagaacatggagaattgatttaacctctccactgcagaagatacactgcatatcaacagggacatgcttgttgtatatctatttaattaaatttaatatatttatcttatatagttgcgtttttatttcactcacttgatcatgctaaaatacaaggatttcaaaagctatcaacgaaggattttttttaatgagatgggagagtgtgttgttgaggtagctttattgtctaaatttttggagcaatgttgtcccatgagctatcctgttcgaggaggtgtcgctgtcgattgtggattgctgcatcgttaatcatgtgtgattt

SEQ ID NO: 121122 - DNA, 2361 bp, Cannabis sativa
tggaaaattgccaactttggcaacgtctagccgatgccaaccaacaaaacgctgagttggagagaggcagccgcagccagggcaactcaagaaaatgttgcacaaaaccaacctgatcttggagtaagaagagcacgaggtagaactcggggctcaagaaccagaaggtaggagatagctcaggaaaatccctagaacactcaggaggagaaacctggggaaactggggatgttccagaggacgaacaacctaacaatcaggcacctcgacaagaggtacctcggagattctaaggattcacaacccaagggaatgaaaacaacgatttacctgaatcatctcgtagaaatgacaacttgaggcagcccataactaaggaaaaggttatccctcgtaataatgagagaaatcctaggacacaacctagggaaagtgggttaccaccgatgcatccttaacgtccttctcgcactgagaatgaggagacatacacgcaccctagcagagggtgagcatttaacctcccccgaaagagaagaactatgcaagatgaggcgagtgctagcttgggacattcaagatcctgagatcacagtcgatctacgtgaggaggggatagatctcaacgtagtaataatcgagaaagtatgagtcatacaaggagtagtcgatttgagagctactcagatacgaggtccatgagcaaccatgaacgaagacaaccagatcttcgtgaaaatttaaatcggacacaacctaatttttgcgagcgcttaaataagaatgcacttaatttacgctaacaactcaatgaaaattgaaagcaagaggatccaatctaattacgaatcggtgagttggaaaataaattcaagaaatacataaatggggaatatgggaaacaacctggttacgactcagatgaagaacacgaacctttccatccaatcattatgaactctaaatttcccaaaggatttaaaaatcctcacgtgtcgccatacaatgggactacagatctggtcgctcacctgaacaattttaataccataatgtgagccaacaatttcacaaataacttatgttctattttattccccaccttgttgactggggcagcgagcagctggttcaataaattcacccatcactcaattaactgacctgaagcgtcttcccttactaacgtgaagcagcagtcgggcgagtcacttaaggcctacttaagtcgtttcagtatagccgctgctagagttagaaacatgaacgacagtatacagcttactgctcttcaagtagggattacgactgacctctcgacggctggaggcgagctgtgggatgacttacaaggtttcctagtgaaaaacatcagtgagttcaatgaaagagctcaagtgtttgtacgaaaagaggaggcaaggagcgagatgagattgttaaagactgactagggaaataaacccagcactgtctcggtaagcaccgtctcaaaaaagattgacaatctaggatgttctagcacaaagagaaaagatgactctaaagaatcatccaaagagaagaagcacgataagtacgtgccaatttacactatttacaccgaacttaatgaaacttgggaaaatattttccttgcacatgagcacagggttgaattttgcaagcctgagcccatgagacatgcaaggcataaatgggatccaacaaaattctgtaaatttcacaaggacataaggcatacaatggatgaatggcgtcaatggaaagacgagatagagaaccttatctcgcgaggttacttttaacaatatgtaaaacgacaaggtaatggacaaaaccagccaaatttgcccaataactcaggcaaccaaagattacaacctccttcggtagaaggagaggacattttggtcatctcgggagggttgcatctcgctggagaaagcaataatgtccataagagatatatcaaagaagtaaaaaacgagtggtcagttttcgttccagaatcatctaagaaaatcaagactgaagaacctccaattgtgtttttagaggaagacacaaagcacgtgaggtatccataagtcgacccactcgtaatcccaatccagcttggcaacaaagtacgcagtagttgcagtcgacttctttacaaaatggacagaggccgaacctctagtttctaaaacttgcaagttcttaattttgtcatcaagaacataatctcgaggtttggaataaccattaaaatagtgtttgataacggaactcagtttgatggagagttattcactgtaatctgtgaaaggaacaaaattattaagagcttcttgtcagtctcaaggcctcaagca

SEQ ID NO: 121123 - DNA, 874 bp, Cannabis sativa
  modified_base (819)..(825): a, c, t, g, unknown or other
agctgagatctttagtcagctcggccaccttcttcttagcagcaagaagttgcttgttaacctctcccagttccatctggacagccccaagctggatccttgcttcatggcatccttcctggccaggtccacttccgcccacatagtattggaaatggcagcattcttagagggagccaatttatccctggaataagcgtaagctatctttagacaagtttgtacagagaaagaatgttaaaatctgaactaagtgaagaaggacaaaaggaaactgtcaggaaagacttacccttgcaaactccttcagagctcctcccatcaccaactcttgggaaaggtcattgtctgccccagccagctgcttgttcgcctcaaggaccgaccgagtcacataatgaatgagaatttctttgcctcttttggttttcgggtgcagtaccggaggtggggtaggtgccttgatcagctaagatccgcccttcgattgctctggcctatctgagctacctcttcgagaatccttggacttagtcattctcgagacaggagggtccacaatagttttttccttgagagatcaatgaccgcctcagctggtgtcttctccatagacagggttgtctcaccgcccttgggcttcttagccggaggagataagcccgagcttcctcccactctcttctgcacgaaataaaagcaacatggttagcctcacgcttcagttgaatgggttcattctcctgatgaggtccctcagcccagccaccactggacagttggaattattttacctagatctagatttactaacaagtnnnnnnnattaacatcctaatatgaatttttgaaaacaattaaataaacacatata

SEQ ID NO: 121124 - DNA, 550 bp, Cannabis sativa
taggatcatgggttcatagtggatatcatttgacaacatcaatagtagcaccacctcttttaagtcttccatatgccattggatttcttggatggacggctgggattatttgtttggtcatcggtgctttggtcactttctattcatataatttaatttctttggttcttgaacaccatgctcagctcggtcgtcgacatcttagattcagagatatggctcatgacattttaggtaactttataattaatattctttttatttaatatatatatcatatatctcttacattttctattatcttatattatatatggttatttcgaaattcttagtttatttgatttttttttttttaattttttcttttgttaaagttaactaatattattaaatcaattaatattaacttatcaataaaattagataaaaaaatatcaacaaaattagataggtatataccattttggaccatctgttttacaaaagttaccaattggaccttgtattttgttaaatgacaaaatggaccttgtattttctaaaatag

SEQ ID NO: 121125 - DNA, 2065 bp, Cannabis sativa
gaaacaattgtgggaatatgttagagattgacgctgaacattaaaacctgttttatcaaaactagatgcttctggaagattgataaaataagcaattgaactgggaaaatccttatgggagtaaatcgatggcaaattaaggattgtaaactccatcgctgatgtaatattttgaacttcagttgtgaataaagtaatcatttctttcgacaagtaattataaagtatggccctttaaaattacttgaggggcatatatgtatgattaaccgaaatttatctggaaatacatgatataatgcaaacccacactttaaaaattgaagctttttaaaggtaaccaaacctatttgacaaaaaaggggtcgaactgttataacttcctgaccaaatctttttgacgagagaggggtcgaatcgttataacttcttgatcaaacctttccgacgagaaagggatcaaacgactataatttttgattaaaaacctatctgacgagaaaggaaaatcaaaaattataaatgagatataactcataactctcgtataaagctgaataataacggctcacactaaaggaaagtattaaacgagacatcaagatgtcttggaaaaagtacttaaacctaacacatgggtagaagatctaactactcatgaaaagcaataaaacatatatacaaagtgacaaggctattaagaatatattcaagattgcttgtaacagattgtaactgattatcgcgaggcagaatcaatgactgctcgcaaatcgagtgcagggcaaatgataaactgctcgcgtataaagtaggctattaactacttaacaccgaagagatatacaagcggtggaaacccctaaaatactttgtgcatgatcaaaatatgattgtttaaattgtgaatgaaacgcaagcaaacaactacatattgaagttcaaacataatagtacgaggcattaaaagataaaataaaatcaaagttttccatccaacctcacaaagttgtctttacaaaatgtgccacaaggggcaaaccattgtctcggctctaaggtcatttccttaaaaaaaataaagagataaataaaaaccaagcctacattgtaggagacttggatagatcttcttcttccgctgcctcggcctcttcctcctccttcctggctttttcacagtaagcccaagtttccgcttcctcctcctccaagaagcttgtgtccatgttgggatttgccatcacggctcgataaacggtacgaaggccgaccttattacatcgctctgtggttccagcctctttccctttgatttcagcctccttccctttgagttcgacctctttctccacgagcaccttcttaagttcattgcattcatcagacttggtctttgcggctttctcggcttcttcaaggcttttcttcgacctctcggcttcctgtttgagacgagtgatttcctgctgagtgttgttccattgtttaatcacaacctcacgttgggcaagtgacttttggacttcgccctctaggtatttgagccgctccaggaatcgctgatgggaggaaaaagaaaggaaagaagtctggagaaatatgagcaaatgaacataagaaatagggggaaagaagaaaggaaaaataatatgaatttatacaacgactttaccatgaaggcatactgcaagttcctcgagagcgtctcttccagattccccagattgattagatctcaatcgtgacggaggagagccttgagtttgcgccagtaggcaatcccaaacacctaggcgaattccgagccagccttacctactgcagcagacaatgtttcaatggcctggctcgaggagggagaggcatgagttgtctcagaggaggtgctttggcgttaggatcaaccagaggaggagtcagctcatgggtctcggttgctcgaggtcaataggctcagaaactttcttctttttatgggtaatggttttcttttgccttttggaatgctccacctcagcatcggtaggaacccctgggttggttctgttgggttttatgccct

SEQ ID NO: 121126 - DNA, 540 bp, Cannabis sativa
ttcaaattattattctgtttagtttttacttttccatctatctaaaagtattaactgccaaatagacatgtgtacatgtatgcacaaatatacacatagaactttattaaaattagttttaagatatttaaaaaggtaatttaaattaaaaataaataaataaaataaatttttataaaataaaaaacatataatgtatatatataaatattgtagagaatggtgaataaaattatacattgtattttatagaatcgtatttatatacaaagttgggagactaaatgggaaacaattaaatacaaatagaaaactactaatagaagttaccttaatttttacaactaatgtatagctaatattctaacgctctccctgaagctggagcatagatcttaatcatgcccagcttgttataaagataatcaacccgcaccccattcaaagtttttgtaaaaataacccataattattctcaggtcttcacatattctgtggagatcagaccttggttgaattttctcacgaacaaaatgacaa

SEQ ID NO: 121127 - DNA, 3179 bp, Cannabis sativa
gtaggcgtgtaggggtaaaaatgtaataaaatgtgcaaaatagatttttggtgtaaaaatttcttaatttttttttttgtttttattatttttatatattatttttttcagttttttttttttttacaactattaacattttatggtgctcaatattatacctgatatgatatggtatccaataattgattagtaatattttttttatcttttgtgttttttttttcttataaatgatctttgtaatattttttatataattttttgtactattcttgttatatggcatcctaaaatattcaatgccaaactaattcatatccacaataaatgattaataatttttttttatcttttgtgtttttttttctttgttttttttttttataattcatataccaaactaattagttagcagttttctaaatcatttattaaattaaaatttataggagttgatattgaaatgaactaataacagtatgatactttttgtggtgcttgacaatttaatgtgtcctttaacatttttataattaatatgcacatatgtttattaacttcgattaaaattttaatttttttttatattattataaataaatttgtaagaacatctccaatgtgatataaaaaattgtattatatttggtgaaagaaaactttgtgatatatatttatattaatttttagtattatgctccaatgcacatattaaaaaacttgatgtaattttttttgtttttcttttattatgaattattgttattttttttacaattttttttttttgtatattttttttacaacaactcttgtgtgtttttttatgtatcataatttttttgatgaattattttattattattaattgaacaatattatttgtcatcttaagatgtccaacactatataaatatgacacctaataattgcttagcagtgatcttatattattcattaaatcaaaatttgtgagactcaatattgaaatgcaccaataatagtatgccgccaataatggtatgccactatttatggtgttaattaagtacctcccttggtatttttcttatcatttctaatagatgatgtataatatttgagctaaaaaagtgagtcaatattatatttggctaaaattttataatattgctccaatacatttatattaatcattttagggtaaaattaattatttttttatagataagtgtaaaaaaatcaataaaagtattaaatttttattaaaagtatatataaaatttattaaatatataaataaaatgtaaaaaataattaattatattaataagtggcaaacgagtaaataaaaatataatatttattatgtgtaaaattggctgatgctatattttgtgccaaatttagcacaatttttaatatgtactaaatttttatactcaacattagaattcacttttatgaatttggactaaaatatacatatacatcacttttatgactcgtataggctttgctagcaaatgggtttaactcattatgggttgtgtatctacggttcactacacagtcgttcataacggccatgtgattgactctatctccccatccagaggtatccgtcagggagatctgctttctacttatcttttcatcatatgtgctgaaggcctcttcgctctcattcagaaatttgaagctaatagacttattcaaggatgtcgtgttgctcaacgggcaccttctataacacacatgtttttcgcggatgacagctacttgttttgttaagcccccggccagaaattcaattacacaaagtcttcgatcttcttcagtcccaatactgagactaccattcgtaatatggtttgtgatacactccatatgcctgaagctcttgaaggcagtctctatctaggtcttccaaatattataggccgcaacaagaatgttgtgcttggctttattaaaaataaagtcattgctcgaattgacagctaggatggaaagtttctttctcgtgctggaaaagaaatcttactcaaaacagtcatccaatctttgccaacatatgctatgaatgtttttcttattccgattggtacttgtaatgagatagaaaaattgatggctagtttctggtggaagactaactctagtaaagggtgaggcattatctagatgtcgtgggatcgcttagcaactcctaaagaagaaggtggaatggggtttaggcatctccatgattttaatctcgccatgcttgccaaacaaggttggcgattattgtgcaagcccgacgctcttgttggtagagtctacaaagcaaagtactttccaaattctgatttcatttcatctgatctcggacataacccaagctttgtgtggcgtagtatttggggtgctaagaacttggttcggcttggggctgcccgtgttattggtgatggtacaagtactaaaatcctcggttctccttggctaccatcaacaagtaacagatatgtatcttctacccatcctgggcttagcacacatactgttagttcactatttgcaacaaacatgttatgttgggatgctgaagtagtctgtgacttgttttcttcccaagaagctgatctaattctcaacattccactaagctctactgctagacctgactgctggtcttggacagcagaacataatggaaagtttactgtgagaagtgcttataatcttctgcagagtcaaaaaccagtcagtccaaggccaaacaactctggtttttggcgtaaattttggcatttgaagatacctcccaaagttctaattttttgtggcgagctatagcaggttctctcccaacctgtgcgaatcttgtcactaaacatgtcccaatttcttcaaattgtcccgtctgtcaaacaatagcccatgcactgctgtcttgcgattttgctgaagcttgttggaatagttttggacggcctgtgctgattgacttatcttcctcgtttggctactcgtttgagcagctgctgcacacttgcgatactgattttatctgtcgtgcaacaactctttgttgggccttgtggaaagcccgaaatcaagttgtctggaaaaaacacaagcctaatgttaaagaagttatggtcaattcttcaattactcttgaacattggaggaaagctcaagataaa

SEQ ID NO: 121128 - DNA, 1040 bp, Cannabis sativa
gtgaacaaaaacacacaatttgttcaaactgacaaacacaatacgagaaacatatttggtttaattcaatgtctttctcgagtagtctgtggattttactctgtttgtgatgttctgttgaaataagttgttggtttgttttgtttgtgatgtactgttgagatttgtgaggttgtatctatggttctgttaggtaatatatggttcatgtgtatttgtgttaaaaatcttcttcttctatagaagtgttaaatgttaatccttattctcaaattaactacccatctttctgtctattgagaatcccacgatctcatttcacttcttgttataactcctgatttagataattattcgattcaagttagggtagtttctctcattctgtaccactaaatggtttctacccacgattcctcaattgatctaccaactatgcgaccccatgaaacctcgatcacatgattcggtatatgacccccattatcggtttattcaccgtttgttcctttattctgttaattagaagtccctgctattgtttctggggttgttggcactgctccttccactattatccaaccaactttgaaatccaataaaggaaaaggaaagcttgtaattgcatttgagtcttctactataactaagtccttggatgtggctctaactcaacaggggtcgagtaagggaaataatactcaactaattcacccaatatcactctctcctactaagcactcccaagaaagaactaaattccttggtatggataaaggcaaagctaaacttgttgatgaaacttcaccaactgatacttttggaactacaccagacatcattattgccaagagactgaaagctaatgaggataccaccactactaaatataatacaagaaatgaattgtattcagcattactaaagtcttatgtggttttttgttgtccttttattagtttagtactttctcatttccatcttttttatgttaagtctatgtttttcagttcttattggtgctgcaatggcaggctgag

SEQ ID NO: 121129 - DNA, 1436 bp, Cannabis sativa
tgttcattttacaagcacttttagcgaaacaagccaggcttattttccaaaatcctcattctctccttagtcgcatcttgaaggttcgttatttttccaataatagttttatggaggctaacaaaggtgggatgtcttcccttacttggcaaggtatatattggggtcgagagcatttaaagaaagttttaaggttgaaagttaaagatggtactagtataacttgctattcagattcgtgggtgactggtaaataagtttttgtgcctctctactgcagtaaaaattcttcaaacactgtttcaacttatataacaatagatagagaatgggatctttcaaaattataagatgattttagtcttgtagatgttgataatatcttgtctattcctctttcctttcatttatctagggatgaatggttttggcactatactgtttgagaatttacaatgaaatcagcatatcaccttgcttgttctagtggagaagtttcacagtcatcatcttcacaaacacatgaacaatggtggatatcttaatggggtctgaatcttccctcaaaagtgattttttttggatggagggccattcaaaattgcctcccagttgctgcatctttgtttaagaagaaaactctttcctctgcagtgcgtagtttgtgccaaaatgctttggaattagtggggcatgccatgtttagttgcaaacatggtaaatcagtttggcatcatttggaatttacctttgattttcgttctgctactggtttgaaaccagatgaatttttgtttcatctttcacaaactcataccaaatctaaattggaatgatattttgcattatgtggtacatttggtatgatcgaaacaacattcttcatggtaagtcacctcaaaaatcaattgaaatcatgtaacaccttactagtttaggcataataacgtgattttaacttaattgtgcatctcgttgctaatcaacgagtttattgaaaaaaatatgattaattaaaacttaattttaactattaataaatactaaaataacaaacatatttaaaatcgggatctcgtttacaaaatatttacaaaagtttcacagtgcatagtacaaaagttgtcgcctagcgactagacaaaatacaatccagctatcccgaagaccgtacgctccaggcctaaccgtcccaacatgtacaatcttcatccgctcactctcacggctactcaaccttagccttgcccttacctacacatgtaaaaaatatctatgagtcaaaagactcagtagaaaagcataatcaataacataattataacatggattataatcaggcacccgtacacccaaccataaccctatccccgtgtctaacatggtactgagtctagaacgttcgcatgactgtaccattaaccataatatcagcc

SEQ ID NO: 121130 - DNA, 3787 bp, Cannabis sativa
  modified_base (26)..(34): a, c, t, g, unknown or other
  modified_base (3757)..(3761): a, c, t, g, unknown or other
ttaaataacatacttgttagtaaatnnnnnnnnntggtaaaataattccaacagacccttcagtgtattctttggttcttagtctcgaaagcgtacacttcatccggaagcactttaacttgtgctggcgtggagattctgttatgaggagtttgttaagtttgttaagtcgttactaacttaataacttagcacttgcagccatcgactttaagatctatatatcttgcacctataaataccatcaacacttattatttcaaagaagaatgagatcagacgagcttcgagaggtgatcttgacagagaaagattgagatgtacagagaaaagagagtgattgactttgagttttgtataagaattatttgtagatgaaggagattcttgggtaagagtgtgagaaataaatactttgtgagaatccaacagagaattgatctcgattatattgtaccctgatcttgtttgaccaataaagaggatttcagcggtattccagaactggagtagagcaatagatcacatcgatctataggacttgaactagtatatatcttggggttgattttgttgctttattgtttctggttttaatactctgttcatccctgtttaatctcaaattattgtgtatgaatttttaatcttgtcattactaattgtttgttgattaagctttagttggtttgattctgcacattagttatagttttccacaaatcagagcttagtaatcgatcaagaatgcaaaattaagattctttctgctgcaattcttgaagaaacgattaactttgtcaatggcaagatttgagttggagaagtttgatggaacaagggactttgcgctaaggagagcaagtttaaaaggaatcctagtgcactagaaagtctccaaagttcttggagatgagaagttactggctgagaagaaaccataagagaaaggaaaaatggaggagatggcttatcacacgatcatcatgtatctgtccaacaatgggagaagaaagcttgtcgcagaaaagacggctaaaggaatttggaacaagcttgaagaattctatatgaagccacaattactagcaagattaattttctaaaaggttatatggttttagaatgatttcttctctttctttagataataatgttaataagattattgtaggattgactaatataaatcataaggttgatgaagaaattcaggccatcattttgttgagatctctcccaatagcatatgaagaagtcaaggctgccattaaatatggcacgaagacgttcttgccgcacttaaatttaaggattttgaattacaattggaaaaggaatccaagaaggaagaggtatacttggcaagagggagatcacccaaaaaagtatgttcgaagagtaaacaccatcactcttattcaagatcgaagttcaaagagaaggaaactcgaaagtgttacttttgtagaaggtctgggcttttggaaagattttgcaaaaagtacaaggagcaacaaggctataacaaatctcatagtggagatagcaaaaaaaatcggcatcatcaccacaggaaggattcaactacaatcccaaaagatagtgacaattgctcaacaaatggagaatcgttctccatcttggaatcatcaatgagtaaggagtggattcttgactatggatgaacatatcacatgcgtctgagttgagaatcattttttgattatcaattaacggagataaaattctaatggaaaataatcattcatgcagggtcattggaaccggaaaggttgccatcaaatagtatgatggcagaatcaaggtgttgacgaacgtaaggcacactctagaagttaagatgaaatctcatatccctaggtgcgcttgaagatgagggttatagatacaagtccatgcacaaaaactcgaggatcaccaaaggtttactgataatgatgaaatgtgaaaagatcaatggtttgtatattccccaaggagaaactgttctagccagagaggcaagttaggtgaaagggctagaatcagatatgcaaatgtggcatcacagacttgggcatatcagtaaacaaggcctcaaagaactgcacaaacaaggtataattgaaaattcaaattcttgtgctttaccattttgtgaagcttgtcttttagggaaacaacataagctgaagttcactctagcaaggcatactagtaagaagatgctcaaatatgtgcatgttgatctttgggggccatataaagtgcctactcactttggtaagcgatattttcattctatatttgatgattatagtaggtgtgtttggacctattttctagcaactaagaatgagtgcctggaatagtataaaatttggaaaactcaggtggaaagccaaatcgatctaaaagttaagaaccataggacgggcaatgggctagagtttattaactctaaatttgacatgttgtgtcaagagtatgggatcactaggcatagaactctactgcagatcccgaagcaaaattgtattactgaaaggatgaactgaaccttgttaagtaaagttagatgtatgttgttcagttccagattatagaaactattttgggaggaaactctagctactgcaacctcccttataaatgatagccccaaagaaaagttataagcttaaaaaccccttaagaaatatggtacaatagaaccccgaacctaatacatctaagaacctttgggtgtatagcttatgtacaccagtctattgacaaactggaacctagatcagttaagggaactttcctaggttatgccttaggtaccaaggggtatagaatttacatttccaagaaaggtagaccgaaggttatgatttctagaaatgttatttttaatgagttagaatatcatcacttgacctttggaaaaggtagtgtgtctccgtgtgatgcaagaaaaacataaaaacaagaacactacatgcatggaaatagattacaaaacgaaacatccagaaaaaggttcacagacggaatctattgtggaactggaagataacaaaggccaaacagaggttcagaaatgattcagataggaaggtttagaaggttatcaattggcgcgtgacagatctagaagacagatttaccctccatcaaggtttgcaaaagtagacttaatagcatttacactggcaacagtacaacaaactaaaattgaagagcctaaaagctatgaagaggcaatttcaagtgaaaacaagtcaaaatggctacgtgccatggatgaggagatggattcactccaaaagaataggacttggctagttgtatcgaagctggagatcaaaaagattgtagagtgcaaatggattctcaaggtaagagagggactcaatgagaatgaatcagtattgttcaaagtcgggttagtggctaagggttttactcatgtggaaggaattgactaaactgaaatcttctcacctatggtaaagtataagatgataagattaatgttgtctttggaaacacaaatggagtttaaagttaaacaaattgatgttaagatttccttttgaatagattcttgaatgaagagatctatatgaagcaaccacctgggtttcaggtggaagggaaaggaattgaattagtttgcaagctcaaaaattccttatatggtttgaacagttcccaagacaatggaataaaagatttgatacatatatatgttgggttttatgcnnnnnataaaactctttacaatctgattagt

SEQ ID NO: 121131 - DNA, 3210 bp, Cannabis sativa
tgttacctactacagctgataaatccttgttattaaatgatatactccttgttcctcaaatagccaaaaacttattaagtgtatctagacttacagcagacaacaatgtccttattgaatttcattctgattgttttttggtgaaggacaaagcaacaaggagggttctacttcaagggatgcttaaagatggcttataccacctcacacaaccacagagcaactcgactactgcctctcaaaatcaagtcaacactgacagttttttacctttttctggtgtagcttttacttccaaaaacaatgtaaatcagtgcaaaactgatcgtatttccatttccaaaagtgaggtttggcataggagattaggccatccatcctccaaagttctaagccaagtcttgaactcttgcaatgtaaaacttcccaagaatgaattaagtcacttttgtgatgcatgtcaatatggcaagtctcattctctcccttccaaactatctagtagcaaagccaataatgttcttgatcttatacacacggacctttgggggccttccccggttcaatcaacaagtggatatagattttatattcatttcttagatgatgcaactaggttcacatggatttatcctttaaaaactaaagatgaggcctacaatgcttttttgcaattcaaagtgtttgctgaaacacaatttgagagaaaaattaaggggcttagaactgattgggggggtgagtatcaagtgtttcaagatcttgctgttcaaaatggcatagattttcatcactcatgtccacacacatcctcacaaaatgggagagcggaaaggaaacatcgacacatagtcgagatgggtcttactcttctagctcaagcacacatgcctctcaagtattggtgggacgcatttagcacctccgtgtacttaatcaatcggctccctactggtgtacttgagaataaagctccttttgaagtgctttattccaaacaaccaaattatagttttttaaaaacctttggagttgcttgtttcccttgccttagaccatatcaaacccacaaattccaatttcactccataaaatgtgttaaccttggctatagtgaatcccacaaaggttataagtgcttgagtccaacgggtaggatttatatctccaagaatgttgtttttaatgaacttgagtttccatttcagcttggttttctaaacaattatcaacatgagaaacctgtcattgttcaaagctcttcatggtcatatttacctactcctactgtgcctctctcttcacaaaaatcttcacaaaaacctgcagcatcgccttcacagcagccatcttcaagcgcctttgatgtcgattcctccttgcagcaatcaccacacaaccaggtattctcctcttctcctacctcagttcattcctcacccatttatccttcaggtagtgagaggggaagccataaccatcttcccagcagcagtcctattatttttgacttacctgaaccgagttcacctggtacctctcaaacctctgctggtttttcacctgctccaactgccccgaccggtcatcccatgatcactcgtgccaaggccggtatatttaagcctcgggcctttgctggaacagctacttggcatccacacactgctgaaccacttactgtcactgaagctctcgcccatcctggctggaacagcgctatgaacagcgaagttattgcattaaagaagaataaaacatggatactagtccctcgaagtgatgatcaaaatctcattggaaacaaatgggtgtatcgtgagaagttaaatgctgatggctcgtttcaaaggttcaaagctcgccttgttgcgaaaggatttcatcaaaggccaggcatcgattttggagagaccttcagccctgttataaaggcctcaacagttcgtattgtactcacaattgcagtaacaaagggctgggacataaggcaattagacattaataatgcattcttgaatggcaccttggtggaagatgtttacatggcacaacctgaaggctttgttgaaaaaggaaaagaagactatgtgtgcaaattgaacaaatctttatatgggcttcgacaggcacctcgagcatggttcgagaaactcaaaaacacactctcaagctggaaatttaaaaactcaaaggctgatacttcactctttttctacaaaacagatacagtcatcatcttggttctaatatacgttgatgatatcattgttactggcaatgatagcaaacgcgtgaagcaattcatagatgaactcaacaagagattcacattgaaggacctcggtccactacacttcttcttgggaatagaagtctatcgtgatgagactggcatctatctgacacaaacaagatatattgaggaactcctaaggagaaccaacttcaccaatttgaaaatctgtcccacaccagctacagcaggtaaaccaatgtccttgagtgatggagagcctctaaatgatcccactgcatatagaagtatcattggtggcctacaatatttaagccatactcgaccagacatatcatatgctgtaaacaagcttagccagttccttaaagccccaactacaactcactggaatggagccaagcgagtacttcgatatctaaaaggaaccatgaaacatggtctgcacataggctgcgattcacaattgacacttacgggctactcagatgcggattgggcttgctgcccagacgatagaagatccgtagctggttattgcgtgtactttggtaacactcttgtgtcatggtcctcaaagaaacaggctgttgtgtcaagatcgagtaccgaatcggagtatagagcgttagcacatgttgcagcagaaatctcatgggttgaatctttattgaaggaactcgaatttcctttgtctactgctgtaacatggtgcgacaatcaaggagcaaatgctctggcatccaatccggtatttcacgcaagaacgaaacatattgaggtagacgtgcattttatcagagataaggtacttaacaaacaactggaggtgaggtacataccctcacatgatcaggtggccgattgtttcaccaagggtctgtcaacatcacgattccaatttcttacaagcaaactcggagtggttgaatcacccctcagtttgagagggg

SEQ ID NO: 121132 - DNA, 1871 bp, Cannabis sativa
  modified_base (1803)..(1826): a, c, t, g, unknown or other
tcaagcgtaaaactgctccaaaagacaccaatagacgagataatgctaactttaaagacccgaaacataggctaattataacctaactcttattccttggtcaatcaacttacttatattactgatctctattcgaccacggctaggtatcaccctaggacactctgctgctgggtctaattttgagtctgaatatgaacttgtgtttgacatatctacaacataaacaaacataaacacaagctagctataacaaagtaactatataaatatacatatatacaagttagctataatggagtaactacataaacaaacataaatacaagtgatctaatactaagtttgacatatctaccaattagacacgctttcttttcttttttcgtttatcttttgttgaattacaattgaccaacattccctcattgatatcatttctaatgtattaattcgacattatctttttcaaggttacgatcaattttcatgagttgttcatgcattggttgcccaacattgaagtcattgttgggattttaccttaaataaaactcatttaaatataatcttatttactatcaatagaaggttagaagtcgtatgtagttttcatgtttatagttttaatatacaatttttattaaatccagaacatgtagttattcacaattatggtaatgtcaccacagtggaaagtaatttggttaatttgggagtctttatttgtataaggttaatttgattttgtaaaccaactttagattcatctaataaatttctttctttcgtgcctgaccccgtggactaggagcgatttgaaaaatttattgataccacaaataaagtgttgtgtgtcattttaattttctgcagtatatttatattctgtcatattctatgtctgatagaacagagaaaatttttgttcaaataattttactacagttttggtttatttaaattgtttgataatttcacttggtaattattaaaaatggaaattcatttagtatcagagtggttcactaaactcttagtgagatcttgtgtttcatttccgtttaatttgtttcttgtgtgaaatgtctttctttgcagaaagaagttcggtatctcttcctccgctactcaatgacagaaactatccatactggaaagtgaggatgagagtttctattaaggttcaagataaaaaaagcatggaaagcaattttgtctgaatggtctccactctcaaagaatggtagcacaaaggtaaaatcacaacttttatggactactgaagaagagaagttatctagttataacaataaagctcttcattctatatttaatggtattggtgaaagtttcatcaaacttgtttctacttgtatatctgctaaagatgcatggactattcttcaaacccagtttgaaggaactgaagatgttaaaagatctagatttatcatggtacaaactaggtttgatgatctaagaatgactgagtctgaaacactatctaaattctctgaaaggttatctgacatttctaatgaatattttgccctcggtgagaaacttgatgattatgttttggtgagaaagatagtgcgagtacttcttgacaggttcaatgttaagctcacggctatggaagaggctaaaggatttcattactatgaaagtaaaagaattgatgggctctcttcgtacctttgaattaaatcaaaagattcgttcaaaggagaaaccgagtatctccaaggaaaaggaacctacgagtttgtcttgagataactgttgggttttatgccnnnnnnnnnnnnnnnnnnnnnnnnatcagatttacttattaatataggtcagaaataacatttaatgtt

SEQ ID NO: 121133 - DNA, 2780 bp, Cannabis sativa
aaaccgtaaatttaaaaaaaaagggttaaaaaagtagtatatagggtaattcccctaaaaaaattaaatttactttaagtatctatattattattttttttttaaaatatttttaaattttattttatttataaacacacttcataaaattaaactaaaattattaaaagtttaataaataatttaaacaaattaagattttgtgaatagaaaattaaacttatttatatttccctcttctttgatcttaacctcccttgtttctctataccgtggatcatttcattcacaagatgaaaacaaacatgaacttaattgaagatgaaagatcagtgtttgctattgtggataatgatccttcgcatgttaatgctcatcaagaatatgccctgtttccaagaatatttacctaaaaaaaggtctggctctctactttgcatcgttaaatggcggagcattgggatggtcgtttcaaagttaatatcaaggaacaccattttggtatcttcttagtatgctttggttgtgaaggtgatcgacttagagcatggaaaaaggaaccatgacactttcaaaaccatcatattgtcctatattctccatcattaatgcaaaatgttactcctaaggatatggttttctctctgttctgggtacaagcatataggcttccatttcttagcaaatcaagatcattggctaaagctttagggaatctgttgggtgagtttttggcagtccatgatgaccccttaaatgaaggttgaggaccgtttttgaggtttagagttcgtcttgacatcactaagctactgctgagaggaaaaatgataactttgccaacaattcgtgatgaattttgggtggaatttcgatatgaaaggttaccatactattgtatggaatgtggggtgattggccacttataccaaaaatatctttatctttttggagaatcttgacaatggaattgaactataattggcttatggccccatgttgaagggttcagtgttaccgacttctccatatgactaatatagatctgattattctaaaggaaaggcttggccctttcttacaagattggctagattttctattactgcctccatctcatagatacttactaggcctccctcacatccgagaccacttttgattggagaggcttcaaacacacaacaacaagatgatccaataagacagaatgttcttactgctactgcaacttctttggcatagacagttacatccactttttttactcctcatcttctctcattacttccattgccaatattcaatccttgtctttagcatcgtctgtccctattaatcacacttcacctttatcttactacaccatcagatttggccactaaagtagtctccattgctcatatatttaatgtgttcataccagatattggagataattcttctgtctcccaattcaaattctcttcaccgtttccttttgctacataccctccatataatcctacatgttctgtcacaaaaccttctctgtttaatatttccctccctactgttagggatactttctcccttgctccatcaattgttgctactatacttgctcctgcattttcttctattgctgatgccgtcaatgagaaagaaaatatgcatcccaatcatattttcaagaggtaacatgaccccaaaactttaagacaaacattgaaaagatgtcgagcagttcaccaacctgatgcttcttcctcatcagttgaagtgtagcctaaccaaccaacttttagaacttcctcagattctgctggttcatttgataatgcagcagtaattgctcagcaatcccgctcctcatcatgaaaattttaagttggaatgcacatggtttggggagtcaaagtgcatttagtcgcctacgcttacttgttcgtgagcatactcttcatgtcttttttcttatggaaacaaaggtttctactagtgctctttctagatttaaaaagtctttatatttcaataatggtttagaagttcctcgggttggtttgaaaggttgatttatgttattgtggaaagagaatgttgatgtaaccttactatctatgaatacaaatcactctaattgttatgtcttgtttgatgatggctctcactaacctttttctgctgtgtatggttttcctgaagcaatgaataaaaaacacacttggacccttctaaacgtctggctgatgcttgtccccttgaaccatgattattaattagtgatctcaatgaaattttttcatcatctcataagaatggggttcctcttcgaaatgataatcaaatgaatgcttttctctctacattagatcaatgtaatttgcttgaacttccttttattggtgatgattacacgtgggcaaacaaaaaaaaagaaaaatcagcatctcttaaggagagattggattggtgtttcattaaccatgcttggcaagacaatattgtctcaccaactgttacacacctggtctactatggttcggatcacagagcaatattggcaaaaatttgtttttctcagcagcaacaacaacacgaaagaaatcgatcacagttttgttttgagcgtctttggctgaatgaaacttgaaaaaccgtgtttttgtaaatgtcaattatatataagaaaatataaaactgtaagcgtttgcagaagcaaaaagtaattctgctgcggcaaaacaaaacaggcagaatataaaatattagcagaaaaataaataacttgacacaag

SEQ ID NO: 121134 - DNA, 868 bp, Cannabis sativa
aacatgtaaaatacatgtaaacatcaatcacttcaaaattctaaattgataactaatcagattttaatgggttttatttagggcacaaaacccaacacatattacatcacaggcacaacaccgatcctagcttggttctacaaggggcagagtagttcctacatcaataccagatgcacaatgaaccttcttacatttccttatcccgtgcagatcgctcatccactccagttggatgccctcacctgctggttctttgaaattgaatgttgatgcagctcaagacataaacatgtgcaaaataggccttcactttgtgatacggaactgcaaaggaataatcacggcagcctccattccttggtctgatgtcttttcacctttgttaatggaagctctctccttacaacaatctttaaactggtatctctacagcacaatcgtggtctccaaaattgaatcgtattgccaagttcttgtagacagtgttcaccatccagccaaagccaacatctatttatatgattttatttgcaatattcatagcttgttgtctttatttcctcaagttactgttagctatgtcgctagagaggcaaatactgctgctcaccaactagctaagtatgctttaggcttaaatgaagaaactatttagacgcagaacattataaacatatgattcatattttcttaatggatataggttttttctaaaaaaaaaactcaaaataatcaataatatatgtttagccaatgattagtattttataaatctagaacatgaatagtatattttaaaaaaactttataataaaaccacttgaggctagctcaagttgtcataggaggatgcgtgtgtgttgga

SEQ ID NO: 121135 - DNA, 1112 bp, Cannabis sativa
ctcctccatatttgcattccttacacggtcagttgaagtagaaggtttagagaaacaagagagtaacttactaattgcctttcgtttttctttctttaactcatcatctttgttgggtttcatagcatcgtattcaatatcaccaaagaagtcctcagcatcatcaacagcatccagaagatcgtccagccacttctccacagcagggtttttgattctcttgttctccacctcaaagcgaaccgcagcaagagaattgaaggttgacttcaacttgaaaagcctctcagaaacaacagatgaactttcattttttcccttaaagaagaggtcctcaacataaggagaagcaaccttttcaagcaaaaaatcaaaagaagcagagagaagagcaccaatcacaagttcagccatggatattaccacacaggagtcagagattgagagagaaaaaacaatagagagtgtgaaaacttgaatgttgaaccaatgttataatattaatcatccaatgggacttaattatcaaacaaagacttctcagactccgagatggagtcgtttctttaatgttataatattcatccaatgtgatcaattattgccatttaaaaaccagataaaagtaagtaatttatatttgtacacaagctcatcttcttgatataataaactacacacattaacatttgtcttatagtaataatgcacaatatatatatatagctacgaattaatattattaatctcatcttgataatgatacacagcctgtattttttgtcttattctgacaatattcttcttcaattcaaaatttggaaaccttcaaatcacatatgtacacattatatatatatatatatatcttatatgtaattattattattattattctatcttatatgtaattaaataaatgcatgcatgcgtggaagtgataagaatgaatattagagctacaaatattatactaaaagtgccataaaatttacaaataaaacaacttaaacttaatatttagccttataaattataacctactaaccaaagaatcagtattaaccaacaaacgccaatattactttcctaaaagagccaaattaaaatct

SEQ ID NO: 121136 - DNA, 2189 bp, Cannabis sativa
  modified_base (1657)..(1672): a, c, t, g, unknown or other
cttattgctcaattttcacaacgatcttttctggctttgaaaatgaatcttttgctaacataacaagtctcccatttagctttctatgttttgaattaaaggtcataacatttaaacacatgcaatgcataggtttgtttagctgtcatatatgatgtcatcttcttatatagtcctatatattcactaatgtataccaaaaacattgtcttctcattcaacgccgcaatgggaaatgcaaaagagcaacacaaacctctgccaatagccaaatttctcagtagatctacatcctacggtcacctaagttatattttcaacttttcattttttctcattggtttgacccttggaataacagccgtattttgcttccaaagcttcgatataatgtcacaaattagtacaacttccgatattcttttgtcatcgaatttatttgcactactgccaccaccactgccatcgttgccccagccaccaccgccaccgccaccgactccctacaacagcgtttttgaagccattaataatagagagagctcaaattttgtgcatgatcttgatgataatgagttgttgtggcgggcttcatttgtttcaagaactagagaatatccaaagagccgagtacctaaagtggctttcatgttcttgacaaagggaaacttaccttttgctccaatttgggagatattctttaagggtcacaaagagctttatagtatttatgttcacacacatccttctttcgtggattcaactactcaggattctgttttctacaaaagaagaattccaagtaaggtaattaattattaaaaatatatttttttatataattaagtgaaaattacataatttacattttttttttcaaatgcttacaaaaagtatgggagtttttataattgtctttttttttttttttgttatatataacaaaaaataagggaatttttagaatactaaagtttttcgtaatatttttttaataaattttttatttttttaattagaaaagtaaaaatattttaaaaattttacttttcaatttttcaattaagaattttgaaaaaaaacattactttcacaacttttttaaatatttcttttcttaaatcaatattttggactttgaccctaacctgaaccttgggactcggtctcctatcccagccccagttccgaactcaacaacggccccggccccaaaccctagacttgacttaaataaaatcaaaaaataaaaattataaaatacacatttgtgatttttttttaaaaaaaattaataaacaaggttataagacacatttttattttttaagaacttttacattcatttttgtaattaaaaaattaaaaaaaacaaaaagtattaccaaatgctccctaattttttttttttattttcaaaaaaaatatgactatgggttttgtttttctatacgtgtaaatttatatttatgttatattttcatttttatttagtttttaaaaattaggaaattagttttgtgatttgggtgattactcaatggttacatttttattgtaactattatgattacattttttttttacttataatagcaagttactaataaataaaatttccttttttagaatcaattaattataattaattattttnnnnnnnnnnnnnnnngaatatttaacaagatctattttaacaattattaattatgaataatattttatataaatccctctgtaattattttaacagttaagtcatttaattataatattcataatcaagattattttattttttttacaaaatattagacttctttttacataaattagaattttcttcttgtataataaatttttaaatgttattaaattatttttttataacaaaaagaactaagtatgaatttttctattcgagtttgaggttatttcgttttctgggggagcttgactttatttttttttattctaattttattttttagtaaatgacccattataaaaaaaaaaaatgcaggaatttagccattttttttaaaaaacattcaacatatttcacttttttattttaaaaatttaaataaaaaaactaataattaagtataataattttaaattaaagttataagtgtaataaaattttaattatgaaattatacgtgtataattttaaattataaaaa

SEQ ID NO: 121137 - DNA, 1915 bp, Cannabis sativa
  modified_base (90)..(91): a, c, t, g, unknown or other
gttgcatattttatgagtgatatagaaactaacatattattattatataccaaactatacttatataactattaattattattattattnntattattattattataaaaaatatttactttaatcaacaattcaatatataaacttatctctatttattttcttatttctttttaattttctaatatgattaattaattaattaaaaaaataatgaattgagatatttttttcaattatcacactcatctatatataacatatcattaataatgattttcactgttcttttttgttagcttttttttttttttttttgtgtttgattttttctcttaaaattttagttactactgaatgttataatcttctttttatataagttgttcatatgtatgtatacatacatcttattgagtaaataaacacataataaatacatgtatatacattgtaatatatatctttacatacatacacacatctacaatgaaacacccttacttatgtataaagttttaaatttttattcttttcatccctacactattatatatacatgcacatgcacatttacttttttttttttaaatttgatattgaatgatgagattttttttttgtttgtatttcaaatcccacattctatgtgttctataaaatttttatttttgtgaattttttacatacatgcacatttacttttttttttttaatttaatgtggaatgatgagattttttttttgtttggatttcaaatcccacattctataatatgttttctataaatttttatttttgtgagttttttacacgtttaattagatatctcatatttattcttctgtagagacattgttcattgatatttttttttaaaaaaaaaaaaatcttaatgtctttatagatatacgaaatttaatattttcttctctataacttttgacaatattttttttttaaaaaaaaaaaaaaaaactttcctctcatctctactattatttaattatgtcacttatttaatttttttaatggtaagatttttttttaaagatttcaaatttatcattatatggtaagttttctatagctttttatatttatgagttcttatgtcgttctttatattttagatttcttattttcattataaatttgtcattttttaatttttttctttcatttctaaacttatttatttattttctttttattttattttctaaaagaactaaaatatttaaccttacaaaatatctataaaaccaaaattcttctaaatttatttaactattttctcctttcaaatttttcttctattttctaaaaagttttaaaatatctaaccctaaacaatatttataataaaataatattaatattaattaagtaatattctcaaaccctaccctttttattcattatatatatctatataaatcaattaaaactcaaaatcgtaaagttttccccaaatttttattaattttctaaaactatttttttaaaaaaaatatatattaatatttaaaactaaaaccttatgtaggttaaacctccattataataacaacctaatacatattgtaacgcacgtatttgaaaacttactaaaccaaaattttacttattataatataattatataaccttataggtcaagatcccaaatttttttaaaacacagttgaaaattacatttattatatataaagtttcatatatatatatatatataaatatattcttaaacgacagggcaactacaaaatatagttcataaggttgaaagattgaaaccctccaagctgcactatcgcgatatgtacaatcactgccaagctccaactcactgctcctccagcttagcttttcctttacctacacaatgtagcaaactgatgagtcaacaga

SEQ ID NO: 121138 - DNA, 929 bp, Cannabis sativa
gtatttacccttaaaaaaattattgagtttatgttgcttacaaacttaaaaatttaaatacttatgggttatttagcctataataaacaatgttggatgttaaaagattgtaattcaatagttacagctgttaaccgaggttgttagttatgatttgagcattgtataaatactgagctagagctcattttatcaataaagagaatcattttgtaaatctgtttcttgaatcttatcatggtatcagagtagccaattctttttctctccaagattgtttttctcttcctcgattatgtgcttctgttcttcatcaaataatttttgatcttgtccatccatatagcgactgtaaattccttgtagctccaactcattcgtttcatctcgttgttttctcacataagctctttgtgaatctcggtaataataacttccttctctagcatcctcaagtggtttttgcaatttgaggtcacaatctccatgattacatcgctgatcaagtcaatcagccttaaaaatttatttttgataaagatcatgttgcgaatcggattaatcctttatttcatcaatgggagcagcaagatcaactcctatattattggcttctttcttctatgcttaaaggagttctcactcacgtggttggcaatgacacttcagctcaggtttggcacactcttgaggaatattttgcaacttagactagtgctaaggttgatcaatttactaatcaactacaaaacatcaagaaaggaactatgtttatcaatgaatatctttcacacattaaatctcttattgatcaccttggatcgatttgtcaccatgttatagttaaagaacacatcactctggctgcttcctggactgatgactggccctacataccaacacaagtctttccagcgtgctttatcctc

SEQ ID NO: 121139 - DNA, 1817 bp, Cannabis sativa
tatatggagaagagattgtacatggaatttttttacaaagcttccaaatgcctaaatcgactctactaccgatcgcagatcttccatcttcgatcgactcatccatatggtcaaattactccggcagcctaaatggcaagttatacttggagactgaggggccatcaatggctacgggttttggtttctcgtcattgtacggaacgaaggtggtgaggttaacttacggggatgggttttcaaagagagagaaggacagagagagacttggtgcattcgacaatcaatgataattgatggttcaagaaggggttaatatatatttattattatttatatttatatattagcttacaaattgtaaactatttaatattaattatatatttaattttattttattggcttgctaacgtcaatcattaaactgattatttagtctgagatttattcgcttgataaggtttttaaattgattgagaatttatttatttttataaaaaaaataaataagttattacttaaaagccattaacaaactgaatcgttttcgtgagaataggaaagtttgatttgaaatattttagaagtgttaaaaaaaagtcattcaataaaccaagaattttgttatataaacacattttatatagaatagatatatatatatataaagataatattaaaaaagctcatataaataaatgccatcctaattaattaaactcaaaactcattatgcttatataaattatgattgatgcttatttttttaaaaaaatatttaataattactttttaaatgaaatatttaattattaattgcggattatataatgtataataatttatcttatttgcacaaataaatatccgcacctactatttttggaactaacattttggtgttatatacatttcaaaatcaattcttgattagtcaatttgtcatgctttccatgtgatattttttaatattagtttatgtaatatatatatatatatatttatatatgtcatcatggggaattatctttttaaaaatttcccgtgtccattttttagttgttttacatagtcaaaaatactaaatattcacttttattaacgatggtactaaaaaacaatttaagtattgatgggaatagtattttttgtaaaacaagattaattatatggacccaacctatatttcatctatattatgaaatagttacaatacatgtacaagccacgtaaacttagaaaaatgtatcaatccaactaattcgacattaataacattttttttctttttatattagagaggaaagattcaaacttgagactttattatttaactatgcgtatgactatattatttaacttttattaaagagtattgctattagatattttgtagtacctaataccatactaatattgtgcattataaataattaaatttttttatattatttattaaattaaaatatgtgacaatcaataatatttttacactagtaatataccactcattgtaatgcttcacatctaattaactctgtttttggtaagtaattttgtcttcttgtcaataacttttattccttccttaatgatcaatcataattatgatttatagctcacaattaaaaactaaatacaaacaaataatagacaataagcttccaatacatgtaatatgaaccccaattcttatcatcatctacacttattacaaaaaaatactttcagtaacaactttttagtaataaaataattttaggaaattatagtaaattatcctaaattataggaatatgttagtttatgtcctc

SEQ ID NO: 121140 - DNA, 778 bp, Cannabis sativa
ttgatatttaaaagataaagattgcattgaaatgtagtttatttagggcataaaaccaaacacatccaccatctccaacctaactctagtgagttttgattaaactgacctcgctgctagaataattaataatgttagaatttacaatatgaaaaaatattacaaatatagaattgcactaacatacttccaagtcgattaaaatctatcctaatcccaggtagcgtgaatgtataaaaccactttaatttctaatagcccatatttgaaataacaccttaaatcctgttgccctacgaaatggcccaatttcttaaataataaaaattattgtcgtgaccaacattttaatgtcttagaaacagctaaaatccttgatagtgggctctctttgtgcgtactctttgtacatcacaaagaatacaaggattctatagctattgggagttagttggcatggagaaacatcatagtgggtcaggattgctttgaaaaaattgtacattatatatgttttcttttttatttgttatgttatgttgcgagaatgcatgatgcattctattatgttttttttttttttgtgctaaatgtttcttaatcttcactctctgtttatcggagcactcttgtattttggttctcgcttgagtttggcctcgcgacgtatcaggtcgtgctctcgcaatttggtcgtcatgcaccaaaatttggcaatcgcaatccttggtaggcaagatacttagtacatcctgttggaattattttaccacgatct

SEQ ID NO: 121141 - DNA, 646 bp, Cannabis sativa
actcttattttttcaacattaatcaaacgcagcgcaccaaaacttagatctcagatttgagatctccacaatcccgaacacagagagaaacatgaaaaattacagatctgagcataagccaccatgtacgacctgcatattccggcgagactccaaacgacaagaaggaagaggaggaattagtgtcgcacttgcccagatttgttcatcttagaaccaatgcgtgcccgaatctgagtgcctaaatcaccgaactccaaccacaatgaaacaataacccacccattaaagagccaagaaacaaagttggggagcccaatcccaccgtgtcacacgacgatctgaaacccaggtggaattatgtctgaacccgatttctcttcacaatgggcgattgttaatcacccaaataaacgtcaacccagatttctctatcccaaaagctaactcatgcattaattcttggcttagactcaactccgaaccaagaattgatgcatgagtcaagaattaagcatgactgtctttcttcccatctagccactgtctttgagcatggctgcttgttgaagaagaagacacgagagtgaaagagaaagagagacaacttaagttttttcttagtttttttaattattaattaatt

SEQ ID NO: 121142 - DNA, 1952 bp, Cannabis sativa
agaaattagtacaatttaattatatgaaaatgaattaaatgcaaaatctaagaatatatacttaatggcagatttttaattaattcagtcaattacttaattggtaaataaatataataattgcacacttaattatagaatattcaaatattgacattcttaaaatttcacaattattataattacatgtaaaaataaagtatataattaatttaccaaattaaaaactttccataataatttattattaaataacatataatatatgaagatatatgttaaataataatggaaaatttaaacaagtgtaattcaattgattaaattaacaaaataaggaaataaaattccaaaataaatcaaaataataaattgtcaaaaaatttctgtctttttcttctacttttttttgaaaatttgccctgtcgttaaacgacatgttgtttcccagagcagattttcaaaaaaaaaaaattcctttcaattcgatgatgatgtatatatatacacatgtatatgcatgtaaaattttgaaaacaaacatatgcataatcaaggcagagatatataatatgctttgataccaactgctagaaatttattgtataaaataaaatatatgtatgtgtatataaaatgcagaataaacaaatatatatatgatataatttaaggatcaaaatacctccagccattgatttttgagcttcaatcctacacaagctttgatctgtgaaggaagctgaatgatgtgggtattcgggcttcctcactctctttagatagaatcttactgttatcaacataatgaatgaggagctcggagaccgagaccatatatttataggtgagatactccattagtatttgcgccacattaattattagaatattttaataattaattcagggaattaaatcgggtaatgaatattgaaatctgactatatataattttgagtctgattatttttttaccatctcgaccgcatcatttaatcggaattgattcattcaattgcgataattttaaacagtttcttgtctctattcgctatgtatcacatataaacttattttttttaagttcagtagtgaaccaaatgaaaccataaaaaatttcaataaatcagacaacataacagtattattttttttaaaaaaaaaattcatatattttctatgactatatctcacttttgaagatcttttgtgattaaaacaaagcctagatcaaagtagaccatgaaaaatataagaaaaatattggttcgattttagcagcataacggtgtgtaaaaatgagaatttcccttttatctcttggctatatctcacttttgaagatcttttgtggctcaaaaatcctagaccaaagtggactaaagataaaaagagaaaattcattagagcaagaaagatttagagtgaagagcaaagaataaagaattttacttatcacttactctgtagaaacctttgtagaaactcttgaagatgaaaattttgtgcacaaagccttctctctttcttattttctctcttgttttactcttacgtttacttctaaaactgccaaataaaataaaataaaataatcccattatgctccttctcctctctttttatagagaccttttttctttttttatttttttattatttttttttactaaccactcacgtaacgtagaaggggtgagagtggagagaatatctcctaactttactctcatcttggcttatcccttttttctgttatcatgttattattattattatttgttatcccaattttcacactctgacgtggcatcgcataatggtgatacgtggaatccacttggagtatctgctcggagggaacagcccgagcaggatgcatcgctagcatgcccagagcaaagcaatcagcaatccgcgcagagcaaccaatgttgggttttatgccc

SEQ ID NO: 121143 - DNA, 1120 bp, Cannabis sativa
atagaagtttgtgtttgttctctttactagacatttacaacttataagagaagaacactctatggttaaagaataagaaaatatgtaacttatgaagtataaatttgcttttatagagcagaatagttgttgggaaggtaggaaaaattaatcaacattaaatgtgtaattggacacatgtatgacatgcaatgtgcatttatcgatataatgtcgatacattgtcgataggttatcgataatatgtggataggagtaaattgaggctacactttatcgatattatatcaatgatatgttgacagctgtcgattgccacgacagatggaatagaagttggaaaggtggaaaaaattaattagcattaaatgtccaattgtacactggtatgacatgcaatgtgtatttatcgacattatatcaattagcattaatattatcgatatgatattgatgatatgtcaatcctctgtcgacgatgccactgctcgaaatcctaacagttcttatcgatgagatattgatggaatgtcgatagtttgtcgtttatgttaaatttctgttgtttttagtttttttttataatttttttggtatttttccctaacttacctttttttgtttgaaattacaggatcgactgtgtttcttgttgtattgtacgatggtgtttggtgtgttgagggttttaattgagtttataaagccgaagacagtttgacgttgacagttagaattgacacaaccatacaacaaatgcgctagattttatatgaagagttggagattgatcctttcgcgtatgatttgaaattggagatttgttccttgtacatgaagggacaaatggttccgccagagcttattaagaaggaacaccaactaagaacgttcttagagatgactgcaacaatgaaagattttatgccattatttgtgactaaggtgagaaaaaaattggaaatttggagcctaccccgcctattaatcctctctaagtgtgatagggtctttcgttcccgaaatagatgttggaattggtgtgaatgtggaggttcctaccaatgtagatcaacagcaaggagcgacaggatttgatcagtttgaggagtttgatact

SEQ ID NO: 121144 - DNA, 614 bp, Cannabis sativa
acccctgagctaacaatctcagcagtgagttcaaaatcgggctctaaatccagggtcatagactgaaggaagttgtttcgtagagtttcgaaatcatcttttgggtcctcattgacatcattgttttgagtctctttttccccctctccattaactgtagcactagattccttattgttgtcaacagattggggtagttgagaagtaagttcatattaatttcaggatcccctgcattaacttcagtgtctcctgtagccacagatcctgtattcgcttcacgtgatacacctgctttgtccctcatatcttgcataagtgaaaaaaataaccgtttggttgaaatcttaaagaacccaacagaatgggaaagaaaagaacaaaagcaccagaggattctctcgagtaaaattttagaaataagacattccgtcaagttggtatcccaacactctcatagccgagagagaaaaagctcccaacaagtaattgaaacatcaaaatacctttcgtttggttacaaagaaagaaatccttctattatatccataacagaagatcactacccattcttgttcaaccaaacaatcaagttgaattaatcaactcttcta

SEQ ID NO: 121145 - DNA, 827 bp, Cannabis sativa
attaatttgagacacaaattaaattatggaatgcacagaattaaaattgcagtacaatatgccatgaattaaaaaatgaatatcctaaagagtaatgtagtctatctttagaaaaattaatttcttaatggggtggagaacattaatcataggtttttttttaccaataaatactctttatgaaacatgctaaaacataaagatataaaggaagatttatttctaagaagttcattttcaactaagaatcaataacaaaagagatttaaggagtatcgctatgattcatatgtttattaattatgtaatgagggacgttaagtttaagtgctaaatctaaatgatgaccaagtagcagaatatatattagaatatttcttatattagtacaaaatcatttaaatcaatttttttttatctcgctaactgcatatcatcacatatcaaaatatgataagagtgaatattctaaatatataatcagattacgatttactaattaattaaattttcaaattagttgtcaaaaatttttgataattaatgtgccgaaaatactgattcaaaatcacctataaatttataaaaagagtagtgaaagcatggtaactcgattaccaatccgaggctatatttgattgaaactcaaagatcaatagctggaggtatcacgatctcttttgttgttcacatatacactcgatttgtctttattattcagcttggaaaattgattgtatatgctttatttttcatataataatgtctaacagttacctagtatctagccatggtgatgtgggcatcaatgtctgacacgtggcaag

SEQ ID NO: 121146 - DNA, 1087 bp, Cannabis sativa
attatcatgtcagtctaaatccagtgtactaacatatcataggacataaacttttgaacatattatcatgattatatttcactgtgttgacgacactataatcatgaaagacattctgtctaagaaaagaaagatggaagactttgagacggtggcattgatggaggagtgtagtgtatcttacaaaagaagctccctcctaaattgagagatcctgagagctttactataccgtgcactattggaagactagagggtatcaacaccttgtgtgatttgggggaaagtatcccaatgcccttgtcatttttcaagagattacaacttagagaagccaagccagcaactgtgacattgcaactagatgtccgttctttggctcatccaaggggggtaattgaagatgtccttatcaaggtggacaagtttatttatccagttgactgtatagttcttaacatggaggaggataacaatgtttccattatctttgggagaccctttttggcgacaggctaagctttaattgatgtgcaaaaggttgagttaaagctgagagtataagaagatgaagttgtgttcaatgtactcaagggtataacttatcctgaagctagtgatagttatttctcgattgatgtggtggacaagttggtggaaaccaggaaacccaatgaagaccctcttaatctgactttggtgagagaggatatggttgaccaagatggaaaggaggcgatgaattatgctttgtgaattgattcttatgggccgttgaacaaaaattattttgaagagctcagagtgattccaacaaagccagtgccatccattgagaagccgttagaattggagttaaaagtccttcctaatcacttaaggtatgagttcttaggtgagaataagacactcccagtttttgtgtcaacttccctttctatggtggagacagaaaagttattaagggtagggctgaacattgagcgggtttatcgggtttcagctttgtgagtttcgggttcttttgtgaccgaaagcagtacattttacttttatcaactcgcaagcacacaaatctttattgtag

SEQ ID NO: 121147 - DNA, 868 bp, Cannabis sativa
  modified_base (836)..(841): a, c, t, g, unknown or other
atcttgggttaattgttaatttatctaacataatatagtggtggtcctcaagaaacaagaataattatattctcatcttccctagtagaaaattagaaaatcaactatgcaaagtttgactagttaggtctttttctccatcgccattgctttgctttgcttgctttttaagatttgtacgaagagaactgatgccttttgttgttgagtactaagagaaagagagagaaaggtgtagacgatggtggagctttggctggcgccgtagttggagggtgacggctagggttgagctgaatagagaaggagactctctttttaatttaggtttttttttttttttaataaatatggtttgaaataaatatataaaaaatatgacaaagtataaatcctataaaagtttaaaaattaaaaaatactatataatgtgatcaaacttaaaattatcatatttaagtacttttttttgttaaaaaaaatctatagttgatgtaattttaattttaaataatgtagagcaaagagaagttaacgtatgatatatgtaaatttttaaattaaaataaagtagaattttagttaggtatagtaaaaaagttcttcatactcaaattggtaagaatgggagattggagggaagtaagttgattctaagtgtgggactttgaaaataaaaaaaattattggtcctttactcataaaatatggtgcaaatactattttggaccttgtattttataaaaattaccaattagattctctattttgctaaatgataaaatagatcatgtattttttaaaatagtacaaataggatcctgaactgatttttnnnnnnaataaaatttaataataatccaatcta

SEQ ID NO: 121148 - DNA, 787 bp, Cannabis sativa
ggtagaatctcccaaaaatttaaaataaaaacgttaatcatacaaacgtggtatcgatttccgtgttctccgtctctgttgattaaagtctcctcttttgtatttcttttttcattttccaggaaaattttggcgctgatgggtcggatagggttatttgatctggagaagcattttgccttctacggtgcatatcatagcaacccaattaatatattgatacatactttttttgtgtggccaatccttttctctactcttcttcttgtctacttcacgccctcttttttcgatttcccatctgggtttgaccatggccatggacttattttgaatttgggtttcgttttgactgttatctatagtctgttctatatatgtttggacaagaaagctggctctttggctgctttgctctgttttctttgttgggtcggagccagtcttcttgctcaacacctcggtttctcagtagcatggaaggtaagcccccataaatcatatgttagatgacttttcaaaaatttatgtacatattttctaattagagtcgtgtataacatatctgattagcatagaaaattttagattaaaagaagaaattaccaattatttaaaggggaatggataattttgatatgggttttactctgttatcttaattttgtttaggggagctatttttaattgatattgctgttggatcaagtgcattttgttttgactagtttatggttgcctttttttttggtgggggagttatgtaatttcatttccattaatgttt

SEQ ID NO: 121149 - DNA, 1307 bp, Cannabis sativa
  modified_base (1259)..(1281): a, c, t, g, unknown or other
gggagggtaaagttgggattataattaattggagagtatttttttaatttttttttacatagtatattaaaacaatatatgctatatttaagcatatattgtcaaatttcccgtgtcaaataccattacaatgtgatattttataaataaacagtaattttttataataattattaaattaaattaaataagactcaaatattaaacgtgaccaaaataatatcatttgtaaaagtatacatatctttttagtatttttcaatttttttttaaaatacccaaaaattattattcttagaacccgccggttgatatcagagttggccctactatgctagacgccacaaatatcgtgaaagatatggaaggtaactttaaggtagtgtttggtttgatgtaatgtaatggtaataataatagtaatggtaatgcaatgaaataagaatagtaatgtataggaatttattacaatgttttttttttaatgaatattcataagttttataacttcaaattctctgacaaaacatgataatagctcaattgggacattctccatactcaaagtacataagctttattaattacaattgattacaattatatatgtttgatttgttagttagaatgaacattgtaatagaattattgtgtttaatttagcataagaatataatggaataaaatgtgtattaattgaataaaataaccttattacttttattataaaattataaaatatttttaaaaagggtaatatagacttttactttttttactatatttttattaaaatatttttttttctttgtaattgagtgtaattgtaatcggtattacattggtattggtatgtaattatcattacaatactcaatgtaataaacattacattgtattgagtattaatggattacaaaagttaaaaaggaaaaacaaacaatgtaatggatctattcattacgattacgattaccattacaatgaaccaaacatcacctaactttattaaatagaaaatccagtaatgagacgtgagaggtagagagaggagaaagatggtcggtgaaaaatactgttaccgggatgtgttgtcgttctaggcgatgctgacaattaatggagtgaattaacgttggactaaacactctgttcttgtaatagtatgagagagatcaacattttttgggttttagttttagtgacaaataagcttttttgtttggaataattatataaggcactattttttgtaaaannnnnnnnnnnnnnnnnnnnnnnaatgtttttttttttttttttacatt

SEQ ID NO: 121150 - DNA, 1051 bp, Cannabis sativa
ttttgtaattaacaactttttaatttccatttttgtttatttccttttttggggtcataaatgtaaatttcatctatttttagtctataatagaaaaaatctcaaatatatttacctattgtttatttgtggggtcctgatttatttaaacacatatatagtagtaatattagttttgttcctatgttatataaatattttttaaactgttgatttatatgacttttaagggtatatattatttaatacggtgttttgtatatctgttaaatttaagtctctaaaattctgacacctccttttttaaaaattaaaaaaactgagcaacatgtcaccaattaccacatttcctttagaaagtgtcattaaacaaagcttttataattaagcttatttatttaggccatctccaatgggcctataaaaactcaataatagggtgatattacactaaaagtaagtccaaccccacggcatttacaacattaattttgagtttatctacagtgtcctatttaagtggggaaatttgattttttatacttaaaaaaccttcatattttattcttaaaccaatacatttcaaacaaaaaatatatgacacttttatctaaaacccaaaaatacccctctcataactcagccccattttttttcaacccgcatatgcatcggaccccccatcggacccgtcggaccccatcggacccccccagcttgcaagcatcggacccccatcggccccgtcggacccctccatcggaccccaacccaatttttttccccaactcgcaagcatcggaccctccatcggggtgcccatcggaccccatcgggccatcgtcttccccaaactgcaattttcccaaatctcaaatctgaacctaaaatcgaacctaaatctaacaaaactgacggtacacacataaacacatacattatacattataaccctaaaatcaatacctatcaatactccaaaacatatatcacataaaaaaaaatgacaaaaataaggggaccgacggtgggagatcggttttggtttggg

SEQ ID NO: 121151 - DNA, 817 bp, Cannabis sativa
aaaaacaaactaaataaatatatagaaagaaagtactaataaatataagtaactatcgacaatataaatgagacacaaacaaaaaagaactaaaaaaaattaaacttacaaagttatgcataattaaacaaaaagttaaaattttaattaaagtgaacaaagacatgtacatattaattgataagtaaactgcaaagggaggtgtcaagcaccaaaagatgtggactattattactggtgtatttcaatatcgagtctcgtcaattttgatttaataaataatatgaaaagccactatttatatatataaaatattaataacagataattatatatagacaatataaataagacaaaaataataaagaactaaaaaaacttaccaatttatgtataattaaacaaaagttaagattccaaggaaaatgtcaacatatccaactttcatgatattgaaaagaaaaaaaaatcattcataaaattaaaaagaaaaaatttagataaaatacaaaaaatattttatgagaaaaaaaatatagtaaaaagaccattttaaaaagtaataaaaaaaatatcattcataaaaattaaaaataaaagaaaagaataaaaaaaaaagatcattattatttatgacccaattaaaagtaggttaaggtataaaactcctatagctgacacatggtctctaagattataaaaaatgaccgaaggtgtaggaaggaatctgcaccatgtaattcccttagttatgcataaaaaataggattttttattttaatttcaacaaaaaaataacaatattacaaaaatactt

SEQ ID NO: 121152 - DNA, 1097 bp, Cannabis sativa
aaataatggatttaggagctccatggagacgaactatctccttcacatacagttcagcgtactgatccactgtataggtaatctttactcggagtaaaaattgattgctcattttttatttgattgacatatctcttctaggcattactgcttttctgcagcgagatgcggccctcctgagatgaccaatatgtcatctccttctacagctgtaatctttggttgcctggtttatcgggcagatttggttggttttgtctattaccttgtcatcttacatactgttgaaaataaccgtgcgagataaggctctctatcttgtctttaaactgacaacattcttctgttgtatgccctagtccttatgaaatcgacgagattttgttgaatctcttttttgtctcgcatgtctcattggctcaggcttgcgaaacgcaaccctatgctcatttgtgagaaagatattttctcgagtttcattaagctcggtataaatagcgtaaatcggcacatacttatcgtgctttttaagtttcttcttatttttggctaattccccagagtcatcttttctcttggtgttagagccacctaaattgtcagcctttgtcgaaacagtgcttgcggtgacagtgctcgattgacctcccgacctagtctttagcaatttcatctcgttccttacttcctctttccgtacgaacacttgagctctttcattgaactcactgatgttcctcatcgggcaaccttgtaaggcatcccacaactcgcccccagctgttgagagatcagtcgtgatccctacttgaagagtagtaagttggatactgtcattcaagtttctaactttagcagcagctgtactaaaacaacttaggtaagccttaagtgactcgcctggtttctgctttacgttagtaagagaggatgccccaggtcgtctgtctcttgctgcctgaaattgtttcttgaaatccttagacagttgttcttaagaaataattgaatgatgggtaaacttattgaaccagctactcgctgctccagtcagcgaggtggggaataaaatacaacgcaaattatttgagacattg

SEQ ID NO: 121153 - DNA, 1253 bp, Cannabis sativa
aattaatataatttactggcgtgttatttttcattcccacacgcaatcgttattccattaaaaaaaaatagtggttttgaaaaaagttacaaaaatttagcccgcaggtattaacttttttttttttctttcttttttatttaattattcatttatttattttgaggtaaataggttgcatgtctttttttgtttttgttttttttttttttaaggaaatcttgtgcattaaaaggacaacaaacactacaaaacacacaagactaaaaggaaggtaaagaaccatttcatactaactcattataagtccaaaacttaacttaacaactctatgagccaatttattagactctctactaacatggaccaaattcatatttaggctggaagataataagtttttgacacaaatcagaatgtcatccaaaaggctataaccccaattacaagattcaagcttctcaacaatagatttacaatctgctttaagaacatctaccggaagatgaagcaatcgagcccattgaatagcttgtaaaattgccttggcttttgccactgtagggggaacacaaccagtaaaagacttgaaaaattctgctttaacctgataaagattgtccaaaacaaccactccaatgctatatttcctacaattaagatcaatggctgcatctgtataaatttgaaaagaatccatagaaacagcccttgtgtatctggttgagcaatggcagaattggtagtttgagcttgaacctgctgcatatccaagtacttgaagaaaaaattaacactccaattaaaaacatcatccggattgaagagtatgctgatgatgaacagcattattcctttgattccaaagtgcccacaaaaaataacaaagaatgcaaatataatctctttatctaattcatgagtaatacggcgaaaaaagtcatagatattaagatgtttataattttaataatacatagcaaaccttgaagacttccaagcttttctcgatctggagcagtctagtagtgcatgcttgatagtttcagggctaagtttacaaagaggacacaaaggagagtcaacaacacatttcttatgaagagaagaagctacacaggaatagcattagacaacattttttccacacaaaaactttaacttttgggaaaatttttgaattccaaatttcagggcccgggatcatcgatcgtactctaagtaggtcggccaacatatctgaactgaatttt

SEQ ID NO: 121154 - DNA, 602 bp, Cannabis sativa
acaaaattttaaaaatagaataaaaaaaatctaagatgccacataaacttattttgtgctttcctttatattatatatagatatagatagattgtacttatttagtaacagtaaatgtaataggtcaaaaatacgattttattggataattgttcaaaagaaaaaaaaaatactaacttatataataactataaagttaactataaatttaaatagtagtaaaatgattttaaataataataatgataacaggacattgtagtctcaagtatagttatatatgtattttaataataactatgtaattatttttgtgctcgagtggggtttttgctctgtagcagtttagcagtttcttaactgttttcttcccctgttctttgtcatcttcgcctgctcaagccatgatctccgataaccactatccttttccaccaaatactctccacgttttccagtctctcaaactcaaatgttgttcttgatctcctatttattcctctgatcaaagcatctttaccttattctttcgtttcttgtactctctctgatttctttttgtttatggaatcactaattggtgatatgtcttccaaaattgt

SEQ ID NO: 121155 - DNA, 884 bp, Cannabis sativa
  modified_base (27)..(36): a, c, t, g, unknown or other
gttaaaccaagaaatgccgttagatannnnnnnnnnatatataaagatataaatatataaatcccacttctgattattatagtgattactgactctaattgacgattcgaagacttctctttcatggcatatatatagtggctccacttatacatttcaagcattattagttaactacacgtaatcattatatcaattctataaaaatatgtaacacaaatacataaaaatatatgtatcaaatagacataactatatatggaatcccattttgttttcttattaaatcaaatgtatcaattttattgaatatattcatcttttttttactttatcttttgttacatcattttttttttgcatttgatatattgatacattctatctctatatatttaatttctttatgtataaaatactgtacactcacattccactactatacatttgataaaccgcattgtatattttatctatactaaaatcacacactttcggctcctccttgaatttgatcttcttcttcaatgaaaaacgaaaagccatttatatgcgttccagcaaatctcccacataaacattaattacatcttatcttatttatatttatgtatagctgatacaaatttgagccgccaacaaaaaattatatggtcattgtgaagagtttaagtcaaacatgtgtccattttagtgttcatatatacttactaaataatacaatctaccccaactcagtagtaatatatatatatatatatatatactagaacaaagttacgtgccttatatttagttttatattaggtgttctataatttaattgagaaagattcaataaataatcatataatttaaaatgatttaaaaattaattttaatta

SEQ ID NO: 121156 - DNA, 1670 bp, Cannabis sativa
aaaaaaatgaaaataaatcacacttggttttttaccttttcaaattttataagatgtttttgatgtacctagacggagaaaacacggtttatgatataacaagcagtattaattgcttcaactcataaccgtttggttagtgttttgctaattaccatcaccctagccatttcttgaagggtacgatttttcctttcaactactccattccgtggaggagtttgggggatgaaaactcatgagagatacctatagacttccaaaaatcatcatggaattctcaaattctttaccataatcacttctaatgtgaacaatttttccaatattagaatcattgtcaactttctatttcaaacaaagagttttaaatgcattaaacgtatctaatttttctctcaagaaatctaccttagtaaatcttgaaaaatcatccacacaaataaaaatgtacctttttccattaatttatactctcaatttgaattagacctataatatccatatgaagcaattctaaaactttcgaagtgtttatattagaaaaaaatttatgtgtgaattttaattgcttacctagctgacaagatttgcacttaccattagatttttacttataggtaaaccacgaacaatcctgaatgtgataattttatcaaagttttgaaattaacatgacaaagtttagcatgccatatatcagtattgttactcacaacatactgacaaataattgaaggtgaaagagtataaaaattatcatttgatctaaatccttcaagaacattctcaccattcttgttcaaaacaagataattatttttatcaaagttaacattataaccttgatcacatattagacttatgctaagcacgttagctttaagtccttccacgagtaacactctttatttgattttaggtaaccctttaaattaagttaagagtacgcattccaagaacattaccttcaattttattcccaaaagttacaaatccacaatgcattggttaattatgtctgtgagtattgacccatcacctgtcatatgtcttgatatgaacacccactatcaaaataccaaaaatatgaagagcctggtctatcatattcactctactaaaaccatcaaaacatttattctttttgacctgtattttctttgcttgaattttgtcattttttttttcactctttttgaattatcaaaataattgaatctctcaacatattcatttttaattaaaatcattagagtaaaaatctatgtcaaatatgatattttcttccacaaatatgaaaaatcaaaatgaatttttcaagcttacccttggatttatctacttcttgtaacttatctgttgaaacagaacgaccacaagaggcaacaaacttgagggaaaatgacacatgaacatgagaaggaaaaattctatctgagacaaagatagattcctttggtttttgagaacttgaagcaccaaatcccacatgacttctttgacttgaattctatgtatcctaaaaaataatagctagaacgagggttaagccttctaacatttttctcagtagaattgaactctaagtaattatagaattatacttattgagtttaattgtagtgtccattgatataatcagttccagtgattagccctcattgtgt

SEQ ID NO: 121157 - DNA, 1667 bp, Cannabis sativa
ataatgggatggaatgtcaggggattgaataagagggataaacagagatcggtgttggaagtgtgcagagaaaataaagttgggcttggtgccctctttgaaactaaaataaaacatgaaaaagtgaaggaaatagttgacactagtttcccgaactgggagttttactcgagtactactattagttatagaataatgttgatttggcaatcgaaatttgtccatgttgaagtattattggaagatatccagttcattcattgtagggtcaaagtaatcggcttgatggaggagttctattttactgcagtttacggcagtaatatgttggctgaaaggaaagtgctttttgagaagttagctggtattggggtagttaacaagccgtgggtaatccttggagattttaatgcgatgtttggttttcaagacaggaatggtggtaagcagatcatgccaaaagatgttgaagacgctcaaaactggctttctcaaggccaagtggaagagttgaaaagttctggggcctatttcacttggtctaacaagcatgatttgggtggtactagagtttattctaagcttcataatagggtcctcattaatgaagactggatggatcaataccctcacacagaggcttgctttaaatgggactgtatttcggaccacagttactgcattgttaaaagtaatagagttggtaatgtgggcataagaccgttcaggtactgcaaccattgggcgttacatgaaaaatttcgagaggttgttctcaactgttggaacagatactcagatgctaatactgtggctggtttgattagtaaattgttgagattgaagcatgtgttaaagagatttaatagggaggagattggtgatgttgtacagctttatgagcaaagcaaagctgagtacattttggctcaagagaacctggctaaaaatcctaacaatagcatcctgcatcagatcgaaaataacaaaggccttgaatttgctacagctgtgaaacactattcctgctttcttaggcagcaaagtaagatttcgtggcttcgaaatggtgaagacaataccagatattttcactctgtgatgaagaagaggaagctggagaacaggatcactaccttcgagatgaatggaagagttgtggatgattacaaccaagttgtggagcatttcctcaaccattttaggaacttcatgggaaggcaaagtactgctacaaagagacttgatagtcaggttcttactcagggtccggttctaacaatagatcaacaggtgagacttattcgtccgttcaatgagaaggatgttaagaaggctatgtttgggattcatgtaacaaagagccctgaccgagatgggtttggttcaggttttttcaaaagtttatggaaagacataggggctgatgtttctaaggctatccttcgttttttcgaggagggcactatgccaatttctatgaaggatgctgtcattacattaattccaaagactttagacccaaaagaagctagtgactttcgcccaattgcctgttgtaacactttgtataagtgtgtttcgaagatgatttgctcttgattgactgaagggctccctagtcttgtgagtgacaaccaaggagctttcgtcaagaacagactcct

SEQ ID NO: 121158 - DNA, 501 bp, Cannabis sativa
  modified_base (455)..(476): a, c, t, g, unknown or other
cataatgtccaaggttatgggttcaaatctcataacactctttttttgatattttttttaatatatgtttgagggcctcaaaatttaattcgtcttggtccatatattttcaggtccagccctgcatattataaatggcaatttttgttttagattaaaaaaattatataattattacaaaaattaatagttataaacttcaatttgataaaagaaaaaaatattaatttagtttaaagttactaattatgattaaattattttgtcactttttacaaaaaagagaaaaggttaaattttaccctcatctaacttcatcgccttctaatttataccaactccttttttttcctatgaatataccaactctttcttaaacttggtagatctttgcaaaaaaaaaaaaaaatacatatatatatttatatatttatatatatgggtgactattcaannnnnnnnnnnnnnnnnnnnnnatatggttacatttttctttaacct

SEQ ID NO: 121159 - DNA, 939 bp, Cannabis sativa
tttattaagaagtttaaagattattattaatgtgtatgcgtatatatataattttaaattactttattaaaaaaatgttattataaaaatatttaaatagggtggtataaagaaaaatttgagtgttttccataaagtattatttttataatctcaatcattcaaagtcgttgtcatcattgtattatctccttctcatcaccgtatctcacatgttgtcttatcgtatctcattcattatcatcaccgaatctcacgtattgtcatcggtgtatctttttctcacttgtagtcatcgtattactaaattataattctaatttattatactcactctaattttgattccaattgtctaaaaaaaaaaatctcttttttattattatttgagaaaaaatatcgtttgaatttaaatttaaatttcaatataatatatttagatatttatttattttcacttttttcttaatattttttaaaaataagttaaatataaaaaaaaaaaaattattattttactacaaccgaaccattcatagtgatattgtatatctttataaatatcttaattaaaaataaaactatattatataatagataccaaccttatcactcattttttaaatatacatacctcacaaatagtaaatatcaattaaaaaataattaattaatttaaaatgaaattatacttttgtatctttaatttttatcccttaaaaaaaatataattcttaaaaatagattatcatcaaactattttctatttatcacaactcattagaaagaaccactacatattcatccatatatacatattgaagatttcgatttaaagtcagaatatataatccacaagagaagaaattagacccaaagaccataagcggattctttatagggtacgctgagaaatctaaaggttacaagttttattgt

SEQ ID NO: 121160 - DNA, 1052 bp, Cannabis sativa
  modified_base (61)..(70): a, c, t, g, unknown or other
ttataacttttgctcggcgacaacagaaaatgcaatggatggttagtttgatcacatgggnnnnnnnnnnaccttatttcttagtgggatgtattttggagaaattaaaatatcgggttgagtggggttatggattttgaccattttacccctagttttgaaagtgcctaagttttaagttaaagagaattttagtaattaaccaaatgtgtgatttggtggctacctaagttgatgacaccttcccattctttttcagcaaagattaactaagttaatccataattcatttagagaaaaatcaaataaaacctctctccttcccttctttctttcgaacccagatataaccaaggaattggttgctgatttctggtgttttttgcaaggaattgaagggaaaatcaagttgaggtaattcctagcctatatattgttgttagtttttcaagtttttggtactggtttcaagtagtgattttgagaattaggggctgttagggtttaattcttgtgtagttcgaattgtaaggtctatttgagttaaatttagctttttgcagctgatttttgtgtatggggttggaattgtgcaagtttgagttttgaaactcaaacttgggtctttaatggcataatttgtttccgtgggtttttctgtgaattattggttgaaatatattgtgtataccctaattaggtactctggaaagtttggttgcatttggtggagttttgagcaagatttcgaagttttggggaaactggtataaaatcggttagttgattttaccagtacctgtaaaaatggttagccggttttggcagggctcccgaataagccattttctcaattctggtccatttcagtgccatagttgggtgttttcctgtttcttgagttagtgtaatccctagtgaatataatagaacctagagttgtaggtttgagtttctgaattagggttttcgagcatgtgatttacccggttttaatatgtgattagggcatccatccagcacaagactttccgttcaggtcggccagcaca

SEQ ID NO: 121161 - DNA, 757 bp, Cannabis sativa
  modified_base (165)..(165): a, c, t, g, unknown or other
  modified_base (711)..(727): a, c, t, g, unknown or other
ctacagagattaaacctaaacaatttttaaacaatgtgagacttttagtttgtacatatgattttgttttcaaataaaataggaaaatgtgttaaaagataggaaaaatagaaagaaataattataagaggacacatagacactctttgtgctttcttttatatntatatatatatatattgatgattttatttttcatcataatatttcgatggttaataaattaattaaaaataatctcaaagatagaacaaaatgttattactatttatagaatgcgcttaatggagagaaataaacaaattataatgatatatttatagataaaaattagaaatgttactatttcgataactttttgtaacaattagatattacatgcatattaaaaaggtaatacatattaaacaaattatgtaaattagaaaattattaaaagcacggatatctagctttataaatttgtttccaaaattagtattgtaaataagtggaatatggagtgtagtaaatttcactatatatatagtacgtatctatatatatatatatatatataaatatatatatataaattgaattataagcaaggtaatactaaagttcagagaaattaatgatgataacttatttggtgtaatatctttatatattaaaagtgcctatctaacggcattttttgatttaacattcttggtttaacagaatatnnnnnnnnnnnnnnnnntattctgttaaatttaacgataggtttaat

SEQ ID NO: 121162 - DNA, 595 bp, Cannabis sativa
acttcttgagagtaaggggtggtaattcgtgttcatgaatcgtgctcatatcgtgtcgaggcttaggtattattatcaaatgtcaaactcatacccaacctatttattaattatgtccaaactaaaacctaaactcaataattggttgatctaacccggctcgtttgtataaaagattatgctttaatttttgttaacttatcaacatgttaacaaatttatagcaagttaaacacgtttgtaaccattttatgagttatttaacatgtttatctcccatttaattaactttatacaatttaattacaaaaaaatagaaagaatagtatattttaaattaagatactaaaataattgtgtgttttgtcacattgttcacgtgggagtgatttgtggaatctatattatactcctaaactttgtaatagggttttggtaatgaataattaaaatcaataaaaaaaatactgatataaatttttttttttttgataaattgagactgactctctgatgcttgtccaagcaattagcaacttagcatcttgttcaccaacttttaaagatttggttcttgatgttaaaaatctgttat

SEQ ID NO: 121163 - DNA, 1688 bp, Cannabis sativa
acaataaaaatgtaaccattgaaacctcttccataattttatatatgggtgcacttttaatatgtattactaaagaatgagtattattacaaaaatttaagtttttatgcttaatttttctgttcaacttaaaaaaatctattatatgggatgagattattccatcagttgaaagaaataataaaaaaatatattatttggcaaaaaaaaaaagataaaaaattgagtttagcataaattttttttatataaacatatttttgatatagtgcaaaacgagatagtttttaatatttttaaattaaatagttaacttaagtatataaactcaaaattttattttattatttgttattagatcaaaatctaatgatttaatatttttaaaattaatatttatagttaaatttctttagtaatcatcaatgagtaatacccattgaaaatcgttcctcttatatatataggaaatgttttagtggagacatcacttttgtccttattgtaggaatgtttatttattttttatttttggtacctaaaaaaattgtatctcaatttttttatatgatggtttacattaaaagtatagtatgtatctattcaatttttgaaaaattctgaacaatttactgtgtcaaaaataaaatttaagataaccagttacataagtataaaataaaataagcatgtgtgatactctctacttaaatcctatttttgatatggtaaattattcacaatttttttgaaaacaggaagaatataaactatagaaataatgtacagtaccatataaataatttggtatataagttttgtatataccgaaaacaaaaaatgttccacggtaaaggtaaaaatgatttgcctccttaaaaattctcatttatatataggtgcactcttaatggatattatccatgaatgagtagtattagaaaaatttaagtttttatgcttaatttttcaatctaattagaaaaatctctcatttttatattatatggattgttctatcgcttggaaaaaaaaataaaaaaacggctattcaaaataaaaaagtgttgagtttgacttaaatattttgtatataaacatatttttgatatagtgtaaagagagatattttttaattaagtagctaaaattaagcataaaaatttaaatttctattttattatttgtcattggatcaaaatctaataatttaatatttttaaaattaatatttatagtttaatttatttagtaactctcaatgggtaatgctaattgaaaagtgttccatatatattggagaagtcaatattttgactttcaatacttgaacaaggtcgttcaatcagaccttacgaactgaggtcttgattcaatgaaatattaagatgtgccttggtggtgcccaaagagagcctcatcagactgaatatttcgagcgggttcgacccgaacccgagcaactcgcctgaacctgaaccggtgaacctgtaatttttttttaaacaaaatgttcgggcgggtcgggttcaatgcggtaccctttgggcgggttcgtgggttgagttttaaggagtaccgggtttcgggctgaactcgaacccgcctgccaacccgcatatttaatatattatatatatatttttatttttttattacattttatatatatattaattaaaaaataa

SEQ ID NO: 121164 - DNA, 799 bp, Cannabis sativa
tatgatcgttattcatactcacccctgcctgctcgagcagcagcacttgtattaggaaaaagagattcacaatcttcatctttaattttaaccttgttcagcgaagctttttcatcactgcctccgaagttttcctctgtgctcttacttgaagaatgcaaagcatcaggagcagcaagtttacgatcacttggtgaagctatagttttctgatgttcgcttggttcattagctgctgaattaaacagaccagtataagtctcatcaatctctgctacaggttgtgactttccaaaaagtggaatttcttcatagtcaatttgagctacatgaacagaatcttgataagctggcgattctctcctcccaagatcttgtgaaagttgtcccatttcttcaccaggaaaacttgcttcaggtgaggtaatatcagattcagaaccactactgcagatactatttggtggagataaccattcattatcatccaaagaagtaccagcaaatgcgggaaactctttagtatttccagaatttgatgtggggaggttttctctctccttgtcatcaaattcagtagcatcagcagtaaggtctgcgcttgactgatcaattccttgtgattttacttcctgactctctcctagaccttcaagagcctggcaaatatgggaaagaaaaaggaaaattaatagtaatttgccattgccaaaatttaaaaataatgatacataatgaaatatcatttacggaaaggccgcaccttatgaagatttccagcatggaaacttgcgatttg

SEQ ID NO: 121165 - DNA, 950 bp, Cannabis sativa
tgtacggcttggcataacccaagccaattcaaactcctctagcgcatgtctccataagtatcgaataaaattacattccagaaacaaatgtccaacatcttctccgctgcctttacaacaaacacaccagccaggggagatgtaaaggaaaggcttccttttttgcaccttgtcatggacactcactttgtctaaagcgacgagccaaccaaatactttaacttttgaaggaacacagcttttccatagggtcttcgtccaagccaagtccccagtcgatagatttgatgtcaaccaagagaaggctgatttgcaagaaaatactcccgatgggtccgatttccaaatgcgactatcatccgaaatactcaatacttttacatgttccaccttttgcattaatgagatgaggcttcgcatctctctatccatcaagttccttctaaacttgaaattccaattctccacccatccacctggtaacccttcatcacctatcatttcttttataggagcattccttccttttgatatcactgctaagtcagggaattcattaatcaaaggggaatcgttaagccaggtgtcttcccaaaaccgaatcctatctcctctttcaattttgaagcgtaccaatcccaagtactcgtcatacagatctgagatatccctccacggacctttgggagacagccgacttcctttcttagaatcccaaaaaatctcagccctcccatatctgcttaccaccaccctgtgccacaacgaattttgctctaaaggaaatctccacaaccacttcataagcaaacttttatttctcaactctaatctcccaattcctaaacctccctcttcgcgaggcctgcaaacctcatcccaagccactaaatggtccccacctatagactcactaccttcctaaaagaagtctctcatcattttctcca

SEQ ID NO: 121166 - DNA, 725 bp, Cannabis sativa
attccttttaagtaaacatgtcattatatctactataaatattttctaaactcaaagaaagaacaatatttttccacgctcttaaaataataaatgtaatatttaactaactattttgaaaatataaatttgagaaattcacgtgaaaattcactcataatgggaagaaatcacaaccacatattttttttctcagaatctaataccaagtgtagctattatttcacatagaaaaaataaaggtgaagaattaatatatagggacacgattttatcccgttaatgtatttaagggaatttattctgtgatgtaccctgaccattagatggattagttatttgatcttaggactgaggttaatatatgagtatttaggatgaaaaaaattggtaatcggtgaagtttttgtaataaaaaattaataaattttaaaaaatgaaaactgacatgaccaccattagtcatatcaacctcaactgtcctcctctcttcttcttccttcttcactcatcgccctcttctacttctaacttcttcttcttttttttacattagggcaaaacttcattttctattttcgtttcagattatccaaaactcccattttctattttcttcacttcgtttcatataagatggtcccactgcctctgttgtttttacacaatcgatgaggataataccacttatgttcttagatagaaagtcacggtaccttgtcgta

SEQ ID NO: 121167 - DNA, 1653 bp, Cannabis sativa
ttttgtcatttaacaaaacacaagatctaattggtaacttttgcaaaacagagggtccaaaatagtatttaccctttaaactattaaaatgaggtataattgaaaataatcatttttaatttttagaatttagaagttgataagaagaggtagtttttatgaataataaaataagacatttatcctttgttggttcaaaatcaattagcatacaagtaaataagggaaatcttgtagagattaattggttacccaaaaaaagacttagtaaatgaatgaatgaattattggaatcaaaatggttgcattatccaaaatgatcacatgtttacagctatagaagaagaatatttatgaatgaattgatcttatttattttttatgccatggtggaatcatggagtggaccactcaattaaaataaaaccctaatcaaatatataaatattaagaccatgccattttttttttacataacaagattataaataaaattgaagaccatgttagagcatttccattaagtgattgaaagctaaatatagaccatttaataaaaaatttgtgaaaaagtaatgtaaatttagcatatagtaaattttgtgccaaataataaatacattactttttatatttatatttatgttatttatattattttattagtatatttaattatagcattaaattataaagtatttatattcttttttttattgttctacatattaaaataataataaaattaatgataaagttggtagtttttttttaataaaaacattaattaaatattaaattttacatcaaagttttataattgtccattgaaacacaatattaaaatttactacaaagttatttttttatgctaaatgtaacacaatatttatatctcctattagaatttgaaagataatgattcaaattcaaatggttttgtccatttgggttggaaagatgttattatttatttatttattaaaaaaaaatgcttaaaggaaacttgtaccattcctatgtaccacattgatataaaatataaatttgaaatttacataaatgttataaatgttatttgaagattagtgggtagggtttaacctaggggcggagccagagtcgaaatttaaggggggccaaactatattataaattaagtgacagataattcaaaatatattattaatatataattaaaattaaaatacaatatgtctatcttagatattatgaaagtcatatataagtgaatttatactaatttatttaatatattttttttttatttatacactagcaaacaatcacttaaaaatatatcttttattttgttgcgaagtgtaatcttcactatattcatagtagaaaaagattgatttgtactaattgtagaaactggaagtgtaaaataagagttactactttatacacaaatttaattttttttacttttttagtttttactaacttctgacataaataaatcagaaatggttgctaaaatagtaaaatcaagaaattttccacttttttaaactaattttttgaaaaatactgcgaagtggtaatgatctaactagcaaataaactaaataaatattattaaagaatataaataaatactttaaaagaaaaatgacacttattatt

SEQ ID NO: 121168 - DNA, 1498 bp, Cannabis sativa
ggaaacaagtatctgagggacgtcggctctagtgtacatggcgtggcttggttctaggggctacttactaaaaaagaatgactttctgatgatgtaagtttcttaacaaaatattatttgttgttattaactactgttatttattttattttttgtaatgttctaatgtgtttgtgctgacttatttgtatgagttatgcagcatttggatgtggctttccatatgattaggaggcggcaacacttcttcccagagttgtacccacataagtgcactatcatgccatcttggtttctttcatcgttgaagggtcggtgggacgcttggaagaaaaatactgaaaatgttggctttctctgggatgagtccatcttggaacttgtacgtggggatccaaactaattcataccgtcttggaaggatatggagtgcatatacatggccatcttcttggaccgacagaaatattggatcactatggacgtgaatctgaaggaagctgttcgtcttcgattcaagtattgaaactctgaatcctaacaaattgaagacgttgatggacgcttggtgcattttattatccaaattggtggaccagtgtggtgtatgtgacacccattacatggtgatagtccatcaaatgacagcctccgaaagccaggtcagaacattcgactgagattttatggaaaataaagttgtaccttagacaaaatcaaggtaatttaagtgcatttttgggaatacgtttaccaattaaattaaaaaatttattattattatcctctatggtttattaaagtttgtgtttaactactattgcagcgacgattgcaaaatgtacatcataggacatatcgagcataagctattggatctaccattcgttggagtagatgatgaccatatgccactcttccgtcacaaatggggagtagatttattccacaagaacttgtcatgaactttggatgttttatttattatatttgttgaacaacctttactataattattttaatagttaagccatttaattataatatttacaatttttttacaaaaattaaacttatttttatataaattaaaattctgtccttataataaatttttaaataattatttttttttaacaataattagatgatgaggcctcaagctagtggtgggcctcaaggttataataaatttttaaattatttttttttttattataaaatggctcttgagctattttctaaaaagacatttaaacatgagtttaatagttgttgccgtgaagagtttgtgaaattatcttatcatattctcaaaaaatgtcgaggcttgccacttgcaataggggccatagctagtttacaatctataattttaaattgtaaagagtttttctataaaaatttttatatttaagggcaaaaaaaaattgctaaaagatccttatttaataataaattatgaaaaattaattaataattataataaatttaattt

SEQ ID NO: 121169 - DNA, 1163 bp, Cannabis sativa
gatatgagcaaggcatacgaccgcgttgaatggggttttcttcaagccatgttgaggaagctggggttcaatgaacattgggtaaatttggtaatgaaatgtgtctcctcggtctcatataagattattgcaagtggtcaagacattgaccctatcattccctcaaggggtttgagacaaggtgatcctttatcaccgtacctttttatcttgtgcgcggaagggctctctcttttgattaaagattatgagaggttggggaagatccggggttgtaaggtggcacgaagtgctcctgtaatctcacatatgtttttcgcggatgatacatatgtttttgcaaggcaaatgaggaggcggcttctaatgtgatggaattattaagtcatttccagcaagcttcggggcagcaagttaatgtgcataaatcgtctattttcttcagctctaatactacagctaatactcgcacacaggtttgctcaagaatgggaatgtctgaagctggggataatagtacgtacttggggctgcctaatattgtggggaggaataagacggctttgctgggttttcttaaggaaagactacgaaagaagattcaagggtgggaggggcgttttctgtctaaagcgggaaaggaactccttattaaaactgttgcccaatctcttcctagttatgcaatgaatgtcttcttgctaactaaggaaatttgcaatgaaatggaacaaatgatgtgcaacttctggtggaaatcttcttctaaggatagcaaaggaatccattggaaacgttgggatcggctcaccttacacaaatccaaaggaggcatggggttcagaaatttgcgagattttaatgtgagtcttcttagtaaacaaggttggaggctcctctctcggcctgactcacttgtggctcggttactcaaagcccgatactactccaaaggtgatttcttatctgctgaattgggtcataatccgagctttgtatggcgtagcatctttgaggctcaaggtctagttaaggcaggggccaggattcgaattggtaatggagcaagtacaaggatcttacaagacccgtggctgcctggcgaggatagtccgagaataacgtctacacatccagcccttgttgatcaaaatgttcaatct

SEQ ID NO: 121170 - DNA, 2483 bp, Cannabis sativa
atttcaccttgagtcactttatctcgtataaagtgatacttgatttctatgtgctttgttctgtcatggaacataggatttttacatagaaatatgcaactatgactgtctgaatacaccatgtaggcacacccttaagtaattttagctcattcattagtccttttagccaaatagcttcctttatagctttagttgtggcaacatattcagcctctgttgttgatagtgccacaacaggttggagctgaactttccagctaacacaattccctcaaatcataaagaaataggcagatgtagatctcctattatctctatccccagcataatcagaatcattgtagccttcaattatagtattagcattctatttcttgtagactaatccaaccttagttgtcccaagttggtatttgaacacccatttcatggccaactagtgaacttttcgtggatttgccatgtatttgctaagtacactcatagcatagcctaaatcaggtattgtacttaccataagatacatgactgaccctacagcattagaatagggcacatccttcgtagcttcactctccttttctgttttaggactttgctccttagaaagtgtgtactgactagtaataggttgcttaacaaccttagcatctctcatagaaaatttatctatgatcttctcaatgtagtcttcttgtctaagaattagtttactcttgtctatatcccttaggatagaaatctcaaggatcttggtagcatttccaagatctttcatttcaaattttgtcttgagcagattcttgaccatatcaaccctagacctttcttggcttataataagcatgtcatctacatatagtaatagatagatgacatcttttatagagcttcctttgtagtatagacaagtgtcatggtagcttctgttgaactcatgctttaacataaaagcatcaaactttctattctattgtctgggagcttgtttgagtccatataaggacttaaccaacttgcagaccatttctttcttcccttcaatttcaaaacctttaggctgttccatatagtttaagtcagaaactttacaattatatttttttatcaaactgtgtgacacgcagtgtaattctgtggatttaaatttagtaatgcagtttaattttattgcaccaatttttataaatttacgcaataaattgcatatttataagtaaattttaatttaaattccaaaatataatttatgtcttatctattaaaagtaattatctttaagtgtatgtattacaatattatagagtaagatttcaacattaattaaaattaattcaaaacaccctcaaaaatattatttttaattctataacctacacataacttttctaaaatatttctgttaatatataataacattagtaagaacatttatcttttaatttcataattaacttttttttgttcaaatataatatctaatttattaaggtttctcctttctaaatttatagctataggaggttattttttttttccaaccaggcctgccagcctttcctagtataggtgcagcttggtcaagattgtattttactattgtgattcgatttttattattacgattagccttgtctctatgataggtgttttagtcttgtctctattacatagttttgagtgttttagtcttatctgaatgacctagttttgttttgtttcgttgttggttcttcttttgttctccgatgactcgctatcaaattgttgttagtgtggttgggaataacaatttctctacgactgaaaagattgttagtagtgtaattacttaccttgctcaatagttgagtgctcaagctacgaggttgaatgaacctgctgcaaccatttattttgtcttctgagcggtagacggaactgaatataggtgttcttaagattaagtgtgatgctgcaatctttttcatattattttatttttagttttttgtcaaaatttaagaattaggtgggtgattatttgaattgtttttctaataataatcctggtcgtgtctccaacgggcaaagccgaccctgagatttggtgagccttagaaaataaaaattattaggctttttatttaaaaattatatagtagttttaaaaattactaaaaaaatatatatacttttaaaggaaaaatattttttttcgagcccttgagctaggtgggccttaggcgcgggtctagtccaccttagtccaagcccgaccctactaacagggagatgtcccaattaaattgcatgttattatcttatctgattgctactaataaaattgcatgatttatattaaaaataaataaataaaaataacttttcttttattttttaaatagggaaattttatttttaatgcttaaaaaaataccctctaacaaaatttagacttctaattaatttatacaattaaatgctattattttcaattt

SEQ ID NO: 121171 - DNA, 1427 bp, Cannabis sativa
atatatatatttatatataaagaggagtgctaccgtcagcctccttttataaccttttattcaatctttacgtctgaaaatatatgccagaatattttttataatttttttttacggaagtgttcgttatgcttacaacatcatccttgtaaatttttgaaatatttcgaatagtttacagtgttaaaaatacgtttgaagttttttgaacgcgcgtggtaaactggaatatcaggaactctatttttggtactgtaaattattcagaatttttcaaaaatttacaaggatgataatgtaactataaagaatactgctatgaaaaaaaattgaaaaaaaatatttcgacatatgattttgaacgtaaaaattaactaaaaaattgtaattaaaaattgtaattagcactcatataaaaaatggaatgtttagtttgggggggtggaatgaattattggtataacttaaaaagaactcaacagccaactacgcacgtacctaacctattggactttaatttttttttatcaccataagtctagtctagtctatatgtctcaatatgaacgaaataattaatggacacggtgatgcgtaattgagttagaccaaagaaaaatcaactcattttcttaaattctatattttaataatggtttttatgtaaaacctcttaaatgtttgagaaatctaacatctcaaatgtatttgagccattgaattaatgagaaaagtatgtttctggtatccaatggtcaatttatatacatgtcaaaagtaagtgtaatttatttgacccaaattggtgaccaactgagaatagtgtgttttatgtactacattaaatttaaatgacttaaaataatgagttaaattgttaaagttaaaatagacttaattttatcaaaactttccattcatgaagaacatagtgaagagatattgactgagtaacaatggcagcaacagtgaattttagaaaatctatatcgatatatctatataattctcttgctaagcaagatgacatgatatcctaattgagctttgtttatcattctttaattttttaattttttcatatgtttttataattttctttaatttttggttaccattaccctttaagtagaatgatttaattgaaaatattagtgacttctcaatttttttataactcccattctatatatactttaattattattagtaaaaaccatttaatattagtagtaactgttaaatattttccacattgaattgtttactttcactcttttcctacgtttttttttaattgaataaaacaaataaatatatctactattaatttaaaactgttgcccctgattttgtccaaaatacgtggaccaatcggattgagacacgtagactgaaggggcttaacgttgggataattcagctaa

SEQ ID NO: 121172 - DNA, 1172 bp, Cannabis sativa
gtagatggactaatgatgagaagatggagggaaaaaaaattccacgtaaggtgatgcattactttccgttgatacctaggttgaaacgcatgtatagttcaagacatacagcaaaggagatgatatgacatcatactggaaaataaaaaaaaaaagggctaatgcgtcatactagccaaccatgtaatcagaattatttttattctgtaattatatttaagatggaatatcttaatttttgataagtcattaataaatagggtatttttgtttgttaattagtaatgtattatataaatataggtatatatatagagggagagataattttcttttttggtgagaaagattaatagagatatatatatatatatataagattaattatgtgtgtatatgtgtgaggttaagggggagtataggaactgaccaaaaaatgtataaattaggatgagcacattttcccattgagtatacctcactgacattccaaattagagataaacaagagtgtcctactaaaccaacccacaaaacactcagagacatgatgagtctctcaaaaccatctagagtcagatacattccaacatcgattcccttttttcttgtattattatcatcacaccaatcagtagatccacttacacttaaatacctaatgtttctgacatgtatagttcgagacatacaacaaaggagatattatggcatcatgtgtagttagtgtcatttatagtgaagaattgtcaacaataagatgcataactttcttgtgttgttctaaacaattattgacatcattgtaaaacttttcaacatcattatcatcataataatgagtatcgttatcgttaaaaaagagtgtggggactgaatacggaatggatttctaacgctttgaaagaatgcatgtcgaaattatatctttagttgggagaaacgagagaatgtgatggattagttcatcgagaagttccgaaattctgtctttatcacaaccatccaccaccattgttgttgtcatgatcttaaaagatttaggagatttaggagttgggatcgagttaggaaggaagagacccttgtaagtatattttttgaaggtttgatttagatttctatatcaatgcatgcgattttgatttagttagggatatacttcatttata

SEQ ID NO: 121173 - DNA, 1109 bp, Cannabis sativa
gcagttcgactaaaatatcaatatggttggcaaggaatgatttgatttgaaaggagcgtgttcgaagtgcgggagatgtggttgcttttgcattttcaagttggtgatggttcagagttttggattaaattaacagtaggcattaagctaaatgttaatacaaccattttcgaacatgagttcaaacatggattcgggtgtgtggtcagaaatacgggggggagatgatttcggcttttgttggtgttaaacaaggcagagttgcaccagaactagcagaaattatgggcataagagtttcacagtatttacaaaaatcgagagatttataaggaatttttaaaaagataatcttatctttttaagaaaaaatcatttaaaaatttaataaaaaatagtttaaattttaatcaaaattaaaaaaaaaagatttaaaactgaaattaaaataaaataggtgtaattaaatccctaaaactaataatcttactctttttttcttccctattattttcaaaaatctcagattcaaaccaattctacacatactatactaacatttatacacaaataaatagtaatatttagatgttgagacatactaagattcatacacaaataaatagtaatatttagatgttgagacattggtcgtccacagataaagtgactcttttttaattaagttattttaacattaattttttttttacttttttattgttttttaaataatttttaagttaatttaagaaacttaattacactatactcccacttcagagactatgtgggaatagccctttttcaagttatcgtgaacgagtatagtggtggtaattaaactttatcattttcgtttgaggtttcgaatattatatttcacatttatatttatttatttataatttttatgtgtccaaaattcaaacattaaggatagattaggaaaactcttaagtgtacaataggtttattatagaaaaacaagttgcaaaactatacataaaataatttttttttcctttttattttctcaagtgagaaaattttagggtaaataccattttggactctgtgttttgcaaaagttatagattggaccctgt

SEQ ID NO: 121174 - DNA, 756 bp, Cannabis sativa
tttttttaataaagtgaaggaagattaaagagagaataaaaagagatgagtaaggtgtttacttagaaaatgaggaaaggtagatgatgggagatgaaatttttaccaaaataaaaaattaaacactttttaagaaatgtggtggctacggtgtgctcgagaaaatgtggtcgtccctgaaacccaaaacccacaacctctccctcgagtctctctagaaaagaatggcgaagaagaaaaggaaagaaaggaaataaaagaaagaagaaaaaaatacatttttattttatactaattattatttttctaaatcattttataagtataaaatttatttttataatttttaaataattttattagatagacaaatattaatgtgccacgtgtatataagtgtatatatggatgatctacggccacaattaacaaaataaattaaatggaaaaattaatttgctagttaagaggaggtttcaccatataaaaataaagattttggggttaattgtactaataggaaaaatttggagtgtaaccgtaatttaattgtttttaaattaatgataaaattattattttttttatatatttttataaaaacactaattaaatattatatattgaatcacttttttattttttttaattttttattttggggatgggaatatttgaatttgggtcctcttattttgagaaaaagtgtgtaactactaagccaataacaagagcccaatactaaaaaattaaggg

SEQ ID NO: 121175 - DNA, 1316 bp, Cannabis sativa
ccaagtggctagcatctatgaacactgaaattacagctctcaaaaatgctggcacatggtccttagttccttacacagagggaatgcatgtcatagataataagtggattcatcgattgaaattaaatgctgatgggtctctagatcgattcaagtcgagacttgtggccaaaggatttttacaaacaccgggtatagactatgctgaaactttttcaccagttgttaaacctgttacagtccgcacagtattatcccttgctgtctctaagagttgggctgtcaaacaactcgatgttagcaatgcctttctcaatggcactctaactgaaaccgtgtacatgaaacaaccacccggcttccttgactccagcaagcctgatcatgtatgccttctacacaagtccatttatggtcttaaacaggcaccacatgcatagaacaacaagttgaaaaacagccttttaaactggggttttgtggcatccaaagcagacacatcattgttcatttatcactctgcacaggcctttattatattactggtttacgttgatgacatcttagttacaggtccaagtgagtctctcatcaacaaacttatcacagatctgaatcgtgacttctctctaaaaactttaggtgaagcacattactttttggggttggaaattttcagagactcgacgggaatgtatctttcccaaacgaaatacatcaccgatctacttactaggctaaatatggaaggagctaaaagtattcccaatccctctagtgctgccaccaaactgtttctcaatgatggtgaacccttctctgattcgactttatacagaagcactattggtgcattacattatctgtctttaacaagacctgatatagcctatattgtcaacaaactcagccagtttatcaaggctcccactatgtgtcactggaatgcttgtaagagacttttacgatatttcaaaggaactatcactaaaggtttggtgcttcggcctacatctgagatgacacttcacagctactctgatgccgattgggcaagtagcattgatgatcgaaagtcaactggagggtatgtcatctttctagggggcaatctgatctcgtggactacaaaaaagcagcaagttgttgcacgttcaagcacggaaagtgagttcagggcccttgccaatacggctgctgaactcaaatggatatcgtcactgttatctgaacttcacattactctacaacattgtcctattatttgggtggacaatcaaagtgcagctgctcttgcagcaaatccggtgtttcat

SEQ ID NO: 121176 - DNA, 714 bp, Cannabis sativa
atacaagtatagtttaaataaaatatgtaaacaaaatacaataacagtacaaaaaatatgactacaaacccagaaattggtatgaacaatacaacaaaaaaaaaaacaaataaaattatcaaatccaaacattgccacttcaatcccggtcaaaaccacgaatcgccaccatcattgtcagcttgcaaagaaaaatatgagttaatcacagtaggtataaacataaattttaaccaaaaaagaaaaacacaaataatatgtacccttcgaattttaatcacaggaggagtcgattgccagttgaccgatcgaacccctgtaccattcgaataaggtagtgaatgaatcatcgggttattggggtgtgaagggcgtataccaggtctcttactgctatcaggactcaagttaggcgataattcattaaaggaagaatccccatttgtgatgtcccaaaaccaaatgcacaattattaggccgttgcatagtttcactagtaccctccattttctatctcaaaaagctaaaaccttcttaccaaaataataatacaaataaaactctatattaaaaaatcaaaacccaccatccaaaaccctaacatagaaacaaaaaataattataataagggtaaataccatttttgaccctctatttttcaaaagttaccaattggaccatgtgttttgataaatgacaaaatggaccctgta

SEQ ID NO: 121177 - DNA, 971 bp, Cannabis sativa
tgaaggcaccccaagaaaaaaaaagaaaaagatagaaagagaaagaaaaaaaaaaagaagaaaaagagtaaaaaaaaaagcaagaatttttttatatatatatatatctatattagtttaaataaatgtcatggtgaatttgagaattttttttttctgtgcagaaggtcacgtgaagaaggttgtggaagtgaagaaatttcaaattgggcaaagaactaagtttggggtggaaaagttatgttcaattgctatagcaatgatatttggcagcaaacatatcagaaaatgtgtggccgtttgcactctatgtgggaatatgagcggaagcgcaacgcagttatggagcgtgaatttaggagggtgacgccacaatttgagcccaagttcctgccgttcccttagcaagttctcgacccgtggggtggaccatcagcttcgactatggaggagccccacgaggactcagagtagagggagttttctaatacctaagctaatttctatttttctgttatgtgtcatttttattttgtattgtgctacttgtgtattatcttttgttgttggaactttaattttatgtcgtttatgtggttgttagtttgacattcaaagatttatgagtttttttttctgtggcctagtgttctgctcgatgattatatttttcgctcattccattattgttgttgcctaattttatttgttgccttttcatgctgaattgttggatgttctggatgtttctctttagtctctcctcactagtttatacttttattttcccaccatgctttgcatttctcatacgattgctacatatatatacttttaacatttaaaattagttagttcatctccttgaagctaaatcctagttagacttgtcccttagaaatgatttaggccatctttggacgtttgagcctttctaaccttccctataaaatcaatttttccctagtcac

SEQ ID NO: 121178 - DNA, 2213 bp, Cannabis sativa
  modified_base (1029)..(1039): a, c, t, g, unknown or other
agagagagagagagagagttactcctttacaaaatttgattatatgttgctcatatatttatggttttggcatttgaactattagtcattagagagaccttgcaagctagaaaggacaactaatttacaaaatttttgtatggaaactgattgtttggcaatcattagattgatgaaggatataggaatgttgattgctagtcaaactctaagataacagaaacctatccctgtatataactgatttcaaaaagaaaaaaaatcctcaaatttcataaaacccacataacttaaattatggatatgatataacaaaatgttcaaatgatacagtatagaaaacattatgaagacacttgaaaccaatatcaataaattagggaggaaataatgttggacttacaatcttcttgagagaatctaatagtaggaaaagcatggtgtggaagaggatatgcccaataatttgtccaagttagtaactttagtaacctacaaattcaaaaccaaccaaaattttataaattttaatatgtatagaggataacaatttgtaggcgatatgtagtggtgaaagccaatgaaccctattattggattggtttcctattgatttttactcaattatactcttactctctcacaaagtaaaagagaggaatgggttctgagtgagaggaaaaaaaagttgatttagctttgtggctttgtttctacatgtaagaatagatttttattttaaataattatgatgagggacatatacttctttattgctgtaatcttcaagaattgttgaactgaagcctgattttgtactttcttttctactcaagtgccattggcatggaagaaaagtaaaggcccttgagtgattatcgaattgtacttcttcaattttttaaatttggtgattcacgtaatacattttatttctcacgagatggtacaatagaaaaaggctaagtgtcaaagctctaattttaagagagaaaaccttgtgggtagttttctgaatataaaaaatgnnnnnnnnnnnctctccttttataggtgaaggatgtccttgaaaataggaataaaataatgaaaaaaatacaagttgactattttagatcgtagatgatgatctaacggtaaaaattaacttttgaggttgatcttcaattttcagagctcgggtcgcgatggcaagatcgcctccgattaagccagagcttatttttgtaactcacttgggggcaaaatttggagtcgataactttagaattacgattgaagtgtgagacatgacttgatagagcactgaaacaatttcgaaacacacattgaatcacgtcaagcgtatcaatattgagtgatatccagcacccaagttgacatccagcgctcaagttgacattccaacgctcaggttgacattccaacgcccaggttgacatatgacgtcaacctggatgctgggtaagtgaaaaacatccaagggatgtactttatgatgcctaagtggtattttgacatcacttcgtcgatttttgtattttggcaaagcgggtcaccagctcttgaagatgttgctgttctgtaaaaatgagagacttaaaactcttcatttccgagtggtttttccatgttggaaatgagataagcgaagttgtaaatttgaattttctaacttcatggatcttagttattgtggaaaactacacagatggtccaaacagaataagaattggataagcaaaacccagcacactaggccatttgtcaacctgggcgtcgggtgcttgttttggagcttctaggatgttgttttgatacttcttaaggttattgaacttgaggatgaggtctcttacctcatttttgataattctggattgaatggtagagtcaaatttggcatttgaatgatcaaaatcagtgcacagttgattgtcaacctgggcgctgggcccagcaccaggtcaacctgagcactaggctctgcttctaagacatcaggttagtggttttctctttgagttttcttgaaacttcattatgcttagaacactttttttgagaacttgattataaatagcccaggttgacaatatgtcaacatgggcactggccctgtgccaggtgtcaacctgggcgctggttgttacgaaaattatgaacaatacgtaagtgcacgtaatcaagtagtaaactcacacaagtgaggt

SEQ ID NO: 121179 - DNA, 768 bp, Cannabis sativa
acaaaaatgtcatcttttcatcccaatcaaaatattaagaatttctaaaaaaatcccacaaaaccccaactttcacactcccaaacttatacacgaatataaaattagagaccccaaaagaacccaatttggcattttgcttaattccaattttcatgaatcgaaattactaactacccaactactaaaagttagaaacaatgccacccataaactccaaattaagaaattgcataaaaaaatacactattcccagtttctaatttctatatacaaacaattataagcatacgaagaacataaatgggaaaccagaaagtaatgaaattgtaaagagaagaagataattaccaggggaatgaagttaaaggtgaacactttggagattttgaagtgagtttttggtaagtggggaaggaaggaaggtgaagaaggttcatagaatggtatatatgaaaaagtaaagatggctaagcaatcacacagcacttcccacaggaaaaaagtaaatatatttatattaaaataaaattattgggttaagaaatttaattcctttattattaaacttaaaataaatacagttaaattaattaattaattaattttttaaagtagtcataagcatataagcatagtttaatggtttttatatatttgtgtagggaaatttgattttctatacttagaaaatcaaaatttttttttcctaaaccaataatttaaaccctaaaaaaactataccttttttttcaaaactccaaaaat

SEQ ID NO: 121180 - DNA, 1578 bp, Cannabis sativa
tgcttttggtgtgtggagtcgtgtgtgtgtttcagaggccctcgggtttagggtttagaacagaacggaggaaggtgttggtgcatttttattgtggtgttggtgtttagcgttttgcggttgagagtggttggttggttgggtgtgtggtaagtggaattaggcaaatatagatttggaattagtgactaaactgacagaggttctaagattagacgaaacagatgatcccgttgtcaaattgaataaagatacccttgaagaaggtagaaagagattggagatttttttggtggggaaggtcattggtcctaagccatctaataaagcaagaggttagaatgctatgaagagtttttggaagattaaccaccattttcaggtagaggaattgaaagtgatgaatatcttttgattcttttttggaagtagagaggatcgacaacatgtttatggaggtggaaaatcgatgtttgagaaacaattactgtgctttgtgaaactgatgggatttaagggaaatttcaaagatggtttctgactatgcttcttctttgattttgattaataatgtgtcgcttgtgtgtatgtcaaggtctttgctcaggaatagggaagtatgatagggaaagttgaggatgtgagagtggctaatagaattatgaagatccgtgtctgcatcaatattactaacccactcaaatgttgcttaagaggggctattgatgagaagggtaatgaggtatctttgctctttcaatatatacacctcccaagattctattatgattgtggtattataggccataaagctttggactgccctcttaatgacttttaggatgatgaaataaggccacttcaaagtggactctatggatcgtggatgtgtgctccaagttctcgacctaggacacagggtcagcgtgttggtctacgtgagggtgagtcaaatattatcaatatgagagagctggaaagaatagttgatgttgttaagcgatcccgatcaagaagaagtacagtggaagagtttgctacaacatccatcttaaaaagttgagaatgagaagatgagctacgtaactatatgttggctactttggaaagtgatgatgtaattggggagctcccttcaatccaaacagtgagggttgaaacctcatcgctaacacctattcgacttaatgctaatgaggtgtgctcatcagtccttatggaatgccacaatactgtaatggatactccactacatgatgttgagctgcattccactagtaatttgggggagggttcaggtgacaccatctccccatttttggaggtgcatcactcttgccctcctaaataggtatctcattgtgctgagttccaaatgcctgctagaattaaaaagtgtgataaaagaaaggctattacatatttagaggctgagatggttaaattatttcaacgtacatttgagcctattatccaagcacaccaaagaagacttggaagaggtgtaaaatctcccttgataaacatggtgctagtagttcgccagttagtacaaagacatgttgggttttatgccct

SEQ ID NO: 121181 - DNA, 1674 bp, Cannabis sativa
atttgagtttaaaaatagaattttatctattagtaacctgttataggaggttataaaaatgtaaccattaatctaaataaacatatatttataaatatttatgtttttttttttaaaaaaaatatacatatataataaaatccatgtgtttatatgtaatagggtctagttatattaagacaagatcataatgtctattccaatttaattttactataactttttaattaatgataatattatggagaaacatgatttacgtgactttttccactctataaattatgtatacgtatctctctatatatatactgtatacacattaatttaaatacatatagtacttgattttttatggctataactataagcctagaaattaataattcatcaagttgtatgttttatgtttgagaaatgctaaaaggtttagtgtttattatttttttatgtgttaatattgttaaagatatttatagtaaaacttttttaatatttgtaattattacacatatgaccttaaaaaaaaatagcggtaaaagtactttattttacgattttattatagtcatactctttttagttgttaagtgtcaattaagctcgttaagtgccagctcaaaaataggtggcaatatatttctttagcttatttagtatatagtctaataatatgtcgccacgtattctaaggtgaaatttaatggttaaaaaaagatacgattgtaataaaatacttctactgttatttttttttattaaagtcatatgtgtaacaattataaatatgaaggagattttattacaaatatctcatattattatttgtgcaattaagtgtcaggtttcatataatttaatgtaataacttttaagaaaaatcgctaactaattacaatatgatacgtttaaaaaattctaaatactactgatatctaataacaatagtctttatttttggtatttatgttggctttgaaacattaatttttgttatttagttacttttgaaagagtatattaaaataaaaaataggactagaagaagtactactagtcagattcattgtatgaaaaatattatatttcatttaagttcaaaaaggaaaagaaaaaacagttgaaaagtagttagttgagcattattttaccaaatttattagtgaaaaaagtttttaaaaaaaatgctattaatttatacattaagtaattgcatggtttataaatttcataaactatttgatcttgattgtacataataaattaatatatttaatattcatattgtacttttcatgaagctttttctttatttatttgaaacttttttatttttttgcttaatttttatttgaaattttcatgaagtgaaaataaaacttatgaaatattctgtcggtttcatatgtatagatatatttttttattaaagcatatgaaaccatctttaattattaattttttttatataaattaatcaattcagaatattaaggtacaaatataatcaatattttttatataacaagacaaaagtcacacatcataacaatatacatttataaatttatagtatctttatatattaaaagtgcctatctaactacatttcttggtttaacagaatacacttaaaaataaaagaatattctattaaatttaacgatgttaata

SEQ ID NO: 121182 - DNA, 2033 bp, Cannabis sativa
  modified_base (32)..(39): a, c, t, g, unknown or other
ggttgttaaatcgacatacttgtgagtagatnnnnnnnnctggtaaaattaattccaacaatttggatcagaaattccctcatagggtggtatgttcgacaccttgaaatttggaggtagcatctttgattggatttcccttgagaaagatgattcaccatcaaactcatcctcgtcccatttacattctttggatatagcagacgctgtcatttgtgaaaggtcttcccattctttatcaagttcttgttgcttcttgctcaactttttctgaaggttcagtcgtatgtgctttggcccttcttcatggcaaggattaattggcgatggttctcacctttcagcaacggccttttggttgagtttctcctttagatcaccatcggttgtctttggcacagttttctttggccgcgacaaaggttttgggtctttgcaagaatgagattttggcaatgaagattttggcgtgttactcatgtagtattttgtcataccttctccctttagctctctctcacctttcctttgagcttctagctatccatgcctaacaagaggtgctttgacgtgaccttttaggagttcatttattttctgcatgttttcaacggtttccaccaaccttaagtttttcatccttaactcgttcatctcctcgtggtgaacatgagtttgtgatcttgaagtcatttagtaaactcgtttctcctttacgggtcaatagtgtgaggttctcggatctctcggtgtcgacagcatggggtgtcttattggcgagggtactctttgccttgactcaccttcatcctcaagtgtaatggaagcggtcgctccatcttgttgtatgtccgccgggacctcttcatgatggttttcttcttctctcacctgagtctttccaccattagtaccttcttctccagtggtaggtgttgggggattttaccttgaggcaatgagctgagtgttgtctaagtaaatctccacacagagagaaacttagcctgagcttatcattcccacaaacaatgccaaactgttgatggtgaaatctcgccaaccaaattgtagctagaaaattgaaacttggatgtaagacctaggacaaagatgaagatctagaaatataaaatcttaaagaagaaatgtagattaactatggagaaatatagaagtgtatatttctctaggtcaattattacaatgattttctaaccccctctctcatctaagaatggggtatttataggctcttatgacctgagatatacttgtggtcattaagggacaagttggctttatgtggctgcaagttgtacgtgcaggaggcgatcgtgcaccttgtaccattgtcgggtgttatgtggtcttgagttgcaggagtagtggttgtagagtacctatcatcgtccctattttcggaacgtcaaatgtaacgctataataattaggcatgctatagtgactttctaattacaatgaactcctattctaatcaaagagttttctcaaaaattgtgataaattaaaacttttgattaaatctaaacttttattaacattttcacataaccatacaaaaaggttaggatgtcgctttttaaacttatttacataatcaaaataaacttcataactttgtcgcacaacgactacaaaataagtccaagtgccctaagaccaaaatttccaggccatatcatcttgacatgtacaaccatccttgagctctggactcactgctgcttagcttaagcctttcctttacctacgcatgtaaataataattgatcgacattggtcacaccaccatacctaccataaccagagtaggaagggtggtggtcccaccaacacttggagtccctcgaggatcctgaagaaattccactgcgtcctcagctcgaagaactttttgaaccacctcaggataggttgttgtatcatttaatttaatatccagatcgtgtctaatcttggcattcaaacccactgtaatgaccgctctagtaatgtggattagaaaaggc

SEQ ID NO: 121183 - DNA, 5455 bp, Cannabis sativa
  modified_base (5353)..(5362): a, c, t, g, unknown or other
  modified_base (5418)..(5428): a, c, t, g, unknown or other
tagagagaaaaactgaataacatgcacaatgttataagtctaatttgtagtatttgtatatatatatatatatattaaaatattattaatgtgaaataaatataatatataatttagttatcattatatattatatagtttgtattggccaataataaaacatataggtttgtttgcatacgtcgtattattacatcgtattgtattgtatagtataatattaaattgtatttcatgcaatatttttctgtaaaattatacgtggtattgatttttatgtgcacctaaataaatagtatttaatataaattaaaatttaatataatattatataaaaatatgatatgtaatttaatttaattaatacaatacagtacaatacaatacgacttaatacaacgtactaaatgagcccataaaaagttacataataaaactagtaatttatttttggaagagaaaaaaatctggtagttatattataactctttatcacaattttaaagagtgtaattaagagaattattacacaaatcaacatgggataaaaactattatcatatagctattggagaaagttactacacttatgtaagtgattaaaatgaggtagaaaatattaaaaattaaggggtcaaaaagaagttataaaactccataatgtgttgtgcttacataagaaattcatgattttcaacatgggaaaatgatagggcttcgtttcagcttcttttctctaagtaacgtacataatctcatgttgtgagtttgaatattgaaattgtggttcacctacataaagacatacgagcttcaaaagggatacactggtttttatcaagagagtatacattgttagaaactcttttaaaactagataaatctagaaaactatttttatttttttctttttcttaagtacttgaagtaaaagaaaataaatttttaaatgaaggtgtaaaatattgttcaaatttagttatttttcatatatatatatatatatagtgacggattcaaaatttttactttgtggggcttatttatcattaaaaaatatttatacatatattataattattcttactaaacttttctattattttggtctataattatcaaataaaaaaagttatatttaattttttaaaaagtaatatttttattagtgggactagtggacccgtccctgtatatatgcggtgttgaaattacactcacatctcttctatatatgttatttattttattgttttaattgtaaccttttatttgatgtgtatttatgtttttgagttgtaaccttatttaatcattattattgtccttgtattattttttttttttcataaagttatattttgtataagttttattaattattaattatgttgtacattgatcagtattacaatttacaagtactcttctccggtaattttgcaactcattcaacaaatcaatattcagattggtattttctctcttttctttttcctctgttttcacatcatgtgtagatattatatgtttacattaaataagattttgtgtgtaaattgaaaaatatcacatccatgcattatatatattaattacttcttgattttatgaaatgctagaaaaaccagaagaccagctgtggatcttttgggatcacaaacttggaggtggctttcattccaatattaaatatatatgaattgatatgtaggaccatttaattatattgagagatatccgacatggcattcctccatcataactgtcatcacccaatttttagtggtttatgtaattgggtttatattcttcttgcgtcttcgacttttcctctagggatgatagagagagaaagaaaaagagagagaaggcaaaggcaaaagaaggagaaaaagaaatacacatacatatatttatttttattgtttcgccaccaaacaaaatagtaaatcagttagaataaactctaaactaaaatcacaataaggatataatctagcagttctagcaaacatgtgagccattataagcaaatctttacaatcttaaatgatcaaaccaataaaaaaaattgcttttatagagctttgaatagcttgcaccgcactcagtgagtcaattttgttgatactgttagtccatccacttccttaaattatatattttaaaataatataagttcatcttagaaaagaaatatcaaaagcatgttttacctattttaacacacgaattaatgaatcaagcactcaaattatttcacaacttcatatttagccaaattattcacaaatcacaagatattattatcaaaaaggtaaaatattatggtcttataattttttttttttttttaaaaatcaattatcataagtatacatatttttatacaatctttaattctttctcatttttaatttgtcagcctccatttaactcattctacctaccacacaaagttagttacaagaaaataatagcacaacaataaggagcaatattatgaaatttcaatattgtcaattttagcataattattttgttatatactaaattaacttaagggtcttttttatttttacacttcaaaacaattttttttttgtatttttacgaaattttacatagaaattcctattgtaactagcgctgcaacctaaatcgcaacaaaaaatcgtatagcaacccatatagaaaccactaaagaaactactttagaaattcaaactgtaaattaaaaaaaaaaagtatatgggataatttcccttaacttaatactatatatattttttttatttctttggcaaatcatattttatactatatattattcaatatatatatttatcattgatctaaaattaaaaataaatataaataaactttttattacgtaacattatctatagtctcattttttttacgtatgtatttctttttttttttttgaaagaattttacgtatgtatttcatctattcatcacagacaaaatttatgattcatgattttacaaggcacaataaatttaaaaataaatgtatttttttaaaagaataaatttataaatattaaaacataatctgaataatcaattatgcttttataggtttctaaatagaaaatgtataatatcaaacttttaagaacaaccgcgcaaagcatagtaaagttccctcgttaatataataatatgaaatatttttaagagtaatttttaatgttgtgattagagtagaaataatttttaacacttaatttggtgatagtatgacactaaatttggtgtactccttggagatgctctaagacaagggtaagaaattaatcaaccacccataataaaaaaaattattttaagacaaataaatatgacataataagaacaatatttatagcctatatggataatgcctaaataatttataaacaatgtaggaaatttagttataatgtatttgaagaaaaaattttgtgcataatttttttgcgtagttgttttttaaacaaaatagaaaaattttataaaattacaaaattttaaaaattaaatgaaaaaaaatgtaagatgccacctaaacatgtttatgctttcctttataatatatatagatatataaatagataaggaaattgtaattaatattatttcccttaataaatttagagaaaatatttataattattgaaaaaaaataataaacttcaagcgcaataaaataataaaaaaacgaagtaaagtaatttacactctttggtaaaactagcaaacccacaaaaaagatatagttcacttatcactttaaaattacataaatgttctatctcaatctctctacttaaatcccaatacactatatattaatttgtttcttcactctcatcacacaataaattcacaattcttttttcacaactcattatatttttctcctttaacacacaaaatacacatttataaagttacaaaatttaagcaccaagacatttcaaagcttcttctagaagactcttcaaaatttgatcaccaagagtttcattttaacacccaaaaataaattgcaactttacaaatatagataaagaagagaaataaataatttgagtcaaatcttaacatctttattgtagccaactccaaacaaaactagaaggatatgatcaatatattatgtctcctctaaccatttgataaatttgtccaaattttttgaagattgaccatctttagcaatattcttcagtatcatttccttcaattggatagactttttccttatttcctcatcacctaaaagtttattcactttaatttctatttcttgactaaggatgattccactttcgctcggttcaagctctattccaaccttccaaacatcacatatatatgctttatccaaaaattgatcaccaaaataaggccaacacaaaaaaggtactccattgcttaaaccttctatagttgagttccaaccacaatgacttacaaaacaagcaatagaagggtgactcaaaaccttttgttgaggtgcccaacttaccaattttccaaaattattgttgcccaaaattctaagagggtcaaactcatgttctagatcaccggacacgaaacccggacgaacaacccaaagaaaaggcttaccaatgagttctaaccctcgagctagctcaagaatttgggtattatcatggattgtcaagctaccaaatgcaatgtatatgactgagcaaggcttttgttgatcaagccaatttaaacaagatgagtcttcagcccaaaattgtgaccctggaatatctgatgagttattagcttggttcgccattaatgggcctattgaaagaaactttggatttaaagaaagcgcagaagattcgatatcataagttgtattacagagacaccattcagctatttctgaggcttgacatgctttgaagtaaacttgaaacaatctcttctgttttgttgaaccatcaatagtccatggatatttttctgtgtttatgctaggcatgttaggagatagttgaattatttgtttatggattgaagttcctgtcaaataataagtaaaaataaattacaaagtaccatgagtagttcttaatacttgattacactaataataatatactaaacatcatttattccctctactatttttctaaattaaattctagctttcaattacaaaaaggagacaacacaaaggaggtgagaactattgtaatcattctcgtcctcatcaattatatattattatttccactaattataataataacactcttgttaaatgatattcgtttgatcgtgattacttaggtggcgtttggtaacnnnnnnnnnntcagttttctgtttttaaaagtagaaaagtgaaaaatatttttcaaaaacatgttnnnnnnnnnnntttttacttttcaattttataattaga

SEQ ID NO: 121184 - DNA, 1290 bp, Cannabis sativa
ttgtcctttgatacttgtatggtaccaacttgttttgaacattttttcttttctttattatataaatttacttatgttaatggacaggtcatggagattcgtcctagaattgagtgtaataactagtgttttgcacatttgatttttttttttggatatcagatgtttttgggtgaaattgttatgcaatttgtttttttgcaattatgctatttatttggtgcttatctaatttttgttggatgactataataatttttagtctgtcagaaatttctctttctctctctgtttctttctctttttttttttctttctctgtttccttatgtttttgggtgaaatggtaatgttatgttctgaacaatatgtatataattctacagggaaaacttaactcttttactcttcaaatgggcaatttacactttaaaattttgcattttcagattcatctgatggtgtttgtattgaggactacacaataacctcgggctatgatgtcatttcactcaagagtagttgtgatgaatatggcattgtctatggcaggccaacaaaaaatgttcacatcaggcgggtcaatttgcaatcatcttctggttcttttcttgcatttggtagtgaaatgtcagctacgcatatcaaatgtgcttgtggagtaggtccacttgtacaattcacatgtctatttttttcacaaactattttattagcatgtttagtatttaggtaactaaatttataaccttaaaaatgtaaagaattaaatttatggtatttttattaatgaatttaatttttatcattattggaaggcaactaccgagaacatctctaacttttaccaacaacaaatgttctcggtatagggtttaccgaggacattattggtgtcctcgttatattgttctttctaacgacgagtctctaacgagaacattacaatgtcctcgttacaaagttttaccgaggacatttgtcctcgttatagaccccattttttgtagtgggactctctaacatcctccctcaagatggtgcttattttatgctcatcatcttggacaactcgatcataagcggctctttttttgttcagatcacaagtggctcttttgctctactttttagatcggtatttttagatttttggtggctctttttctttggctcactatcaccgaatcacaagtagcattgttgactttgctcttagatcagtttttttgaatttttggtggctttttttttggctctatttcgatcgttttttttttttttggttgg

SEQ ID NO: 121185 - DNA, 1203 bp, Cannabis sativa
gggtaaaaaaataaaacttttttaacgtatgggattagatattgaaaatagaaaattttaaaacaaaaataggatgaaatggtgaagaattgagggagatatgggatttttagtggtggttggcgagggttttgtgggtttttaggggcctggtggctgctggttatcgtggggaagaagaagacgatcgagggttgtttatataaaccctatgccgtcggttcctagcaaagaaccgacgacataggtgcacacgtgtcaataaagtgtgcacctatgccgtcggttctttgctaggaaccgacgacatagggtttaattaaaaccctcaaaattttttaatttctaaccgacgacatagggtttattaatatctatacctacagtttttaccgaaaaattgcttctaaatgtcaatttcgaattaggcgggtattttcacaccctttagcttccctttttataaaatgagttgaaaaaatgagaaggatatgttttgttttcatcacggaataaaagacaacccattggttgcttacaatactgcataaactaattggttacctatagtgttgtaaatatgggttgaattttttgacactacacgaaatcggcacgagccaggtaagtacgaggatgactaggcacgaaaaaatacggctttgggcacgacacaacacaatgctacaaattagtacaacacgacacgaaaattatgtccttaagtacaacacgacacgaagcacgaaaggcatgacacgtgacaagctcgaaaaacacaacacgacatattaaaaagtcttataatttattaataataatatataaatttatcaattataaataaattaaaataataataaaatttaaatataatactaaatattataattatgtaattaaaactattaaaacttgaaaaatttaagattatatattaatttatttataggctgtgatataaaaatttgagtatttctaaataaatatttaaattctaatgatgttagtaattttttatacgattatttgtaaaatattgttcaaaatttatataaatatagctaaagctttaaatatacatataattaagtaattgtaaaaaaaaaatgtgaaaaaataatggataattacataaggcaccatttttttgtaaaaaattacatttttacgttttaagaatttttttttttttacattttt

SEQ ID NO: 121186 - DNA, 621 bp, Cannabis sativa
atcgagtcacaacaaatactacattatgaaaaaaggaccctcagttagaactcaaattgatcaagcaaatgaactgttcaaactccccttagtcttcacaaggaaacccaggaaaggcaatattgccaattcaaacaccaagacaaaacgaaacccataaaaataacaataacagtaacaaaaatgaaatcccaaatcgccctttagagctaaactcaactcagtacgtaaaggtttaaactttttaaaaactaaacgccactcaaccacacacaacacaatataaattacgaaactttcatcacttcaataatttcagatgaaacccaattatcattttaaaaagatagaaacttttaagctgaaacgatcatgatcagtcaaaagatggtgtttaaacatttaaattccacatgcatattctatgatattttaattaaataaaaaaaaacccagaaaaaaaacggaaaagaataattactgttgaccatcatcgaaggctggaggaggaacctcttcgttgttgtagtaggagacaagagtatcgaagcaatagaccaccatttccttgttcgccgacaccatcttcttctccgattttttaattaagaatgaatgagt

SEQ ID NO: 121187 - DNA, 1997 bp, Cannabis sativa
  modified_base (31)..(46): a, c, t, g, unknown or other
aggatgttaataaaacatacttgttagtaannnnnnnnnnnnnnnnaataatttccaacaggatcatcctgaggtaataaatgttgttggtctccaacagtacttagggcttcacgtaacacactagtcacctttagagactcctgccttaatttttacatttgggagtcccttctcgtagatcaaattactcataagtttgacagctgttaccctagattccacgtccaggttaattgtcatgagtcatattatgggatagctgaacaatatggcactatgacagatagggaaaatcacatagacgcgagctggggtttagaactcatcgagccgtttgatatattcaagattttaggatgtagggattttagttgatattatggtccttcaaccacttcttctagcgatagctcgcccctagtgacttcggtaaatcccttaggtggtaacttgtattcctcccttttttcatctacctttttaataattataacactttattttattttgcagacatggaaggttttgaagatatcatgcatgaaaaagggaagaagaggggaaccaaccctgacgtccctacaattggcaaggtggttcctcccaagaggcaaaggaaaaccaccacccacaagaaaaagtcattggccaagcttatcgatctcgaggtttctgataccgagacgcaagaaaatgttcctcttccaattacttctaacaccaacgctcctcgtcctgagaaagcccatgcttccgcctcctcaagcaaggccattgagaccttgtcggccgcagtgggagaggctggatttgaattcgcccaaatgtatggggttgcttgctggcgtaaacttcaaactctgcttccccctgattggaatctcatcaatcttgggagtcaagaagagatgctttcgaatagcttggactacaacttcatggtaagttggccttattgttattattttttctaatttgtacttctttcatattcatatgtttgcaattctccaggcttctttcatttctttcgcttctaatcgacgaatctcggagcggcttatatacatggagggcgaggtactgaaattactatcccaatgcaaggttgtgattaagcaaagggacgaagtcagtagggaatcacctgccttaaacaagaagctgagaagtcaaaagaggaagccgagaagaccatcaaggcctaagctgatgaatttgaaaagaagctcgctgagaaggagatcgagaccacatgacgatgcaacaaggttggccttcgtactgtgtattgagtttggatggtgaatccgaatatggacacaagcttcctggaggaaaaggaagaggaaactctggcgttctgcgagaagtccagggcggaggaggaagaagctgaggtagaggaaggagaagaagatccatccaagtctcccccatatagacttgatttttatttcccccttttattacatatattctttttatgcgtctctttttttctaaaaaaaatggccttttggccgagacaatggtttgtccctagtggcagtttttgtaaagatagatttgcgaagttgggtggccaactttgctttttaatgcctcatacttttaacatgtagatgtttgcttgcgtttcactcacaatctaaacaatcacatgcataaagtttattaggggtttctattgctcgtatttttctctgacgctaagtagttaataacctactttatgcacgagcagcttatttgcccttccctcgatttgcgagtagtcattaattctgcctcgctatcatcagaaataatcttatttcaagcaaactcaaatatatttttaatgaccttgtcactttgtatatatcttgattgcttacatgagtagttggatcttctacccatgtgttgggtttaagtattttttcaagacactttgatgtctcgtttaatactttcccttagtgcgagccgttagtattcagctttatgtg

SEQ ID NO: 121188 - DNA, 1116 bp, Cannabis sativa
agcatgaattacatcttcagatggtactgcagcggcttcgggaacattaaggataaagtcgacccgtacaaatagccaaggactccagccgtgtgaggtttttcctttttctctttttttatttatttcagttcggcccacatgccttttttcagtacaatctggccgaccaagcgacctttaaacttggtaatactttattttgtttttaagacaactagctgaccaggcagtctttaatcccagatttatcgtgctttgttatcttttgaaatgaatatttgtgcaatctattgtatttttttgagcttgttatttactaatgctttgtacaggaatagctgcccccaagtgaccgagcaaacttatgactcttggtcacttttattgcacaagtttcatttttgtctgttcggctattggattcgagcagaccctttgtacacattttaacggtaaattcataacttgctatagtaagaaaaacaattgacacaattagaatgataattaatatctttattcatttattggtcagaatgattttgttaccgtagtaacttacatttattgaattataaaagctattgcatgatctaactgatgtttagctaattaaaacataaaataattattttttctagactatactttagagaaggtcatatgacctgagtgcgagttgttttattcaaacctttgagcgaggcctgctcagaaggccatctacttaaaagtggatgttcgagcatcgtttacttttaagggggtcatcaaaccatgtacacttactcgtagtattttctcaaatgttcccaattccaataccttggtgctagaacaagttccatgttttcattatactgaccaagtttacatgctccagaatccacgacttcaattacttgatatgctcctccccagttaggtctgagcatgctagttgcgttgtcttttgtgtttaagaaaactcttctaaggaccatatctcccataaagaatttccttgacctcactttcttgttgaagtatcgagccaccttttgttgatgagctactagctttaggtctactgaggctcttttttcttcaatttcatcaagtaattctgcaagg

SEQ ID NO: 121189 - DNA, 1337 bp, Cannabis sativa
tttcaaatttagtagttaatcgttttgattggattttgggcttgggctttttggtcaaacacgccataatcttttgaaaaatccaaactaaaaacccaccgtacattgggcccttaaacaacagtaatgggcctagaaaacttagaagactttgattaaaaaaaggaaaagtattacttatttttaatatgacaattaagcaattaagcttcaaattttacaaccatttccaaaaaaaaagaaagcttcacatttgaaaaactaattatgtaaaaccatacattcaatgtatagtgaaatttccacaataataaataaataaaaaaaaaatcaatgttattttcacttttaagagaaattaagcacaatgaatattttttttcttcacaataataataaattgagatggtacccatcgagttaaatagtggttcttccttattttaacatctttattgtaaaatatcatattttgaaaataaatataaaaattccaaattttagttaaaaaaaaaacaagagaaaaagataattaacaactaaaaataaaattaagaaaactataatcaaatcaaatgaatatctccatataaaataaataaataaagctacttttgcatttcagtgattttaataagagaatttgcataatacaaacaaattacacaatagacactttataagtcccattaatatcctttcataaacaatattgctcatagtatattatatttatagttaatatatttaagtttaattttatctcatgagaagtagtaatgagaagtagtatttttttttttaaaaaaaaagaataattaattaatattttgtactcatctcccaatattctcaaatccactatcttcatcaaaattcaaaaccttataataatgtcctttatattctttttattcttctcttctctttgtcttgtttatttatttttatttttttcaatctctattattaattagctttcataattatttagatgaataaattcacaactccaacccttgaaaatgagctaacaaatcattgatgttcttcaagtggtaattattgaccctacattaaagtctcaaaagtgaacaaaaaaacaaaataaataatttagcctaggaactattagtctattactactagtcttgtactaattctattatttttaattaaatttattatatacattacacataatatatgatctccctttgaatttgaaaactgcccaattttataaaatttgattatattaatctatattatattagtgatcgataacaacacattctttttttcttaaaaaaaaaaaaagaaataagagtatttat

SEQ ID NO: 121190 - DNA, 3723 bp, Cannabis sativa
taaaataatttccaacaggaattttattttcttttaaaaatttttaattggactttagtttgtttttgtggcacctcctacactcttatgttaaatggtaaatcacatggatttgattgatggtggagcagtgatcatagtcaagaaattacatctctccctccgttctattcagaaggttaattacaatagggatatttggtacaaactcaaagtgccaaagcattatttcataatgtggcaagatatcaatgaaaacctcttgaccagggactttctagctaagatcttttcggttgagtcaacactttgctcgatttgtgttgaggagatagatgtcactctcatctattctttgactgtattttctctaagaaacagattcaagaattcactgtttggattgggcaatttgattggcccttgaatcatgtcttggcttaacaagctgggagaaacttggaaatgtttgcttggtgatttagcttcaccagtagtagcggttgctgtttatcacatttggtgtaataggaacaaatgtgtttttgaaggggtttgtaattcggttaaggctattagcatgttgattaagcttagcttaaaagctagagttactttttgtaatctttatgtgaaaggttagagcgcaaaatataattctcatggtaaataatatttgaattgtgtatgagttttttcgagtttttgtaacatagctttgtggattactcctcaatgaaagggcgcaaagaacaggagaaatctgttgcaattttaaaagcttccatgagtaattcatatgaggtttctcaagaaccattggtagaaagactatggctttgctagatggagtggtgtaacatcctgagttagaatgttggagatatgaataaagccaataagccaatgtcttttttaaacgattgtagattgaataagattgtattgtgttgttgtgggaaatgaatgttcgtggtgacaaaatcaattgtattgcaagtaatattttctttaattgggagttttgctataatttagatatggaaatggcacttcttactgttatggctgaggaatttttttcaatttgacatactctatgctgatgatcaaattgctcactgtaaagtcaaggtccttggcttgaattttgattttttattcgaactgctatatatgggaaaaataccatagttgaaaggaatgttttgaggaaaaatctggcaagctttggccatttgaatctcccttggctcattctctgagatttcaatgttatgttccatacagatgatagatcaggtgggcagttggtgtctggttctgtagttttagatgctcaaaattggctcgcactgggtcaagttaatcatctgatgtgttatgcaacaaattacgtacacatggtctaataaacatgatccaggagttcagattcattcaaaactcaataaggcctttaaaaagtagagttgggtggatcattttcccaacacataagcactttctcagtgggacacgtgctctgaccattgttaagttgttatcaaaaatttggatttgaggaagatgggtgtcaaaccattcatatttttcaattattggatggaccactctaactataagtcttaagttttcttgaatttgaatagaaggatctctagaattaggccacataaaattttggcaaagctgaacagattaaagcacttcctagagaagtttaataagatggaaattggagacattcctatgatttactactttgcaatagagaggtacattgaagctcagactcttcttgctacaaaccaaaaagactctactcttcaaactattgaggttgactctaaggagaaatatcttactactaaacggaggtacgcgagttacatgcaacatattacaaaattcttgtggttgcattatgctgattaaaattcgagctatttcatgctagtgtcaagaaaagaaaagggcagaaaaggattacaaccttcattttgaatggtaaaatcattgatgattataatagtgttattgctcattatcttaatcacttcaagaacttcatgctcgcaaggagttcttcttctaaaaagttgaataacaattgtttggttcatggaaacaagctttctttgcaataataaatccagcttgtccgaccttctttgaataaacaggttcaggatcctataattgatatcaatcatatcaaaagtatcagttccgacaggtttgatgttggcttttttattgggctttggactgagataggggataaaatcatagaggccattctttcttttttggaaaaagggcatattccagctgatcttaacaagacttccatcttgctaattccgaaaaatagattatctttcctctactaccgagtatcatcgcattgccgaatacaacacattgtacaagtgcatctcaaaaatgatgtgcactaggcttagtaaaatcttacctgagattgtccatagtaaccaagacgcttttatcaagaaaaggttgtttgtccaaaatactcttatctgtgaagatctgctcaaaggctatatgagaaagattttatctggtcgttgtttgatggagatcaatttaagaaatgtgtatgacacggtcgattagggagtttgtcttgaatttattgaaggaattttattttcttttaaaatttattatttggattttagtttgtctttgtggcacctccttcacatgttgcatggtagattacatggatttgattgatggtggagcagttttcaatttcaagaaattatatctctccctcctttcggttccaaagtttaattataataaggatatttggcacaaacacaaagtgccaaagcattatttcataatgtgggaagctatcaatgaaaacctcttgaccagggacctgctatctaagatcttttcggttgagtcaactctttgctagatttgtgttgaggagatagatctcactctcatctattctttgactgcattttctctaagaaagtgattcaagaagtcactatttggattgggaaatttgattggccgttgaatcttgttgtggcttaacaagctgggagaaactttgaaatgtttggttggtgatttaacttcgccagtagtagcggttgctgtttatcacatttggtgtaatatgaacaaatgtatttttgaaggggtttgtaatttagttaaggctattagcatgtttattaagattagcttaaaagatagagttactttttgtaatctttatgtgtaaggctagagaataaaatttaattctcatggttaacaatttttgaattgtgtgttggttttttttttgagtttttgtaacatagctttgtggattactcctcgatgagagagtgcaaagaacaggtgaaatctgttgctattttataatcctccatgagtaattcacatgaggtttctcaagaaccatttgtagaaagactatggctttgctagatggagcggtgtaacaacctgagttagaatgttggaggtatgtataaagccaataagccaatgtctttttcaaatgtttgtagatttaataagattgtatattgttgttgtgggaaatgaatgttcgtggtgacaaaatttgatggaaatattttaccgagatctagatttactaacaagtatgtttcgttaacatcctaatacgaatttctaaaacaatgaaataaa

SEQ ID NO: 121191 - DNA, 2393 bp, Cannabis sativa
ttatttataatttttattcttcttctttcgatagtataagcaattattatttaaatggatactaatattgtgtcaactatcaagtggatgatgtacttggaatatatttggattgtggataggagaggatacaactaaaaagatgttttgaaatgcccgataggagaggatacaactaacaagatgatttgggttctctctgtatatttttatgcatatattaaaaaaattattatcataaaaaatgttcttttttcttatataaaaattgaaaagtagtactagtatacatagatatattttcatttccaagcttagaaaaatgaatggaaaatttttattaatatacgtaatacacataataataacataaataaccttgattaatttatttgtcttctagtaacgtgacacatcatctctaccgtaatactaaaaaaatctcatagcgaaatccaaaaggaaacctggcatctcgctccatgaatgcggatcctttgaacagtatgtgaaacacaataccagaaacgaaacctttaaatttacttccatgcgattatagaatatcaaaatcacaacttagaatgcaaaatcgtttcactaagaatatatataagatcaaagtcataattcaagaccattctcaccaacaaaaactacattaacgaacaaaaaagcttcgattacaatcgccacaagatcgatcacaagttcagtaccgaaactgttccttaaattaccaaaaatacctaaaaattagagatagaatcgttgctggataaaggaacaacttaatcgacagtttagaaaaattgatccaaaacttactctgttttttttccctcaatttcaaaagtaactttttggttacttataatgttgataagaaactaattagttactttttcataaaaaatatattttggttacctctaaaatttatttggaacaccttaataatcaatgagttatttttaggttttattaatacgaatgagcatcttcaagtttatttttgcgtaaaaaaaatattgttattattattgttccatcttttctcatcaatcaactaacatatactataaaccaataatatagcttcttcctcctgaattctatttcttttttttaacatttttgcattttcaaaagtaacaatttggttatttataatgccgataaaaaactaattagttacttttacattaaaaaaactttatttttatattatataattttagatgcaaattggttacctccaaaacttatttgtaagcatcttataatcaaataattatttaagttatattattgtatattatttaaaatatatttgggtaaccttaaagtttatttttggaactaatgaattgtcatgtattatctacaatttttatgtactaactgtgtactgtgttttttttttttgagataaatgtattttatatacttttttgttactttgaaaccaatgtatttatttttagattatattacattgtttaattgttttaaatacttttaggttacttttttatttttcttttgtaataatatttatttacaaaaggtgatgagaacactgcctatttttttgccagcttgaagaaaagaagagaagaaaattgaattgtaagctacacatatgagcaaggtactttgatagatagctattcggaggtggtgaagcactttgttgatcactttcaaagctttatggggagccagagcacagcttgttctaagcttaactatgactgtcttgaccaaggcaacaagttgaatcttgatcagcagatgttactaattaggccatttatcatgaaggagataaagagagctttattgagtattcctaactccaaaagccccggtccagatgggttcggatctgcttttttcaaggaactttggccagaaataggcactgaagttagtaatgcaattcttcagttctttgaaacatgcaatatcccttctcagttgaatgaaactgtgctatctatggtgccaaaaaaggaggtctctacctaagttgttgactatagaccaatagcttgttgtagtactctatacaaatgtattacaaaagctcatttgtcttaggttaacagaagtgcttcctcacttggtccatcagaaccaaggtgccttcatcaagcagagatctattgcacataacatacttattttccaggatctaatcaaacactatggcaggaagaatgttactccaagatgtgctttcaagattgatctgagtaaggcctatgacacggttgactggaacttccttgaacacctcttggctggtttgaactttcctaatagattcacaaactggataatggtgtgcctaaaaggaacttcctatactctgatgatgaatggga

SEQ ID NO: 121192 - DNA, 1522 bp, Cannabis sativa
caagagaggagggtgagggaaattgtcacaacgaaggaggtatttggaacatttgttgtaggtatggtcaacaaggccacagaaatagcagaaattcggaaggctctcatatttgaagccgacccatcgtggctccgagatgccctggaagcgtatggtcatacctctgcgaagaggcttagtgatgtcaaggaggacacgaattcgtaggtaagggccaaagttttccattaaggagagaggataaatttcaaggagatcaccaatctcgtcagcaatgaactgggcaagttggggacttttacatccaaacgggattcgatgaacttgaatccagaaggggacataccgaatagattcaggagtaggggtgggcgacacatctgggtgggtgaagaccatcaaaaacttatcaaaatgccatggctgttcttcaagaacatgacgcctatctccatcacattgaaaggaagccaagagtaacccagaatgatagtcagagatttggcaaggaaaacggagggtccaagcttcggacacggatttttcaatccaagagggcttagcagatttgggagataaaagtttgaaaaacaagcaaaacgaattcgcatcagtaggagaatggatggaaatgtggtcgaaatcgtggaccagactgtcctcatcatcaagagcagtgatagggtttggattgctggaggaagatgccatcgaggtaggaaataggaaacgaacagggtttgaaaagggaaacaatggtgatatggatagtctaagggagggaacatataaataaacaagcaaagaaaaaggccacagaggagagtacctggagaagaaaggccacctcgaagagggaaccggcgtctgagccatctcttcaatgcttggagagacggtctggattcggagatgatacgcaatgatgatttttgggtgtgagacgaagagaaaccaagtgacggttggtttagctgtagaagatcgatcagaggatcaaaatgagtagagtttgtgcagagaaattaaatgctgaagagaaagagccgccataattaaatgcaggtgtgagagagagatagcattaaacaacgactgagctcgagaaattagggggagatgcataatgattagggtgacgtattaggctattaaatcaaaggtcaggggagagcaattaatgaggctaacaggaacaaaagggaatagcggaatgaagagagatgataggggtaattaatgcaagaaaagcagaaaagaaaacaaagagaaaaacgaaaaaaaagaaagatacagtaagctcaaacctgtttgagaagaaaagcaaacgaaagaaacccagctaaacaaaccgagattgaaccagagcaaagcctgtaggaagcttcaagaagaagattttttttcattttaattattcattattggtatttatatgtcatacacaataaaatataaatttacaagaatctatttatatagctaagttattgtaatatcccgataggtctaatggtaa

SEQ ID NO: 121193 - DNA, 811 bp, Cannabis sativa
ttatgagccaaaggaaaaaaaaattacttcatttcgtaactaaagtaaaaaaccggtgcaccaatgctgattgttttttacttaagttataaactgaagcaaaaagaagcaaaaatatttaaaaaaaaattaaaaaaataatgaaaccaaacaatattaaccaaaaataaatacaatatcagattagtcctttaatgaaaaaataatataatatcacataaacaataagaacatttgtttaaacaccaaaaataaaagtccagatctgaaatataaaatccaaatctcaaattatggaaacaaatatatatgaacagtatgaatgagatctttcaaaacttgataaaataaaaaatgaaaataagcttaatctaagaataaatctgatgaaaacaaaacttaatttaaaaataaacctaaaacaataaaaataaaaacaaataacatgcaaatcaattaaaacaaaacaagttgttttgtggattgatccaagaagaagaacaatatcaatgaaagcttgaattttttattaattaacaaacaatgcattgaatacaagctagagtgtatgtacaagcttttagctttgatttgattacataactcaatgatcaaacacacattgctcttcttaatatctctctaaaccttagaaaattcagaaaaaggatgtaattggaagtgtgcaaagaaacttaactgtaacgccctaactactacgcacgttacccaagataattaagaaaccttaatctcctaaacgagattactaataaaattagcgcggaaattaaactttaaatataaatgg

SEQ ID NO: 121194 - DNA, 2059 bp, Cannabis sativa
taaatattgtctatgtttctacgaaggcaattttttagtggattatattggtcggaatggtggagttgtattattatggaagactagcgagaaagtgcaattgactttgttttcttcaatcacatcgaatctttgatttttatcgaaggttcaacctttttagaggttggataggttctataggcaaccaaatagaagtttgagagaaatgacttagaattttctttggtagctttggggaggtaggtctttgccttggtgtgtgatcaaggatctaaaaaatatacttaactaagaagacaggtgtggcgagtaaacatatttgagtaggatctttaatgggtttcaacatgtgttttttaagtgtgtcttaatttatatggatatctatggctcttaatttacatgggagaagggtagggggactacttgttgggtgaaggttaggcttgatagaactttggtctttcttgactagttagctctattatcttttgctaacttaattaatttagagttatcttcatctaatcatgggagaagggtaagggaactacttggtgggtaaaggttaggcttgatagaacctttgtcttctctgactagttagctcatttttttttttgctaaattaattaatttaggctagagacttacggtaggtgaccaatcctcttagtgtcgtatttttagagctaaatattttctccggtcaatttttttctggtcaacctctctttccccctacgtctcattgttggtgaagggtatcctttctatgcgtgaattcttgtagaatgaagcttgaaatttgttggcaatggaatgtctgttagcatttggaatgcttcttggattccatagattaattgggagcaatattgggtttcccttaagtcttgagatcagagtgccttgaatatgctccatggtcctttttgatcaagctcattattggaaacatgatgctcttaagacctggttggttcctagtttggctgggttcattaattttgttaagtggttgccactcaggtcttgtgatgaacttattttgaaggactcctgtgatgctaagttcttagttaatattgattatcgcttccttattatatccattggcagttgcacctctcctcattggaaggaaatcatggaatgctccagttcatgagagagtaaagttctttctgtagaaagtgggaaggggcatctttccttttggagctaggctccatttgatctttagaaatgattttagttgttctatttataatggccatgatgactttatcttccatctgttctttctttttcctttggcatctcagtcatggggttagggctggttttatatttctttaccaattttgcctctcttctttgtttctctctttggatggccaggaacaaagcctttcatgatggagttgttccaactgtctttgggattcattgtattgtttctaaggtcgttgtagagagcttgatggtttgtcctaggaaatttctattagcttctcggtgggggtgattgtgtgtatgacgtgatccctcaaggtcccatgtgattgtggttgatacttctcggctaggtttgaaggcttttggggcagtggtggtgtttgacactattggacggtggttgaagctatttttgttaagcttcttgttgataatgccttgggagctgaggttgtgacccttctccatgtagtttctgtagccttgcgtgaaggttggtcgtcgcctgtgttcctttttgattgtcaagttttcatcaatgactttgtgcacaggtcgtcctcttgttggtgtgagaggagtggctctttttatctttttagttgttttcttatttgatttgttgcctagtgcctctatgtgatgtgcacacctaggtctcttaatattgctgcttgggcaaattttgaaaatttttatggttttctttcgttaaggaagtagaaccctttgtttttactaatgagcttgtttgtttttactcttttgtctagttaaagaagtttttggtttatatatttatttatatttaaat

SEQ ID NO: 121195 - DNA, 3017 bp, Cannabis sativa
  modified_base (652)..(654): a, c, t, g, unknown or other
caccattcacagggggctcattaaaggaagcagtggtagaacttggatcgtcaaaactaggatcttctcttaaaatatcagccatgacatcttccatttcttcttcttcgttgtttaatatttcaacagtcggttgcgtgaacgactccccatgaaaataccaagtcatgtatgatcgttggatgccatgcacaaatagatgtaccctaatattatcgggagtctcaaagttcacattcagacatctcatgcaagggcatcgggtaacttcgacgaaatttatttacgttcgagcaactccaacaaactcatccacacccctacgaaactctacagatcgtctgtttgaagtcatccagcttctgtcactcaccatattgctacacaatataaaaacagaaaatttaaattaaagttaaaaaagtgtcttactccaccttgtcactccatttctaaaagggtaaagaacacatctcattcaggttcgtaatatacatatagtacaatctattctcttaagattacttctttttctcaaaatttcggcagcacctccccacagttctcataagtaagcaaactactaacaagtatgccaacttacaagaacatgcaaggagatgatgtaccgaaatctttaacaaagaaacannnaaatgagcaatagatcacactataggtataaaataagcccaagctatccatgtggacataagaagtccaggataattttgagaagcgtatttaagagtcttcactaactcagcctctccaaataggtctaaggagaaatgtacgtgtgaaataaattatcactatgtgataatacaaacaaaattattctatcctatctttggataataatcaaagaaatcaattctggataagaatttcattttatggtatattcaaatatcttatggtatcatataatgtctcatgctattttatgtaccacctatatacttttattgttaatttaatattttgcaaatagttttcaagaataatttcatttcacttaaattttaattcatattttatcaaaattaacacatattttttaatttcaaagtttccactctattaaaagttgaatgttatttttaattcataattttttcaattaagttatgaattttttaatttatcaaaagttaacttattaaataaattagtgataaacatagttttttttttttgtaacatctttaattatctttttaattttttaatttctttttaaaataacaatttgtttaacatcttaaagtttctaattatttaaaataaataaattaatttttaacattataaaagttaccaattaacttatttaaaagatttttttaaaaataaattatgaactttttaatttatcaaattataacttaataaagtttctaattattatatatcaacaagtaaatttgtaacattttaaaattaccaacttatttaaataaatttgtgttataattaaagtcttaactaattaaagaatcaatttttaatttaaatttacttagtgatgttctaattattttttaaaaataactcattaccaatatttttgttataattaataaagtcttaactaattttttaaatttaacctattatcatatctatgatattagtgatgttcaaattattttttaaatgtaacctattatcaaattgaaaacgttatgctaccgaaaattcgacagcatcactatacaattgattatttccaaaatattaacacctacacaaaaatcacaaacacaatactaaaacagttcacatgcatattaaatttttgccacccatctgaccgtaatatacttttcaaagaatttacttcactaatatgaatatataacatattcaaaactttttatactattataaaacatataacataatcatactaaccttccaatataacgaggagtgatttttgataaataccgagcaaagggacaccaaaaatctatttagcaaaaaaataaatattaagtaaataaaattataagtatagtatactattataataaacacactatttatatataaatatatatatgtatggactatttcttaatgggtattacccattgatggttactaaataaaactataaatattaattttaaaaatattaaattattagattttgatccaatgacgaataataaaagagaagcttgaatttctatacttcatttagctatttaattaaaagaatataaaaaattatcactttttacactatattaaaaatatgtttatatacaaaatacttaagccaaatttaacttttttttgtcgaaaaacttttgtatttaatttttttttcaatcgatggaacaatctcaactcatataatataaaaatgagagatatttttaattagatagaaaaaccaagcataaaaactcaaatttttattatattacccataaatgagtaataaccactaagagtgcacccatatatgtatatgtatattatgtgtatatagattgtatatacactatatataattacatttacatatatatataagctaatgtacacatatatacatttacatatatatattctaatttatatatacatatatatgtacgtatatatatatttccatatatatacatatacacatatataaactaatatacacatatatacctttacatatatatacatatacacacatatatatacatttacataaatatacagatacacacacatatatatacacactactagacaatagacattttatcccacattttatacttgaaaaaataaaaagtgggataaaaagtatgttgatagtttttaccccacttttgtataaggcacaagggccatgtttggtttagcactaaaaaaaaaaaattacactaaaaaaaaataaagattgactttttattcactagccaaacaggcccctgatatatcttttatcacactttggagcaagggccttgtttggatgtgttcggttttgtgccctaaat

SEQ ID NO: 121196 - DNA, 2630 bp, Cannabis sativa
  modified_base (26)..(43): a, c, t, g, unknown or other
tatattaataagtaaatctaattatnnnnnnnnnnnnnnnnnntagggcataaaacccaatagatgtacataaacctgacaacaacatagcaacaacaactaaacaacttttatctgctttaaggaaggggttcgggtcaatttaaaaagatattattttagttgatattgacactttgacagcagaatcaaaccatacatcaacaagaaaaaaatcaaaaaaaaaaaagtctcccaaagaagctgaatattgaaaaatcaatatatatttgttcattaattgatactatttttattgcaaaactaccaatatctacagaaaaaataattgttattttcatattattataaagcttcttttgtgttatttttgcaacatcttatttcaacttgaaaataatcaagttgttttcatgttgttgtaaagtttgttatgaaatttttatacactacactagttgttcaacaattaaagcaacagagttttacatgttaaaataaaaacttattttatctcttacattcagacatgaaaaataaataagagaacatatattatgttgattttgaatcaagtgggggcattgatagaaagagattgtaagtatgaataaaaattacttatatttagtaataacattatttgttgttttacaattattttaaagttgtaaacatattgtttaatttcgttactttttaaatatattgatttcacgttgtttatacgttgaatttcagtagttaatatttgtagattccttaaatgatatatacaattatttttgtatttttatatcgtagcaaatattgttaacatttaaaaaagcaactattgtctttttttctcaaaaaaaaaaaagaagaatattataattatacaaatacttaatgtataaattaaaaatataataatagttatttttcactgaactaaaaaatatataaacaaattaaacaaaattataatgttcaatatcacgtgcaaaatacatgtaaaattaactaaaaaaattttaaatatatgaaagtaaagtttcttaaaaaaatattactcttcaacgcatgaccaatactaagcacacttctcaatcactaatccatccacaatagcttgaaccttcttggaagattaaaatattttcttgtacactttcaatgtatgcaactcacttcattctaccaaagggatagaaatggacggcaaacctattttgatcaacattgaagtacatcatcattgaaaattaaatttcttgcattcaactgcagtagcaaaacaacaaaataaaaaataaaagtatttacaaaataacatataaatatcttataaacaatgctaatacaatgctatatcaacataattattgaaagtatttacaaaataacatataaataacttataaacaatattaacacaacactatatcaaaaaaaaaatcattaacaatctataaataaaaattgactaattcataaaactaaaatgaacaaaaaaaataacaagaatagtaatatgaaaagtttaacttaaagaaaaagaaaaaaaaatataattgaatatgttctttttgtttatgttagtgaaaactcaattctttcgagcatttcaccaaacatatggcatgcgtgtttttatatactacacacacacatacaattatagagcattttcttgtacactctcaatgtgttcaacttacttcattctactaaaggaatagaaattatcacaaagtctatcctaatcaacttggaagtacttcaacactaggaattaaggtttttctttttactgcagtagcaaaacaacacgtataaacaacgcataaacaacactgtatcaaatttattgataaattgactaattcatataatcaaaatgtatataaataatattagaggaacaatatgaaaatcccagtttgaagaagaataaaaactacaatagcacaattgaagatgccctctttgtttatgttagtgattaagaataactatgttaggcatttcgtcaaacacatggaaggtgtgcccttatatacatataaacaaaaaattcaacttaaagaagaaaaaattcacaaaatttgagggcaaatgagtagaatcaataataaacaatcacactacaataatattcttattaaactttcaaatctaaacttttattaatgtaatttgaaaagaaaaaaaaaaagaacaagaacaagaaaataacaacttacaaatcagagcttgaaaaaatattaatagcagcaaaaggaaatttgaacgagagggagatggcttgactaagagagaaataaactcagactagttttctttctccctagaccgcgacatagaaggttgagtagaggttttacataacatcgagggctggggatgggagggctagagacgagagagactggatgtgaaatgaaagggtggagatggctaccgcttgaagttgatatgtgtgaataggaggaagaaggagaaatagtgtttgtcgtataattgtaattatcaaactttataatagtattaaagaaaaatctaaaaagtaaaaatgtaaaaaagagagagaaagagagagagagagagagagagagatcggaagagcgtcgtgtagggaaagagtg

SEQ ID NO: 121197 - DNA, 502 bp, Cannabis sativa
agagagagagagagagagcttcatggtggtggtgggttccattgcgagtttaaagatgaaagggagagagagacgagagagagcaagatctgaatgtttgaacaaaatgaaaatttttgggtttttatatgtttaacatgttatccccgacggttcaaaacctttgggtatactattattgctaacagtttaaaactgttggctatagtatatccaacgattttaaaatgtcaaaaataccatttttaactcgtttttgaattttaaaattgtgactattttacacagtcggtgattctaaaatgattatttaaaaccgttaggaatagtggagtatttccaacgattttaaacaattacttaactttattagcgacgatcctcgaaaaaaaattaatttacgaaccaacaggaataagcttttttgtagtgttgtctacagagtggaaaataatcaagattatatgcttcaaactatttagtctcatgatttagcaaagta

SEQ ID NO: 121198 - DNA, 1240 bp, Cannabis sativa
ctggtacagaattaacttgtgaaggtcctggcatatccaaattcgaaaaactgttagataatgcaacaaaagaattggtcatttttggcccatcggtttctacaatattcttgcctttgctccctttttttactgcctgaaatccatctgtatccaccctatcatccgttcctggtgctgctggtttactctcctttactacccattgttgcttattcccatccttcttgcgacattcaatcgtttcatgaccaaatcctttgcaatgattgcattgaaccggtttccactcataagtgactgctgtagtaactacaaaaaccgggaaactcctgttttatcgacacttctatcaacactctaggatagttcagcttgttcctttccttggttacaggatcgacttgtaaaggggctcccacttgccccacaatcttgtataatgacttctccccccaatacttcaaatcaagatcagggagttgaatccatatcggtacagtccttatatcttccttcttgaaattggtatccggatcccaagctttcatcaccacaggcctattgttaaagaatacatatcctccatgtagcacttcatctctaatttccacagtatcaaatcttactaagaaaacaccataagacaaagaacccactctgtccactttcccattccaaacccgtctaatgaacccttcaattatcgaaaggggtggattagcacccagtacataacagacaatggaagaactccaaaaatgcacctcctcctcaatatcctctactgttattttgaccttaggagcagatttagtgttcttgaatgaattatctaagtttcgaacaacattgccagacctgagaatagggggagtagcaatattaccttgctgaattctttcctcacattctcgattagcactcaggaaaaatgcaaaatccttgctgatatcctcttgcctctgaatttctttcaatgaagacctaggtgataatggctccatgaatggttctgcttcctgcgcgcggttcactgattcgccttctccttcttcttccgaaaaatcgattggttcaatcccgagaacagcatccatcgtcttagttttccgaacatccgccgttgaagtcggtcctcttttcctggttttcttgaccaccgattgctgcttcccctgcctcgccctggtttttgccatagcaccagccctagagagctgcacgagagagagagaga

SEQ ID NO: 121199 - DNA, 1318 bp, Cannabis sativa
  modified_base (1251)..(1257): a, c, t, g, unknown or other
gacactgactcagtaaatataattttataattagtaagagctcaattcgatatttatagtggagcaatcatgaaattaataaataaaaattatttagttgatgagactcaataaataatctagtttattggagcttacaattataggtccatggtcgctgaatcgccaccttgaaacactgtcaagggaaaggataaagagaagtataattttgaaatctattttgaattggaaaaattatttatttttgtgatagataaataatttttcaaattaattaattggagaaaatacaaaagttgttaagacaaaatttgtcaagacaaaaattgtgaggacaaaagacaccatccttattttaattgagataatataggcacctaccttatagtagggtgtctctatttgttttgtctttttgagttaattaatttattcaattagacaaatatttgaatttaaaaagcggttaaagatattttaaagtagttgagacattctctcataaaaaatattagtaaccaaatccaattatgtatattaatccaaataattaaatatgatttaattaatgggaaattaactactacaaataaaagtctaatttgagaaatcagtagataatttttcattgttattttataaatacagaggagaaaagaaaattattttttttctctcaaatagttcttgctcatgtgttgagaattacaaaaaaaaaaaattatacactttaacttaatatcccacactattccttgtgtgtggtggatcaatttggaagactacagtgtgagtttcggatcaactaaaaggatacaacatacgcgatatttcgaggataccctgatagtcatcaagaggtatatattatttccttgtaatttatgtttttgatttaatgtatacacatctagagatcgaatgggttatgatacaatgattatcatatatacgaatcttctcttgcatacctgatttagtaccataaaaacaacaacatcgtcatttcttgcagctatgactttaggggttgaaccacggttctttacaaaagttatcaaatatattgtttggcgtactgctatgcaaaatgaaattcgtgctttggaagacaatggcacttgaattatggtgaaattactgtctggaaaaaaaaacctctgggcagtaaatggatgtacaaaattaaacacaactctgatggaagtattaagagatatgaggccctgttaattccatttttggcannnnnnnttgacaaaaatattttattattcaatgtatattttcggctagaatgttttaatttgtgtcc

SEQ ID NO: 121200 - DNA, 1110 bp, Cannabis sativa
ccccaaacaccatgaatctccacaaatagaataaaggccagccaactcatcccaaaaatctggccttaatttatataaacaaggtccatatactcccaaaaaccaccatggttctatactttctgcttgaatcaagattgagatagacaaattaccaatcattaatgaatccaataccttgatatttctcatgtcccatattaacaatgtgcctccagatcttctaatggctggacttaaaatccaagccttaaatcgcgagctccaaatactgctaatgaaccttctatcaacaagttccttcttcacttcttgtaagatcaccaaatccggattggccttgcatattgtcactttgattgcacttctcttctccttgtccccactacctcttatatttcacgagagaatcttcattaagctttcttgaccaaccccaattttttgaggcttttatcatagtttacattgaaagtcaaattattcagttgtctacattttttttctcgatggcttcccttctccttcaattagattgttttcatcattgttttgcaattccattcccatctccgccatggattggacaatgttagaccacgaccgatcctcataagaatttcgttttacgttctgtccttcctcgtgcgactcggtaatcgactgaatttcatgttcattctgtttctacaattctttgatatcaccaatagtatcttcttgctcttcgttattatcagcctcagactctgcctcatccccctccgaacattcactgtcagaacttagccccaacatttcatcttcaattgtaactacatcagcctcctacccctcaaaatagatttcttcaactgttaactccactgtttccattctggtctgtccaattgattttctttttctggtatagacattcacaagatgttcaagcccctgttcttcttcttgttcttcctctgttgttttcttcagaatagaagacttcactgttttcttctttacttcaaaatctgcccaaaacattataattgcatctctaaaatcggctcgagactttggtgtaattgttggaaatattttactaggatctagatttactaccatgta

SEQ ID NO: 121201 - DNA, 1232 bp, Cannabis sativa
  modified_base (32)..(33): a, c, t, g, unknown or other
  modified_base (62)..(63): a, c, t, g, unknown or other
  modified_base (1205)..(1207): a, c, t, g, unknown or other
cacgtgtcctccaaataggagtctggtctcgnncctccaaataggagtctggtctcgagttnntaggtgagagaaatctcactataaaagggccttccgctgatacttggccagcaagggtctagttagtgatgcttctctccagatcgggcctagaggccaaactttcgagtgacctgctcgccccttgcctacatctagaggcaagtgtaaggtagctgtagaggattttgacagttcctcttttgaggatgatagtatttgatagttaataatgccatcttttatgttcttgtcttgcattgaatgtttatgattactttctgactttgcaacttttctttttgcagatatgtcttctaggctgagaggtattgttgggggaccttttgatgagcctataggtcagctgagggccatggtgtcctggacctctcatggtagagatgatgctgggtcatctctgcctcctcctccaccaaggtagcctatgatacggcctacgggctagggttcccaaaggcctggttgaggagcaagctcagcgacagggcaaagggatatggaggcttcccatagacgcatagagagagagagaaagagcttttcctttcattgatgaggagctcaaggagcttggtgatggcaagccagacaggctctactccacttgcctttaagatctttctttggtaagttgtatttttagctttgttcatctgtttggcactgtgtaagctggtcggccaagggatctattacatggggctggccagccatggatgcatatgtctagggctggctaaccatagtagtctcaaagggaggctggccgaccagtgttgtaatttgatattaattttgtcttgttttgcttttaggccttgatgaagttgagctttgtatgcgatagctcctaggggtcctcagatgctcttcaagattaggtgaagaccatggaggcttcccttctggtgaaggacaaggacatgtctgagatggaggctctccttgtggagaaacagagcatgatttctggcttagagaccatgcttggtgccaggaataaggagaacaccacacaagtttcctttatctctaagcttgagtctaaacttgcagggcatgaggagagactgagagcggctcttgatggccaacaatccataaagtatgagtatatcattgtaacgccctaaataatnnngcacgctacccaaaatacttatgaa

SEQ ID NO: 121202 - DNA, 1974 bp, Cannabis sativa
taatcatgattatattctaatgtgctgacgacacaataaacatgaacaaatatatatggtctggacttaataaaatttatacattaaacatatataatcatgaaataaatcatgtgaatcaggcaacatataataatttctgatcttttattaattagtaaatctgattatatgaaattagttttatttagggcagaaaatccaacagttcggacttcaattacttgaatccaactcactaccttttcagtattttttaccataaaaacatggagcaacctaattcaagtctcaggatctgaaattatatgaacctataacttgaaagctagcctgagcacctagggttttcacctagcacccaagttgacattctcaagtaaggtttcaagttcagggaccgtcttagtgaaaaagggtcaaaattgcattggcacatcaactatacataccacgaacatatttgaggcatcaaaatcaaaatcagagcaagtttatttttgagcacccggtgccttgagcacctagtgcccaggctgacaatctatcaatctcaacaccttccagatctgagattcaaacttttcatcttctttgtcttcatcaaaaacggagaaataagtccttatgtggtagaaataacacatcttgggtgccgaaagcaagacctagcgcccaaattgacacctggggctagcccagtgcccaggttgacatggttgacattttgtcaacctgggccattttcaatgaagtttttcaagaaatcttcagagcatcttcttcatttacaaaagatattgagattcaactatttctagagaccaaacgaaatttttggagggccaaaactaggacctagcgcccaggtgaacatattgtcaacctagattgttttttatcaagtttaccaaaaaatgttccaggtattttttccatcatcaaaaataataaagattcaagcaaacttggagagaaaaccacaaactcgaatccctagaaataagacccaacgcccaggttgacaatcaacctacgacgctgccttgaattgctcaaatgccaaatctgatttgaccaatgaatctggaatggtcaaaaatggtgtaggatacctcgtcctcaagttctagaactttggaaatatcaaaacgagatccgaggacctcgggaatgagtactcaacacccaggttgacaaatagcttggtgtgctaggttctgcttatccgattctgattctgtttcggtcattcgtctatttttcacaataactaagatccatgaagtcaaagaaatcaaaatcacaactttgcacttctcatttccaacatgggaaactcacacgaaaatgaagagttttgaatctctcatttacacagaatagcaacatatccaaaaattggtgaccaactttgctagaacacaaaaataggctaagtgatgccaaaatatcacttagacaccttaaagtacatcccttggatgtttttgaacttaccaagtgtccaagttgacgtcatatgtcaacctgggcgttaggatgtcaacttgggcgctggatgtcaacatcacccgcctttagttaaaacagccataactcactcaatattggtatgattgacacaattcaacttgcatttcaaagctaattcaatgctctattaagtcatgtctcacattttaatcataaatttgaagctattatcgtcaaattttaccccaagggagttacaaaaataagcttcgggttacccgcaacgggacccaccaggctttgaaaaatggctatcgccactaagagctaattttcaccgttagatcatcatctatggtcaaaaacatccaatttgtattttcttccttatttttgtgggtctctttcacttataaaatgagagctccataagctcattttttatgttcagaatactacccacaaggttagagcttctctctctagtttctccctcta

SEQ ID NO: 121203 - DNA, 706 bp, Cannabis sativa
gtatttaagatttgtaaataaattcactaacttcactacgtgttaatgtcaaattcactaactagtgagctagaaaaccctccataattgagatagagttttttttttaattcatttaattaattgatatattgagttacggccttatttcctaaaaagggtgaacactgaacacacaaacacaatacattcaaccctggtaagctgtattggaatgtattgtattatattacattataattaaatattacttaaaacaatactatatttgatattgacttgtattaatagattgtgtaaagtttatattttcaataaacttgaccccaatactgactacgggtcgagttctggtccgatctgagtcccgagtccgtgtcttggtcccagttccggtcccggtccaaattctgagtttgagtccggtccaatccgtgcccagtctgtgtctggtctggcgagtccaggtctgagtccgagtccgaatttgggtctgggtctagagtccaagcccgggtctagatctgagtccaaggtttgggtctcgtctcgagtccggggtcaaggttcggagtctggtgtccgagtccaagtcagagattgggattaaccatgtatcctttgtaaagattataatacaaattaatacgaactattttttatgtattaaataatacaataaaatttagtcgtaataattaataca

SEQ ID NO: 121204 - DNA, 766 bp, Cannabis sativa
tttttggttaattaattaattaaaaagataaatatttatttaaatttgaatttgaaaagtaattatagatatttagttggttgagatatttcctaaaagtagttgagagattctctccaagtggttgagatattctctcaagtagttgagagattttcttaatcgtttataggaaataaatgtctataatggaatcggttataaatatttagtgaaataattaaactaatatgatttaataattaatttgaattaaataaaatctttattggttttaatttgaatataccgtataaatcctaaaataaatacatattattttgttgctgtaaatgacttatccttttaatttatgataacaagttttgttctaaaaaaaaatatacacattaatctcttttccatcatcaaaaagagtttttctcatatgttgataattaaactaagaattcaatatacaatttatattctactagcccacactagtccttctgtgtagtgaaagatttagaagagtacgacgtgagtttttcgtcatcaacaattgatacaacttacaaaagaaaacaaggataccctgataggctttaagaggtaaattttcttttaatctatttattccagatttaatatatgtacatatggtgatcttgagaatgtggtattgttgagaatcatggggttccaactcaaaaccaattggcaatgagtggagtagcccatgtttcttatatatggctcaatactttcacatttaatccatgtg

SEQ ID NO: 121205 - DNA, 1993 bp, Cannabis sativa
aaataactgaaaacacaaccaaacaagatcaaatttttagacctagctctcctttaaaatgaagattttttaaaaatttaaagaagagcaaaaacgccttccaataaataatgtaaacttcttatctattttaaagaatctttattttcttcatatgcttctcatataaaaaagtactattcatcctttaaacataatttaataatattttaactacattttattctatttttattaatatgtattatatattaaaaaatatatattatttaaatgatagtaagaaaatataaagaagctgatatatagtgtattataaaagtttggtgtaaaataaaaaagtaatttgataatgcattttaaagaatagagtagataagctgttagagtgctcattgttgtgaagattaatgtacgcaagtatacgcagtcacacaagtaataaagtgataagtaagatcggttccacaaggattgcaaacaaaatatattgtaaaactaactaattacaacttaaagtaaaaggaaaactatgagaatggttgagcaatgatttaaaattaaaatgactataattaaacttgcctaaaataatgctactttttctataaaaattgcttgcaagaaatgtaatatattaaaaagtggcttgaataactaattccccctagtcagtattttcccagttcttacagcattacttcatcattttcgcacagagatagtagaattttcttgttttatgagaatttttcaaacctcacaaattaagttctagcacttagctcaatatattcctatatcaaaccatattgcagaacacatttaaacatcaattcttaagttatgcaaagtaaatgaaatattcctactccatttacaagaaaaacctaaatctaagaattctcttgcttcatccaagttataactactagatctagccccttcgaaaaaagatttagcttaacaaattgttactagggccaagaaataacaattaaagaaaataacaagcttacttgaatgaacaaaggcaaagatgctaaaatattcttaaatattaagcataccaaatataggggttcatagccattctcaagaaatttagctcatgttcaaattaaaaaataaaacctaaaatcgaagttgtttaaccatggttgttgcctttcttacaattcaaaaagtttctaatatttaaagaaatgagacaagaaaagaaaaaaaaagtaaaagaaaggtaaaagaaaatcaagcacaaagagcttgtgtccttctctttttgcactttagtcccccttctttctccatcatcttctgtactttatttttctgccatttatttcttcttctaaaaatggcagcttagctaatgttgaagaaaagtggtagttgtacttggtttttctttgttaggtaaatagggtacaaagtaataccctaaaaatagaagcctaatcgtttctaatcttggcccactaggtttagtctccttcctccacaacagccagctggcgtaattttgagtgattgatacgttcatgctgatgtggacaaataaaattcattttttcaactctttccacatcatttcccagaatgttgaattcgttgcagcaatacttcagcagtgtggcccaatttcagcttttatgccaactttgtccttgcatccttttcttttccctaacaatttaattattctttctcaatagcaaacaagcaacatttaattaaataaacattactaaaataataattttttacaagacttaaaagatagcttacaagacttaaaaaataagataaaaactagttaaaattaagcaaacaaacacactttcactactcttcttacaataatttcagtttaaaagtacaaaaaataactctacaccataatgttattgttagaatatggttttaccaagatctatatgttgggttttatgccctaaataaaactcatttcaacataatcagatttacttat

SEQ ID NO: 121206 - DNA, 879 bp, Cannabis sativa
ggaaatataatatgtaatcatagtaagaaaccttacaaatgtatcttcttgtaagtgcttttgattttcccattatcatcaattacaacatgagtattaaacaaatgctgctcatcagggcctttctcttgaaaccctccaagtgacaaccaaatacttgattctctacaaccaatcaataaataacattggttaatccaaataagagcaccatatgagttcgtacgctatattgtgttgtatatcatattttcatataatactatgttaaattttgatagtaaatggattctattaagtataatttgagttttctgacctagctagagaacagtattgttgcatcataggtccatctaaaggttgtgctattttgagactttctccatcttgagcaccaatgaatgcgaaactttcaggaaaacagatcatttttgctccggccgaagctgcttccttcacagattaaattattagcaacacagtgattataaataacaaaattgagaatgattattcaaaaagcatgggtcggttagagttcaattaaggaattactttgacgaggcgagagcaggtggcgaaattagaagcgagatcgttaatggaagtcatctgagcagcggcgattctgacagagttgacggccatttccaaatcggcgaggaggagacgaggtgggttgttggtgtgatgtgagagtagtgagtgagtgggggtgtttgtacggtcgaatttatatatataatttaggctaattagcaattttttcgcgaactttaacatgccctcaatttgttcgttaaaaattctctctgaattattaagattgagggacatgatttaatacatataaatatttgaggggcatgatttggt

SEQ ID NO: 121207 - DNA, 692 bp, Cannabis sativa
aacaccagagggacaggtgcctcccagagaaatgccccatcagcagaaacccggacaacctctctggacaaatggaagggtcaccatgatctcaagaggtcctcacatacggggaaccaccagaaatgagctgaagtgttacgctaggactctagaacatgatagtgagattcgggaagttactcagcttctggcctaaaggccgagacttatggatcaaccaatcaccttcactgaggaagatgcaaagccagtacgctttctgcatcacgaccccttggtcattgagactccaattgcaaataaggtcgtggcaagaatattggtggacaacggaagctcagtgaacttgttgttcaaagatgctttcacagccatcgaactcacttatagagatctctctcccagcagttcacaactcacgagatttaacgggaccaccctcattcccatggggaaggttaggctcccgatcaccttatgtccagacaccctacaaagtacattcaagtattgcacctttgtggtggtagattgtcccactgcttataactccatcctaaggcggacgaccctaattgacttcaaagcaatcacgtcaatccaacacttgtgccttaagtttccaacccaggaagcgagaataggaacggtttggggtaactagagagaggcgagatagtgttataacg

SEQ ID NO: 121208 - DNA, 5104 bp, Cannabis sativa
  modified_base (73)..(74): a, c, t, g, unknown or other
taaccctacatacccctacataaatccctacatgaaccccagcctttggatcaaagtaactgcccatccgacnnttacagtacatcacggattgcaatccgtgtccgtacgtaacgggacaaaatccggtccccatatatataagcctaacatttgaacttcctaatatgacatattttgttaagggttttatcttcttcacatttgtccatttttaaattttttgtattttgtttttctagatggagaacttgactcttagcttagttttgtactaaaattttacataacttttagagtatagaatgtttattggaaatttttgctaggtcgtatgacattttagtattcatgattttttataggattaatgttataatatgtttgtcaagacatgtgtattataatccaataatttatggtaatagattacacggtcgctctaaaactacggttatgtttatcaatatacaaagattattctaaaagatgataaaatggatagtaaaacaaacaggaagagaagagtcttattatatataagatattagctactaatattgatttccataattaattcatgtaattctgtgttgtgattattatatggatggcatttaacaacaaatattctgagttgtatttaatccctaattaatagtgtatattatagtgtactattactctatagtagttaggggtatttgtgccatctccttttacgatgtgatcagagatatttatgtcatttcaagtgagtagagagtgctgtactgcatggttgtctggtaaatactaaaagatccatatcggcaatagcaatattctactaaaaaaatcaattaattaaatggaaaaatacatacataacccttttcttttctgttattgagatgaatattaaataatatcgaattaaagaatttcattactaaccttttattaatttgaaacatggatgaaatagaaaaagacatacattataaccctatatataataagggacttcattcttcacatccttcttcactactaaaacaattgtcttatttttgacccaaacttgcaaagaatgtacaatgccttcaccttctacttctcttgcactgcctcaatctttcatctcttctcctgtgattcaaagcacaaataattcccttattaattttcaaggtaatctgttttctattttcttgataatgaatttatttctgtataatgtactgggtttattatttttatttttgttcatcctcaatccgctaatgtataaatatcattcatcttcttcatctttcttttcttatgcactttgctttaatgtagaaattttttaaaatattttaggcattacaatcgttgttggagtttttctaaaaatgagagaatgagtagaaagattagtatattattaccaattgttctttgattatcatttgaaaactccaacaatgattgtaatgccctaatatttttataaaatattataataatattataaaatattttataatattatagtattatatgattatatttttatatattaagtaatttttttataatgtaaatgtaatgatgataataattgatgatttagtatactctcgaaaaaaaaatcaattaattaaattgaaaaagacatacataacccttttcttttctgttattcggatatttataggggtaaagtaaatgtagagttgtgtgtgttgtggtagtacggagagagtatgagtgtaaaatgactcttcgtattgccttaagaggcatttttgtaatttcagtgaatagagagaagacactgcatgcattttatctcttctttttctctctctaatattctctcaacgaacaataaaataattaaattataaattaatttcagatgaatattaaataatattgaattaaagaatttcattactaaccttttattaatttgaaacatagatgaaatgaaaaaagacatacattataaccctatatatataataagggtcttcattcttcgcatccttcttcactgctaaaacaattgtcttattttagacccaaatccaaagaatgtatggtgccttcaccttctatttctattgaactgcctcaatctttcatctcttctcctctcttgtgattcaaagcacaaataatattcccttattaatttccaaggtaatctgttttctattttcttgataattaatttatttctgtataatgtactaggtttattgtttccatttttgttcatacccaatccgctattgtataaatatcattcatcttcttcttttttcttttcttatgcactttgctttaatgtagcaattttataaaatattttaggcattacaatcgttgttagaattttttaaaaaaatgagaggatgagtagaaagattagtatattattaccagttgtcctttgattatcttttgaaaaactccaacaataattgtaatgccctaaaattttataaaatattataataatattataaaatattttataatattatagtattatatgattatatttttatatattaagtacattttttgtaatgtaaatattgtaataatgataataattgattatttagtatacactcgataagtaatggttgtgttatttcatctttttagtaatatagctttaaatggcatttttctcattacaacctaaagagaagagagagtactactaggtgcatgatggttaggtcaatatgtgtatacattgtcccaacggtttgtattatatatttcttttcttttctaataatctctctcattttccatgcaacaacgaaagcaagcaagaaagaataaaaagaatgaaaatagaaaagaagaatactcacttctcgtcttagatctttgttgcaaaatcacacagttagtaacataatattattaatcaagattttcacttttctttctctctgagatctttcttcttctattttcagtacacaattaggcatattcattctatgaaggcacgtactaaagaagtaattaataattattaaaattttgtaccttatagttcctattcttaatggcatagttaatcgctcttatatttttttgttcttaatcgcatatatagttaatcgctcttatatattttactatgaaaatagaccgcatagttacggactggcgaagaacaccgggagtattaactccgatccgaaatcaaaaaaatctaagtaagtatcaatatacatatatctttgtaaacatatttatttgtatttaataatagtttgtctgtgctaggattagtaaataaaaaggaaaatgagaaaaaaaaaatatataccaaaatatcaatatgaattctaagatgagtttaaatttgtagaaaaaaaaaattgttctcaaagtgaataaagccaagaatcaaatataatacttgaaagaaaaatatgaaatatgagtaggaaattggttctttggagtttggaaattttttagtaattttacaaaattaacgaataaataataaaaacaagtccaaatcaattttgtgatccatttttaagactgcaatttcgtagtactttccatcagtataatgcagcgtaagataataataatctaatcctacaagtatcacattaataatctctttaatttccaaattaataccctccacacacatatatatagaaaatcaatacaaacaaatatcaacaataatatattcttatattattacaaaaatctagggtttagaaattattataaaatattttacaataatatataagaatataatcatataatactataatattttataatgttattgtaatattttataaaatattaaggcattagttggagtttttctaaaaattatcaaggagcaactagtaataatatactaatctctctactcattctctctctctccatttcccttctcatttctttcttaataatcatttctctccattaggttttcttgtcattacatccaaaaacaatatcgttgtattttgtatcgtctgaccactaaaactactttgtacatcaaattccctctcagtcgtcgtcatcgtcaaaaatttctgagtcacatttgataataatatacgcattctctcctccctttcttcttttattttttcccctgataattaatcgtttctctgatcatttttctacaaaaaaagaaagaagaattaagagcctattttattttcaggcacattcattcatttttcgaccaaattcttttatatccttcattttggatcaatagaagcaagtgaagaggtaatatatatatttttcatcaaaataacttaattatatttcttattcttaattgtctttctcgttttcctacaaatccctatctctcttccttttttgctgcaaatttttctttcttctcttttcattctcagatcgtaaatgaaagactaattaatggcttgaattgaggtattattaatctacttcttctttctttctctccaatttcttgatttctctctaatatccctagctttgctttcttgtcattacatcttgattttgaataaatatttgtattgacttggacttgtacatgagagtaatgtataaatattaattataaatcctttatcaagaaatgaatgtggcttctatcattagtataataattttatattaccaaatatttttatactaacgattaattatgacagatgtcagtagtgatttagattttatcttatgagtaatgtgtgatcgtttggctctgattgtctgagtataaatattgatatttgaataatgaattatataattgtcatggtaatctgaataagataaaaaaaatacaacatcaagaattacaaaaaaaaaataataattataataacaaaaacaaaaacaaaaacttcaaatataaatagtcaaagctaataatttttttttgacacaatcacggctatgtaatttgaaaatagaagataaaaaattagaaaaaaaaataaatactaacaaaaactttaaaactaagagtggagagttgtaaagaccgcttagtttaatttggaaattagcagtcaattatgattaattatgaaaatta

SEQ ID NO: 121209 - DNA, 1494 bp, Cannabis sativa
atcttaccataaaaaggaaaaattattttgtcacctaacttgccaaaaaaggactttacatattatacttgttggacccaacttaaacattctgtaccaattacaagacgcccttcaggccaaattcaagctcaagaccctcggccctctcaagtattttcttggtttcgagattgcaagagccaattccggtctctttctttcacaacgcaagtatactctccaactacttgctgatacggggaatactgatagcaaacctgccaaagcccccatggatccaagactaagactcaatgatcaagacggggacaccctcgacaatccgtctcactatagacaactcattagatgcctcctatacttgacactctcacgacttaacatcacgtttgctgtcaatactcttagccagtttatgtcttgtcctcgaacaacacacttgacaactctacatcatctcctccgctacttaaaaggatcaccaggacaaggaattttgtactctccaacatcctctcttcatctgcgtgggttctctaattcggattgtgcgacttgtccattcactcgtcgatcaactaccggctattacatctttcttggtgattgcctcatatcctaaaagataaagaaacagcccactgtttctaaaagctctgctgaagcagagtatcgtgctttggcttccaccacaagtgaaatcacttggatacagtatttactccaagatcttcacattgatcaacctacaccagcattcatctactgcgacaaccaatcggtaatacacatcgcaaataatccaacatttcacgaacgcacaaaacatatcgaattagactgccacttcattcgtgaaaaaattgccaaatcagccataagcctcattcctattagcagtaaccttcaactcgcagatgcatttaccaagcctcttccctccactatcctcacttcacacttgtccaagatggccattcatgatatctatagtccatcttgagggggggggggtaacaagattatgtatcagttagtatatataccagttagtggtagtgtgttctgttagtatgctgctatggttgttatgttgttgtctattatctgttatttccgtttatattgttcctgtttttatggtgttccttgatttgaggaattctgttttcatactctctgcttgcctatataaaggcttgattccttttgtatttttcattcaattcattcaataaagacactttattgttcttccctttcttccgcaataagtcatcctattccacactccaatgattcacattcagcttaggtcatcctaccccacaagcaacttggacgtaaatctgatatgtaagttattagttcgagtactttgttgtttatttctgttggaaaattgttgtgctccaatagaaatatcaaaccaacaagattacaactcaacgacaaataatacaaaggacaaaacatgtataaataatgtta

SEQ ID NO: 121210 - DNA, 844 bp, Cannabis sativa
acctcataatcgagttttcagtccaatccaaaagaggatctgggatatcattcatatctgatcttttgttttcacaagtaagcccaatcttaactgtgttggaactcaaaaactttgagaagttccaacaatagaggtgaaactttatcaaaagaaaaacaatagagctaaatatatagctaaaaaatcaaaatccttttaaaatttaaatgttgctaaggaataaatagtgagcttacacaaaccgaatgagcagttttttttctttaatcttaaaggagttaattaattttaaagattttttattgtagacttatttgtaccgtatgaccttaaattatatagataagtaagttggtccttaaattttattttttgataaatcggtccccaaactattttacttattttaatttatttttttgtgttaaattaaaataattttatttttcaattttaatacgttgataaaaataattatattaatatattttatttgtttatttattattttctgagtatttatatattatacaatatttaatttcttaccaaaatatttaaaatatgctttattcatatattttacaccaatagtggtaaaatttcatgaatttgctaatgagtagaagttaaaaattaatgttataatataaattacttggtagtttataaaagaaatattattttagctacaaaataatattttactacatatataaataaattttatattaactttttttatttacgaagaaatattctttaatggtagggaaaacaattagagaatctaaaaacctttattaacttatatatagttgttttttttttttgttttttt

SEQ ID NO: 121211 - DNA, 3406 bp, Cannabis sativa
tataagtaaccaaaaggttactttagaaacgcaggaaaattagaaaaaaaaaaaaagaatttcgggattagttttatttcaggcataatattttaaaattaaggtatttttcagtgacgtgacaaggtattattgtaattgagatttgttaagttatatttgtaattattttatattttacgtatatttttaaaaaaatccctttttaatattacaataattacattggactggtctaataaatattatacagcccaacaatttttttttttacaaaaatacctcttcctctacaatcatagccacaataaagaaacgaacaaaacccgctatggtaggagtttggcaatgatgaaacaacgttggcgacgaaaaatcaccattagttttggcaaatcgacatgagaggaacataaaatcaaaccgaaaatcaacccaaagcgattgaagaaagattctacaaaaaaacgaatctaaaacataaactcaaccctgagaatgaatccaaattctagaaaactaattattataaattcaatttatacttaagatgtagacatgtaagaaatagatctcgagttttccaaccaatccaagtcatgtatcatccagaaaatacatatcactacaattgctatattctaattattgcattaacgttgttttttagaattttaatcttggaattattcaattacaattgcgacaataaactaaattcgtattcatctcgcattatggatctggccatgtaattttgatattttttgttgtaattcagttgcattacaattttctattaattttatttacgcttagataattgacgttgcaatacttatacattgatcaaattacattgtttttagtgttatttgcaagtattttatgtatgcaatccaacacatgcctctcataaaaacaattataacatagtaagtttattcatattttaactttggttgagctgatgttgagttacaatgttcttacagttgtttcttcacaaaataacctcaaaactacaagtcgttgttcattagtctaataatagttggttaatttttagagaaatttacggagggagacgaaattttaaaattaataccatgattaccacttttttttttttttatttcaatcataatacctttgcattttattttttttaaaacacgcgtatacactcgaaaaaatgagcagcacatcaacacaaatagactaattgtttccttattcttttctttcctttgttttttgctctttttttatttgttaaatatgaaacacacaaatgttaaaatattaataattttctttaatattataaaaactttctttcttctatttttatttcttttttcaaaaaaaaaaaaattaaaaagtttttttttagtcacactagtaattatttaagctaaaaaaaattataccatcattatctacttttttaatgcaatcgtttcaacatatgagaagcacatattttttcttttactattatcagaaaaaatgactaaaatcaaaagtaacgttttagtttcttttctacttaatttattgaaaaaaaaagtaaattttcaaatacaacaaaatttaatatatcaattataatttagcttgttaatatttgttttataattattttatattttaaaattactaaatcatattttaattttataaaatacttttcacaagtttttaaaatgacttataagaaaacaagatagtaccatttttttcacttaaacaaaattcaatgtaccaattaatttcatgagttactaaaaagtattttatatttactagataatattttacataagtttattttatagaacaattttaataaatgtctaaaaaaagagtaacctctatattgtaatttacataagatttttttatagagtaatttcaataaatttctaaaaaagtataaccactcatcttttttttttttacatcgcatcgttagttagttgagctcaagagtagtatcatcacgacctattttttcaaaatgatcattttaatatatgaaaatcatatatttgctaaattcagaaaaaatgatcaaaataaaaaacaaccttttagtttctttcatattttgttaacgaaaaagtaatcaaactataaaattaaacaaactttaatacattataaattattttctaatttcatatttataagttacctaatagtattctaaatgagtttatcttattgaaacagttttgataaattcataaaagaacttataaagaaaccaaatagtatcttaatcaatattaaaattgttaatattaaaaaattgactctactaattttgatattaagtatactttattgtaactctgtaattttatcacacatgtttaaagttaacgaaaattactaaaagaatgtgaagctatcttaaataacaatacatagtaacttttaaatatgaaaataataataatacaatttaataatttgtgaagttagttggttaattttacttaaattaacagtttatttactctttggttaacgtaatagaaaaagaatggtagtgatgtctacgtacgagatgtctgttattgcaatcaaatattgggtcttaaagattttaatttaataatttttgtaaaatatcattaatcattaataaaaaaaagttactcacggtggtattggtactactagggcctaatgtcaatgctaaaatatataaatatatatatatatatatataaaaattatactttttatttggatcattttcttatgataaaaaatatttatgttttctatatattaaaatgattgcctcaattagtatttttttatttagtgtaactaatatttttcttagaaagataaataaaaaagagaatatatatataataaacaaaaagacaacaaaagaaaaaagatttgagcacaaaaagaaaaaaaaaacttcaaacgaggtctattttcatgattcggtgggtttatttttatggttcggtatgaatgcttttataattgtgtattattttcactgatactatttatataattattttacaattgtcgtataaaactaaaaaattccctaatttttttctaacaatattcaaacacatggtttatacatagttgctagtatcttgtttatgcgatgcccaataattgtcttactaaaattttattatgaaaaaatcatggatcaaattggcaatgtaggactcatgtggaaaaaatattgtggtaagtttgtttatattaaaaaaaaaggaggttattcttgttttcaagttgtataatagttgttagagattatattacaatggaagataaaccaagatatatataactcaattataaaaataatacaaggacaataaaagagattgattaaatatatgttaca

SEQ ID NO: 121212 - DNA, 993 bp, Cannabis sativa
cccccagcatgattgtcgtagagcatttgtgaactcctatcaatagctattcagtttctttcttggtaacgctccttagagctggtgttgggataccatgtctatgtgttatggtgtgcaggattggacatcttgtagccatccccctaatccctacttatttggtaaggtttttgtttggaggtatgttactctaggtgtatccatgttggttgtctagcaggtctatttcttttaaaatagggaggcttagttcttgaagaactgagtgggtaccaagtttgccttggttgtcaaggcacaactagctagttgaccgagtgcatcggttgttgtgtcgtctttggggacttgccttttagtatagcctttgagctgacttaacaactcaagtaggccatcatcttcttatattgagttgtatattcacctaggacataacctatgactagttgagattcatggtgtatgtctaggtggtcagcctacgcttcgtgtgctagcatgaggccaacatttggagcttcatgttcaacctcgttgctagaagctttaaaactggccttgttgcctattgcatccattgcccccaagagtgatcaatgtgcctattgggttgagttattttgctcttgcttccacttcttctctagctcttgcttttctccttagctttgagagatttggggagatatgcttctatgattagccatgaagttggcaagagcttggcctttgttagccatacttggttgacgggtggccttatgttggcttagtctcagtggttcacttgtgtggtcagcctaatgttttaaaattttgtaaagcctgctgcaacagttgatcggtgtacattttttatagggtgtgcttgctatagtcatattcccgatttatgtagtaactattaaaaaatattttactaggacctaaatttactaacaagtatgtttttaacatcctaaatataaacttctaaaacgataaaaa

SEQ ID NO: 121213 - DNA, 1622 bp, Cannabis sativa
taagtgttacaaaccgtaaagttccagtagtttagctgccaatatccctttagtctaataactattttgaaatatcgttaaccatttctgtgtcacctctaagtgttaaagagacactattgttgcttaataatgttcttaattttttatagtaaaaacttaaaaatgagatataaaggaaaaaaaaacaattaatccttttattagagaagagtgaaagaagaagaacaagaaaaattatggcacgtttggtaggctttaaaatcattctaataaaaaatgtaaaatttttgttatatttaacacaaaaaaaaaaaaataataacattataacatatatgcattagttattagcgttatgtacgtagtattgctcaattacaaaactttatacaaaacttaatatttaatcgatccttccttaataattaatattttattaaaaatataaaatagtaataatttattattaccaatagtctattattttatgtaatcattaataatattactaaaataataaaataatataaatgacatagaagttaataataaaaaaactagtaatgtaattttttatattatactatattatgtgccaaatttaaaacagcttgttttatgtgtcgaatttcgtacaacttttaacatcctattagagcacattttgtgcaaggttgactattttagaaatcatctatacaagagcagagtagttataagagctaaaaacaagactaaagtaactaactctattaacagcactaacagacaaaaccgacttaaccactaactgacagacagttaaactaatcttgagtatcctcaatatcccctctcaagctggaaggagaatactataatgacaacttgtgacaaagaaagttgaattttgggagagtgagagccttggtgagtaagtcagctggttactgatttgtgggaatataggaaatttgaactttgtttttgttgattaattctcgaacataatagacatcgacctctatgtgtttagttcttgagtgaaaaacaggatttgaggcaagcttctgggcaccttgattgtcgcaccatattgtaggagtgttggatagggtgatgcccatttcattgaggattgaagtgatccatacaacttcagtagcagtagttgagagggccttatatttggattcagtactcgatctagctacaacagtctgtttcttggatccccaagtgatgaaattgtcacctaggataacactgaacccagtagtggactttctgtcatcgagattgcatgcctaatcagcatctgagtaggcagctatggtcatagatgtagtaggttaaaacattaggccaaggttggtggttcctttgatgtatttgagcactcttttgcatgtattccagtgagtgtttgtagggttttgcatatattggcttaatctattgatggcaaatgagagctctggtttggtgagggttagatattgcagtgaacctatgatacttctgtacaatttgggatcatgaaactgatcatctttggtggtgaatagttttttcttggacacataggggtgctgcaaggcttggactcttccatatcggcttttttttttttttttttt

SEQ ID NO: 121214 - DNA, 876 bp, Cannabis sativa
  modified_base (841)..(851): a, c, t, g, unknown or other
agtaaggctttttatcgagtttagtggactttcttaaaggctgtaatggaaaaagtgggatttgccaagtcatggattaatttaattcttaaatgcttatcatcctctagtctcactttttcaataaatggagatacaacggggcttgtaaagcctactagaggccttcgccaaagggatccactatcgccttacctgttcttaatcttttctgaaggactctcatgattgctgcagcacgaagaaacttttggtaaccttgaaggactaaggattactagacgagccccatccatttctcatctcgtttttgctgatgacagtctactattttgtgaagcaacaaactcatctgcattcgcaattaggagagctctagatatttatcatatagcttctggccaaatgctaaatcctcaaaagtcagttatgtcattctcccccaacactcatacagcagcacaactcttctttcaacaaactctaaacatgccaatcagtgcgtgtcataaaagatatcttggacttccctcttactttgaccgtgacaacaaggtaatctttagccatattaaggaatgtgtttggaagttgatgcatgcttcgattaacaaaaattttttgtcaacaattggaaagcatgatggcaaatatttggaggggttcaaataaagatggctcaaaaatacattggacaagatggaaattgctttgtaaatcaaaatttgaaggaagaatagggttccatttttttgtccattacaattaagcactacttggaaaacaagcctgtagaatatttgacatgcctaatgatggaatatattttacaaggatctannnnnnnnnnnaagtatgtttttaacatcctaaaca

SEQ ID NO: 121215 - DNA, 6784 bp, Cannabis sativa
  modified_base (407)..(409): a, c, t, g, unknown or other
  modified_base (486)..(487): a, c, t, g, unknown or other
  modified_base (6725)..(6738): a, c, t, g, unknown or other
cctggcgacgtatcgggcgtaggtacgggcgtcagtgatatgaaactgcctagttatggcatagatcgaaaccattattgtgtttctttttaacgacgtatcgggcataggtacgggcgtcagttatatatgatgagtaccaggcgtaggtacgagctcgtctgattagacgatgcgatatatttgtgctaggttatggcacgggctcacctgattaggtgatgtaattatatgatatatgggtgcaggtttttggcataggctgacctgattagatgatacaagttatgcgatatatgggtgccaggctatggcacggacttgtctgattaagaaatgcaatacaggattatcagattaaagcatcgacttgtctaattaggcaacgtgatgttatgaagatggtnnntttatgaggtaacatatataaataatttatataattaattgaatatgaattctattattggtataatggttttgtannaccaaatatctgtatactgatgtttatttgtggcagatgctagtagtgatttggatttcatcttatgaaccatgtgtaatggtttaattttaatgggtaaatgacaatatccgaataataacctatatgattgttattattacttttcttgctgagtccttgtgactcacaggtgctatgtggtgcaggtaaaggtaaaaaaaaagctagattaaccatgaggtgacagtcttctctaggaatgtaaatattaacctcactggcctacgtgccgagttgcaaggagttgttttgggatgattgtatctgttgtgtattttgattttgtgtttaaatagttgtcttatatatttcttttgcaaaactttttataacagggatccccaaaatacgctttttatgctgttataatgtccatttttagtgtttcgttttagtcaaattttaatattatcacattttttaataattaattattatattagtattaaactagtttataaaatcacacacgtgacgtccctatagattagggtgttacaaagatccaataagttagccaacttgtaaggtatataggtaaggcaaagattagtaagtttagaaagtaagtacttgctgcagcagtggcttctctagtttatagtatttggagggctcagaatgatattatatggaatgaagaacacttatcttccactagattactcgaagacctcaaatggaagctgaaattctgaatttctatgtttttaccaaagaaaattacacatgtagatatagagtggtttcaagcattataagggtacacatacttaggtaagaaaagaagaggaaaaggaaatgtatagatagtctttaggctccaaattttgagtgctattagtgtgtaaagattgatttgtgcaataccacttcctaatttatcaaaaaataacatgcttgtgcattactaaataacatgtcatacatagatatcccacaaagttataatatatgtatctgatagtagaaacatgatatataaggattatcctatgtgtttatgtgtttttcattttttgaaatcaaagcatgtaaactggctaaaattaatttataattaacttagtaaaattagcctattcatttaaaagagttctaaattatgaatggatttttttaaaaaaatttgaggcttttattataaataagttaatcataattattaaagttattaatatgtataattctgggaattaataaaacaaacaattgaacctaaaatattgagtgggagaaggattacatgtcaatgtaacctacgacatacattgttggtcaacatcgagtgaggatagattggccttgagatagctttattttgtctccgtaaggaatgtatttgtctatattgctgctcaaggatgatctgttgacaaaaataagaggaagtgatgtattttagtgtggcattgacccttaaggtgacacactaagttaagtcatgaaatctaaaataatgggttacactcataaagtgcaactaagcttcatagtgattagttgttaactttgtcaaaaagcggtattttatattttgaaaaggaaatatgagatatttaggttttaaaataataaagatgagaattgtctcgtaggcttaatgaaattgactcgacaccgaccctaaggcgtcgatcaatcgtcaaagtgttttatcgtgccataacttaaacaagattttatgtgttttacttgtatgatctcatgcatcatgtttatagtaattccaaaatgatatttaatattcatgcataattgtctcttactactttactagcacttggaaaactggatggtgataatttttatcaatggaaatcgaatctggatttaatgctagtttgttagaatcacaaatttttcctaactaatgagcgtccaaaggagcctactgcaaatgtctcgaaaaatgtttgggatagatatgatgcttgaattcaatccaacaacaaggcaaaatatttgatgcttgtaagcatgtataattttctgtgtaagatgcatgaagatatggagaatgcatctcaaataataaattttctacatcccatgtttgggaagcagtctaatcatacaagacatgatgctacttgtagctacatgaattataagatagagaaggatgcccctgttctatctcttgtattgcacatgattgagctaatgcatgaggtagagacacatggggcaatcattgaggagtggactcaagtaactatgatccttaagttgctatctccttgcttcaaggcttttaccacaaactatgtgatgaacaagctagagttcaacatgactccattgttgaacgagttgcccgtgtttgagaaccttaacaagcataagtccaaggaaggtgaattaaacattattgaagcgaaatccaactcttctacttcttctgataagaaaaaggaagtggaacaataaggacaacagcggtggcaagcccaaaggcaagaagtcacccaaggccaagaagaacaaagccagccccaagtccaaggacagtaatgctaaaggcaactgtttccattgtggcataatgggacactgaaagagaaattgtaaaaagtatctctccgagcttaggaaaggtaaatatgatttattcattcttgaagttaacttagtggaagataaaaaatccttatggattgtttattctagagccactaatcatatttgttattctatgcagatacttgaatcgtcaagggagctggccaatggggaggtgactatgcacctagggaatggagcaaatgtgtcggtcaaggttgttggaaaagtccacttgaaatttaataataaatttttgatattgaacaatgtttattttattcttcaatgtaccaggaatattatttctttatctcttttgcatgaacaatttttcaatatttttttttaacaaacaatttttcaatattggttttattaataataagattattatttcgaagaatggtacacctatttattctgcaaaacaaagtaatagactttatatgcagcttttggtatgcaaatcttgtgtcaaaggcaagatggcaaaataacttttttttgcacgccaaagaacaacttgatctaatacagaataatgtgtgcgaacctattaatattcaagctcgaggtggttataaatatttcatcacctttatagacaattattatagatacagtcatacttacctaatggccaagaattttgaaacttttggaaagctcaaagactttaaagatatggctgaaaagtaattaggtaaatattttaaagacactgtgattaaatatcgtggtggcgagtatttggattctgaatttaaaggttatttgatggaagaagggatcttgtcccaactcacatcacctagaacacctctatagaatagtgttgtagagagaaaaaactagaccttgttatacatggttagatcgatgatgtgttactcatcactgcgactaaacttttggggatacgcacttttggcggctacatagattttgattgtagtactctcgaagagcataagcaatactccactagaattattgaatgagacaaaactgagattgaaacatttccatatttggggttgtcctgctcgtattctcaaacctaagtcttggaagctttctcctaagactgaagtgtgtatatttgtaggatattcaaatgagacccaaggtacctatttccattgtcatcaagacaaaaaagtgtttgtgttaacaaatgctacttttcttgaacatgactatatgaaaagtcagaagccacaaagtcaagtggttattaaggaaattagaaatgcgatttatgaaccattaattttagtaccattagttgaacgaccagttaccacagttcctgaaatggaaatcccagtacatgattgtagtgggaggattgtgagagagcctgtttgctacgaacatgaagctcatgttcttatttttgacacagataaggacgatccattgacttacaaagaagaaatggatgaccctgactcaaaaaattggaatatgtcatggattaaagaattgacttaatgcgcaccaacaaagtctatgaatatgaaactccacctgagcatattacgtccattaggtgtaagtatatttttaaaaagaagaaaaatgttgaagggatggtagatatctttagagcttggcatgtgaccaaaggctacacacagcgagaatgtatcgactatgagaaaaccttttctcctgcggcaatgcttaaatctattaacaatcttctttccatagctgccgcatatgattatgagatatgtcaaatggacgttaagaccgcttttctaaattacgatcttgatgacatcatttatatggaacaaccaaaagggtatgtgttacaagggaaagattgaaaggtgtcaaagtttcataaatccatttatagattgaagcaagcctctagatcatggaatatcacctttaataagactattaaagagtatgactttgaacaaaatgaagaagaagattgtgtatacaaatacattaagagttatgtagtggtattcctagttctttatgttcatgacattctaattattggaaacaatgtagaaaggttattagatgttaagaagtgcttagacgacaaattgcaaatgaaggatttgggagaagcaagttatgctctcgggattaaaatttatagagatagaaaaacgagaatattagcactttctcaagcaacttatgtcgatatagtgctagaaagattttcaatagggaaatccaagaaaggacaattaccatctacacatggaattactcttgtaaggatcaatgtccaaaaactcctcaagagcaagaggacatgagaaattaccctaatgcattagcagttgggagcttgatgtatgaaatattatgcacaaggcctgacataggctacgttgtagggattgttagtcattatcaatcttatccaagtttggaacactagattattgtgaagcacattgtcaagtatcttcagagaacgagagatctcatgcttgtatattctggttgagaattaaatcctactagatatactgatctcattttcaattagacaaagatagttgaaagtcgacatcttattcagtatttacattggtggaggagctatagtctggagatgcattaaggaaacaagtattgtatattcaaccatggaagctggatatataacaacttgtgaagcagttaaggaagagatttgttaaagaaattttacatagctttgaaagtagttttagaagtataaaaaccattggtactctactctgacaacagtggagcggtggccaactccaagaaactaaagagccacaagagaggcaagcacattaagaggaagcaccatccactaaggagtattatagagaggtgatgtaatggtcttgaagatcacattagagcataacctggcagatccattcccaaagacgctactagagaaatcttttatggattatatttctaatatgggactaagggatatgccgaattagcttttagggaaagtgagaaattattagggtgtatgccctaaaaagtctataagaaatttttttaattattaaataaagagttaaatatttgatatatgtatgaatgttaagtattaatatttatatgaattttatgttattaatatttatatgaatgttaacttattattgaataatctatattgaatatccaaaaattccttattcatatatgaggctgtggattgtagctgtacagaaaactaagacaactttactacgaataaaacagttaacatcatattaaagttatgaaatctttaatcaacagtttctagtacgatttattgatgctcactcttcaatgcaagtaatctttgttcagattacagatgtagtatgacatcaaagtgaaggtattatatataatatacattatatatgacaaggaacaatatgaatgaagttgtctttattaacatgccgattatcataaatacctaatccatatcataacgatgatcaatagtaaatcaacctaaattttgagtttcatgaactcttgtttatgttattagtttcttttattcactcattaaagtttcttagagaagatggttcttacaaactttgttttaacacactgaagtatcatttataggtagctnnnnnnnnnnnnnntaaaatacattgaagggtagaccggtaaatttgtccctattcagtg

SEQ ID NO: 121216 - DNA, 2635 bp, Cannabis sativa
  modified_base (1724)..(1732): a, c, t, g, unknown or other
  modified_base (2533)..(2536): a, c, t, g, unknown or other
taacaaaacacaaggtccaatctgtaacttttgcaaaatacaaggtccaaaatggtatttgcccttataaaatattataatttagagaagtgattaaaattttgttactattttatttgaatggatgattgtaattaagcaaaatagaatattaattgataataaataaaacatttagacatttatatatttattaatatttataggacatatatagtacacattggttttgtcaagtttttacaaccataaataataaatttaatggtgataaatagatgagtaaataacaatagctaatattttgactttactagattatttgtaaatttattttttgataatattttttttaaaaaaataataatttaataaatcaatcaaaaaataaattagtctctttactctctctcccacctcttctctctaattttttccattgaagcacttgtatgtttagcctcaattttcaaatatatcatccacatgcaaatcattgtccaaatttccgatcggagctcccacgatttatccattcactgaccataaaatggcttgctagggatattctaggctaaagaaccatagatcagatgaagagagcttaagtaaaaagtcgaaccttcactaacacttctcttgtgtctatgaatataatcaaattgaattcaagtcaaccaacatgtacggatttgctccaacaaaagtttattgtgtttcttttgttacttacaaatatatatatacctagcttcactccactccactcctggtcttgagtttggggtgttatggctaaaagctcttagtttgattactctgtttctgcttcgaattaatctgattcttcacctctaatctctaacaccctttaacccattttcctcttccaatcattttcttacctcaaaaaactcaatgagttgtagcgtaatagtattgcctacaaatgcgcttgttggatcagattcagtctcacaaaagtatcagggaaagaatgatgtcctcgaccctgtcttggccacaatagatttctgcgcctttgaaccttgggatttaccttgtatgtgtgctagttcttcatttttaatgtggtttctttatctttatgtcaatacatattcatttttatatggttttggtttctgggtttgttgagatttcaggtaaatcgatgatcgagttcaatgatcaggtgtagaagaaagagtaaccatgaagttgatagaatgacaaaggaaccataagccaaataaaaacctgccaattaattttttttctagaaaaaatcagcctttgtcactggagagaagacttttatagttcaaagaattggctttaatacaatgtaaacaatcacataataattaaaatataccttccaaagtcatcttcattaatggtctaaaaaacgtccttattctatacgtgcaaaacaatagtgtatactatagaaattttcaatatttataatattcctccttagatgtctataataactgtttcattaaaatatggtcgagaaaattcaatgggacaaaactccttcaaagaatattaaaattccttctggacatgatgaaaacgatgaaagaaaagaacagagaaaaagaagaaagaagaaacaaagaaatgaagaatctgaaagaattgattcattactacactgagctcaaagagctcgattatatacattgcaatgagagagagagagagtgagagannnnnnnnnagagagaaagaaagagagagagagttagttacagtaacaaactaacagctcactcaagctctcaaatgaatctaactaacttgagcaacaaacactaaagacagctaatgctaactaactttaattgtcttaacattctccctcaatctcataattgaagcatcatcaattgtgagattggttctgaaaatagcagatcgactacttgaaatagccttagtaagcccatctgctagctgattaaaggaaggaatgtgcttcacttcaatgaggccctgttgaaccttttctctaacaaagtagagatctaactcaatatgcttggtttgagcgtgtaaaatatggttttgagtgagcattatattgctcaagttatcgaaccagatcactggtgttcgaggcagattgagatgcaatttagagaacaaggattgcagccaggagatttcagcaaccacacttgctagactcctatactcagctttagtgctcgaccttaacactgtatgttgcttcttgctttgccaagtgatcatatttaagcttacagcaaaactagaaatactccttctgtcatcactatctgcggcccaattcgcatcatagaaggctttgagatcaagtgatgcatactgttttaggtgaaagccatgatgctatgctccacagacatatcttaaaattcttttgactgccaagtagtgactctgtagaggattgtgcatgaactgacacaatttattcacactaaaggaaatctctggtcttgtgatggttatgttaggaatattttaccaggannnngatttactaacaagtatgttgaatcaacatcctaaatatgaatatctctaaaacaatgaaattaaacatataagagtttaagaaaaccttatattgatt

SEQ ID NO: 121217 - DNA, 1589 bp, Cannabis sativa
acttaggtatttatttgctacctactcggcataaaacttaggtatttttgccgcaaattactcatgtaactatatgataacattatttttggtattaaatataacacaatttttacatcttttattaaaaatatcttatgttttcattttttatattgttaagctctaatcttttttttttatggttgtactttctaatgtttgacttttgtttgcaaattaaaggtattgttgaaacagaatatgttcaatgccaagttggattgccacatagacttgggaatattttaattggtccaaattattttgatttttaaaatattataaaattacattaaaatcatttaaaaattaaaaaaataataatttatgtttaaaattaaataaaaaattattataaaatattgagcaatttgtgacgaaaatacttaattttccacatttgtagcacttaaatacttcagttacttttttggcagctaaaatacctaagttcagtatttattgacagtcgttactacttactgttatctaccaaataggatatcaacagtccactcttaattggtccatgtcatttaatgggtgcaatgtcaatttttttttttaaaaaaaaatattttattctcactaattaaaacataaattaattaattttagaaaataaattctaaaaatttattgaaaataaattatattatattactttcctaacttaaaactctaaaacatcgtttcaaaaacaaaaaaaaaaacaactctaaaacataaaatcaaaaccataaaatcataactaaataaacaaaatgaatgaggataaaagaatggaacgattgaaggagtggttcgaaccgaactagagaagaggaagaagaagaggttcaaaccagagaagaggaagaagaagaggttcgaaccaaaccagataagagaagaaggaactagagaagaggaagaagaagaggtatcgaattcaaactcaaggatttgaagaaaaagatggctttttatagagaagaaggtacaaagaagcctaactctggtaatttttctttcaaaaagctcttttttttcaattttttatctctttatttactatttgaaattcttgggttattaagtcttaaataaatacatttaatgttcgggtatagagataaggttatttctaattgagtttggtgtatattctaaggttggatattctcccctatataaagtctcttttattgtatcatttaatacatatattcagattaataaaaaaacattttccctctccatctctctaatatggtatcagactaagagagagaaaacctaaccttaaccttgcttgaccaagatccatttttttttgctaaatctctgccatgactcgcatgcgtagtggccttcctccggtgttagctccaacttctggttctcttgccgacgatcttccatgatgctcaactctagatttcgttcgtgaaactgtcgaagatcagcccacattgttaaattgatgtcctctggttcttctccaatcacaggcccttcttgttgggttttattccctaaataaaactctttacaatctgattagt

SEQ ID NO: 121218 - DNA, 1379 bp, Cannabis sativa
  modified_base (510)..(520): a, c, t, g, unknown or other
tttttttttttttttttttgagcggttccaaaaaattttgctaataaatagtacgcaaataggcttccaactgtccttattcaagtggtgagggagcaattcaagaactttctcccaatctttcgatttagtataatgttgcttaaactacttatgtatattggtctttcgctcactatatctctccgcccagtggcagacctaggattgaattttagggtgggtttaattatacatttaatataatctaaaacaataaataactagctaaatttaagtgaaatgatagtttaacaacatcctcctattctagtggtcataagtttgatcctagtttgaactttattcttcatttgttttatttaagaaataaaatgtacatacacgtggaaaaaaaaaaaggaaattcaaaacatggtttccaatgtaaatttaaatcttaaccaatttttttatttaactactgtatatatatgaaagtaacaattctatattaatatattttcaaannnnnnnnnnngctttagccctccctcaacacccctaggtctgcctatgtctctgccatctccgtatatagagtccccatttgtaggtctcgatggggattcttgtcaatattaaaataaaattgtataataaagcaattaaagatttatattaattttcaaatgaccttataaaataattgaaaccataaataattgaaaatcactcacccttatacgattaaacacttgatccttatattgttggggtacatcgaaaaaattataatgatgacctagacataaaatggatacttactagcccataaatcaaatgtaagcgttggcttcagtccccaactattttgcatgtactgaggtccacctcaacctctaatgttttatcggctttccttcttcgtttttcaagttcagtgtttgaagcaaggccacgaccctttctgacccttggttcgactttatttgttcgagaaattttttttctcttagtacgttagaaaataatcatgtatttatagtaagaataaagttagggatgaaaatatgaaacttgattagcaaaacgacgatactctagaaggatcagattagtagctaattgagatcaaatcatatttaacccgatctatttatactcatactttcaaggaaaaaattagattttaattacttttgcccgtaattttcagaattttagtatttattaataacaaaacaaacaaaaataaaataagtatgagcaaaataggtatttagtatcagctcaaaaagacctctatttttatttatatatatatagggttaatttcacaaatgcacaaaagtaacaaaaaaataacaaaaatacagtttcacggaattttaaacatt

SEQ ID NO: 121219 - DNA, 1988 bp, Cannabis sativa
  modified_base (110)..(128): a, c, t, g, unknown or other
  modified_base (1071)..(1071): a, c, t, g, unknown or other
  modified_base (1302)..(1311): a, c, t, g, unknown or other
  modified_base (1959)..(1960): a, c, t, g, unknown or other
gtaacatttatttaatctcttagtccttgtattatattgcaatagagttgtaatagcttgatttttttccattgtaataaaatctctaacaattattattattattattnnnnnnnnnnnnnnnnnnnttattattattattattatgtatgggttgtagtattggtgtttttcagatatcaacatgaacataatttaagaatgactgctcgagttggtttgcaagaacacaattgacttgaagacaggtatatgttccgcatatttatttctgtccaaattgaaaatgtaagaactgtaatgatacatgcaataaaactaatcacatggtttatatagaggttctataatagggtcgcatggcctgatattgacaaagcctaaaaagtatgaaaatgatcagggaaatgaaaaagaaaataaaaaccatcaagctagcacccttgtaaggcccttcctcttctatatattttcatatcatcaaaagtgaacaaacaaatgactattaattcctactaatttgatatgcttaaatacacattgaaaaaattagttgataacagaacaaggagagaattcttttgacttgggccagtttcatcaaacctaaggccatatttgcttatattgtggtaatcaaaatatattggcatggccgaaaagctttggcaaatagtaaagtgaaagcatacaaaaagttagagtctttggagtaggtctactctttctcacctttaacattcactatatacatatcttcaatatatatagtcttgattttttttacttattaataattaaactgatcatacggtaattaataataaaaaaataaaagtaaatcaggtctaaaattaaatatacacaacatgtttagaagtatacaacaatattcaaaagtagataaaattttaaaaatatatatctattttatataaaattaagtataaaattaagtaatataaccgtttttcgcacggcttttcgcacggctaatttaattttttttagtattataagaaatagttacttaaaattataacttttatatagtaaaattataaatatatnatcttatttcatattattattaataattttattattaaacactaaatgcataattttattaattatattatttagaattatttactaagaagtttaaattttattatatgaagtattttaaatctttttgttgaaagaaattatttttataaaaataaataaacatgatggtgtagaaaaaaattacggtatctcattcaaaactattgttattattgtatctcacttgtnnnnnnnnnntatctcacttatttttatcactgtatctcacttattgtcatcactgtttctcatcttttgtcattaccgtagttcacttgtagtcgtcactattgtatttcccaaatctaaatcttaatcttaaatttcatctcaaattttaaacattttttaacatttttaagacattggagaaaatttattagtttgttctgttattactaattaatatgttttaaaaaaataattattatttttttaaatattttaattaaaatatatatatatgtatttataaatgtgatattttagttatgagaaatgctaaaaggcagccctcattggtatcataatattattatattattagtgtaattaagtagtaagtctcatataacttaaaaaaataagatttagggaatatcgcgaaccaatcgcaaggcgtcacccatgaaaggtgttgggcatcagtggtgcccaatagcaatgctctttaattataattatgtgatacttgacattaaagttattatttcaaaaaaagacatagactttttttaaaaaaattaattaatatttttttattaaaaaatttaaatgtggtaaaagcaattgaaataatatttcaagtatcacgtacaactgattctttttattattattattatnnttattattattatttattttaaaaaaaa

SEQ ID NO: 121220 - DNA, 901 bp, Cannabis sativa
cagattagatcggatgaacactcctactccttacattcttcccattggatcattaatcaatatgtaataaagtgtctctattatagaaacaaaagaagcatcccttgtatagaagtgtcctatatttatatatgtgcctcaccaacttaaatttctcggtggtcccttttatctttatcctatatacaaaataagttactgttatggtgctagaaactgtgttttgcacaagccaaaaatttataattagtgtactatgaatcttgtaccagaactcatgatgacagttttttttcttgtattttattctaacgatcataatataaaatatttagagagttatcctaaatatgttttgggttataatgatcaagttggtgggtggatttggaatgaaaaaaaaaaagaataaataaataaagatatgtatatgtatgtacacagaatagaatgatttagttttggttaacttaatcttttctttcattgattatattgcctaattattattggttagtaagaatgatgggagtgacaagaaagagaggaagagaaagaaatgtctcaatctcatgttctgtagattccattattataagatttttatttattttttctttttcaacaagaaaaaactcatataaatataataaagtgttatttcatagttgataatatattgaaatcttatcttttatttctacatgttttaattatttcatttgagttgattggagtaatatcattagaagactacttgatggtcatattaaaaaaggtaaaattttaaattttatagtaagtcaaattattattgaatttccgtattttatattcccagtttaattatttaattacatgcggaataatgaaactggtattgaaaacagtttttccgtag

SEQ ID NO: 121221 - DNA, 876 bp, Cannabis sativa
agcatggcataacatttacacaacatatatcactagggtgataaccctaatccttgttactaattatttacatatatcatttccaatataagtgccatcgcgcataactctacgtgctaactacagtcttccttgatgtcccgcaatagtagagattccgaatctccgggggctcctgaccaagtgtcagtaatcctactcacaatacagagatttacacaaatagggtcaacccttgattccacattcataaaatacatacatggaatttaaaatatagataatcacatagagctcagaatgagctttccaacggtacatagaactcccaaaacagagttcggaacacatagtttgcatttccaaagtttgtacccgaagatgcccagaaactagaaggcgaggcgcgacatgtaaaagtcgtgccgcgacacctgggagaaactctaaggttccatcaagaggggcgggccgcggcatgcaaaagccatgttgggacacttgtgttttaaacccagaaaaccaacaagctaaacttgaatttcagccccaaaaacttaactaattaaaacaccattcaagctaatccttcaccaaaagtcaagtacctacctaggctttaacatatatgattatcatgcctaaatttagaaaaacaacatcacaattcaaatttatacagcataaaattcaaagctccaacttgagcaaaaatccaaataaacctatcttgaattcttacaaaataaaaccaagaactcatgcttcacacaaccaatttttagagctcaataacagaataaaaacacaagtataatcctcaaaatttctgcccaaacctaatctaaataaactcaaaagattgaagctcaaagc

SEQ ID NO: 121222 - DNA, 1592 bp, Cannabis sativa
tgtaaagggttttatttagggcacaaaacccaacaccagatctagtactgagtctgagtacagggcattaggacatgttttagcagaaatgtcatggattgagtcattgcttaaagaactgaatttcccacttcttcttccatcaatcacatggtgtgacaacatcagtgctagtgctctggcttctaaccctgtcttccatgctagaactaaacatattgaaattgatattcattatgtttgtgacaaggtcctgcaaaaacagttggaagttaggtacattctgtctcacgatcaagtggctgacttgttcactaaaggtctatcaaattccagattctcatttctagtcaaaaaaacttggtgtgagatcctcaccctttcatttgaggggaggtgttgagaaatgagatgcaatgcgaaggtgcattgggtcctatcagcagtgtgctgcaccagattgctctctccttagattgtgccaggtgtaaaggggtccacgtttataggaatcaatgattggaaattctgttagaatattctctctatgtaatctttattgggatctgtattttgccacctgtaaaatgagccgttgctcaccaaccttgtattggccctaatactctgctatataaacaatactctgactcaatgattaaatggggtgagaaattattcatcaacatatttcgcttaattttactggtgttaattctaatttttgttttaatttgattttattcggccaattataatctttaaacacgatgattaagtatagattaataaagggataatggtagaaaaagaaaaacacaaaaataacaaaaaaaatgtataaaaatacggttgtataaaattttaaatatttttacgattttcatgatattgtttacagaaaatacgatattttcatgtatttttatattgtattcttattaatttattgtagattttttgttatttctatatttttttttattattattttgatgttgtttagatgttatttttacgtaacttttatttaatttttgtattgttttgttaaacaccatataaatgtaaaaaaataaaaattacactaaaaatttataaaaaaaaaatagtattttatataattatcccattaataaacacttgacgataaatattcaattttaagaaatgattttatattgtgaattttaattttatcattgctaatatccatacagtaaatatagagttttctttcagcgtaaaaattaaatttagttcatgatcaacatgtttattaatagtaagagtaaaaattgcaactttgcataagcaaacttgttttactatatttcatttattttttattaatcttaaccaattgatctctaaataacgtgtaaatatagattaataaacacttcctaacaataactttttacataaaatgttattaattcaaagtaagtttaaaaaattataacttcaaatttctcaattgaatttattcgtttaattccaactaattcgcgcggttataatattttttaagttgctaaatatttaaatcaataagtgatataatttaaagtatagcatacaattttgaa

SEQ ID NO: 121223 - DNA, 705 bp, Cannabis sativa
  modified_base (27)..(37): a, c, t, g, unknown or other
aggatgttaatgaaacatacatggtannnnnnnnnnntcttggtaaaatatttccaacatcgacatcatagtatttaattcaggtaacataccagccgccaacacctatagatttgcttttagaacaaaactgtcaacctcactacaagtatccttaatagtttttggtgcgggactaggatcaatgcagacattcttcttcaccaaagtcacaaataatggagtaaattcatctggtttattcgcaatgataaacaaaaataaccttagacgcttatcatttccaataacttcagggagatacattaagtcttttatgtacttgtaattcacttctaatttcaagtcactttgtcaacatcaagttcttcgtacaaaagatcaaccaaacgtgagtaggttacgttcatatcaatctcaaatgtcaaattttttgcttgattataaacccaatatatactctcaagctcccaaatatcattatacataaccaatgcaaaaataattgaacctatcatccgcatacattaaaaaaaataattaaaatttcaaaacaaaatctaacaaaaaaatgataaaaaaagtcctcaaaagccatcaatcgtctgttagaaatttgttggggtcacaattatatatatataaaatgtgtgttgagtcatcaaataaataagtcaaatttatgtggtctattttggaataaag

SEQ ID NO: 121224 - DNA, 1084 bp, Cannabis sativa
  modified_base (182)..(182): a, c, t, g, unknown or other
agggcataaaacccaacagcccattcccattctcattcctgtttctagcctgttctcattcccattccctaaaccccaaagccccaaaatcccaaaacgccaaaaccatattaggggaatgggaatgggccaaggaatggtaatggtaatgagaataggaatgggaatgggccagggaatgngaatgggaatgggctggggaatggaaatggaaatgggtcggggaatgggaatatcgtaattcatttcgactcaattatattgaatttttaccaataaatattcaatctttgaggaatgaagctgcccatttccaactattgaaatcatttaattttgaattatgtttaattaagacactaacccctctcatctcatttttatttccatttgtagatgttgtggacgaggagcacctcagtttgtcttctcttcgtccatttgctatgacaataaaaagtttagagtgaggattttagtgtgtttttcatgttgtttagatttagtgaaattcaattaattaatgggcgattacatatatttgaagctaataatgagtttcaaagttgaggttgtaaaaattatgcttaatatgatacatttgtgataccataccatgaaaacttaataatgatgccaaaatgatgttacaatggcaatacattgcaaagcttaattaactttgcactcgtatatttatttttatgaatttttacacttgatgccattttttactcttttttttacatttttatttattctcggttatttaaacttttttacattttttattttttaattttactttttcaaaagttcaataattacaaatatacctttactatgcatatgtcatattttatccattctaacacccaacctcctccataactgccctattcttcttttttttttttgatttttttttctttgtttctctttcctccgttcttcaacctccatagcccacgataacccagtcgaagcccttatccaagttttttctcaacctcccatctatgccactatctccattttgttcgataatctctgtaagttcttcctcccccattgtgttctcttc

SEQ ID NO: 121225 - DNA, 983 bp, Cannabis sativa
tctcataatggaccacaatttttcaagatctgataccaaagctaacactggaatggtaattaattattgcttctgctcttgaaattagttttgtacctatctgtccatactaaccgctaattcttcttggttgactctaatatgggcatatggatcttgcaaacccttacacaaggcaatggtaactaacaaaatccaaaaagcttctaaacttggtgattgtcttcgaccttgaccaattcctgtcagattaattctttcccaaataaaccgtgatcccatctttacaaataatgtgccctaggaaagacactcaaaatagccaacattcatacttcttaatttgatatatacagtctatgctgccatagacgctaccaaaccatctacagatgctgctcatactctgcttttgattgaaaatacaccataatatcatagatatttactatatcacatccatcaagaaaatccttgagtaccatgaacactaaatctataagagctactggagcattggttagtccccaaaagcataatcaaaaattcataatgaccatacctagtatgatagacagtccttaagatgtcctccactcgaattctcaactaatgatagcctgagcgaagattagtcttggagaggactatctttctatgaaaccaatcaaaccaaccatcgatcataagtagagggtacttattctttattatcaacttatttacttctcgataataaatgcacatatgaagcgagccatatttcttcctaacaaacaacatacagggtcgggtaaaccctaaatcaagcattccctgaaatcataactttaattacttaaattttgttggagctattttgtaaggtgccctagaacccacctctgctccaaatgccaaaataaaaacaaagtctatctttgttctagtggtaatcttaaaagttcttctggaaatatatccaagaactcttgtaccactct

SEQ ID NO: 121226 - DNA, 1274 bp, Cannabis sativa
tgaaatgagttttattagggcataaaacccaacaaagacgaccatggcattaccaccaaaagtgctccacagataatccacggtcgttgttgaagaacattccaaacatcctccttagttggaaacatgaatgtaaaatgccatcatcatcctcttgccaactccaacctttaaaagaggaccaagctttcttaagtgcacccgcaatgacagttcttcatagcttgtccttacaaataagttttcctaggagtaccttcccaggtgcttcctgagggtcaatctcgcttgggtccaagctacaagttaaatcattagtcatgacttgaactatttcttcaaagaggtggctgagactgttatccgccataaaaatcaagccatagaaaaaaaaaaccctatgaaaaaaataaagtgagagtcttctgaaagtagtgtaatgtagtgtccaaagttcaagcaaacacttttgtataccgtaggcaacatccaatctaattgaatcgaaccgatccaatccaaattataatagatatccaattacaattaaattttattggatgctaaaagttggattctaattggattggatcagttattggatgtcaatctcaaaatctaattaaaaatcgatcaaatccaattacatttatatatgttaaaaaattatttatatttatttatataataaaataataaaaaaaatataatatacattcaattatatttttattggatttttttgtgttgattattttgtaacacttgattattttgtgtatttatttttattatgttttgttctattttattacctacaaatattattgttttaattatttgaaacttttagttatattatattgtaacaatgatatgtttatagagtattaaacttaaataaagggtgatatttatttttgacgtatttttctttatatttttattttaatattaaaatttaagtgtgtaattagatatctaattaaaaaatcgatcaaatccaattagtaattaaattagattgtatcaaattttgaggtgtaattggattggatcggatgatgattttctaaatccaattactaattagattagatcggataaaacgaaaaagttagattagatcggataccaactcttactttctatcttctttgtgttagcgtcattttttgttgctttccttttttttttctttttcttttttaacaatcatagttattttcttagggtaagttgaaaaataccatttttattaatcaattaatcaa

SEQ ID NO: 121227 - DNA, 791 bp, Cannabis sativa
  modified_base (765)..(765): a, c, t, g, unknown or other
tagtgggatacaaaaaagttgaatcatgttctatgtttggagcaaaccctacaatggtagagttagaagcacaaaaaattcaagagaagtacgaaaaggatgaaggacttattgagatttctcacctttttgagacacaaaaggtaatatatgggtatttttgattttataaaaaaaaaatattctgctaagagcactcccaatcactttttactctattctttaaaatactttacttaaattctattctctttattttacctcacacatgtttaccctcttcattattcatgagctaaatgtagagaattttttttttggagtttgggatgaggtataataatgcgtttggttgggaggaacgaaaatatataaataggaatgggaatggaaatagaaataagaatggaatggaataaaatttaaaatgcataaaaaagttgataaaaaaatcattaattttttctctggttacattggaatgatctttccttcttttttataatgtaacagtcattctaccaaaatggtggaaagaacattccattagaatatcattccaatatactttaaaatgcaaccaaacaaaagaatggaatgaaaattatttcatttccatttaattacctccaaccaaacgtcagctaagagtttaaagcatttgtgggagctcaattttaagcttgaaattctgtatattttaatattcctagtttaattatttaattaaatgcggaatactgaaactggtactgaaaacagttnttccgtagttacagaatacaactctg

SEQ ID NO: 121228 - DNA, 1025 bp, Cannabis sativa
aaaaatatttaaaattccgtgaaaccgcatttttgtaatttttttgttatttttgtgtatttgtgaaacaatcccaataaataatatgcgattgtgtgttgttagcttatcactatataaaaatcttatttttagtcataataaaatttgtgattaaaagtaaaaaaaattatgattattataaattactattactatgttataactaaaaggtctttggctaaaggtattagtcaaaaaaatcacaatttgttgtctaaatgtattttttgttacaataattgttgtgactaaaattaaattagtaacaacttatatctaaatattatgttttagtcacaagtaacatttttgttctaactaaaaatcacaatcagtcacaaaaaaattatactgtgactaaaaagttatctttgaaagtaagttttttctatagtataggctaaacttgacacaaccataccatttcagagttttttttttctttttctggaaaaaaataaaaatatagcataaaacatttatttggcactctatactctactagagatactctaaattttaattattcacatacttctttctaacagtattatttttaatattgattcttgaaaccatggttatgaaatattttaaatttaacaatattcattctgatatattttggattggtacatacaatttagttaatttattaataaattaaaaaatgtagaaaataaataaaaatatatatcgcatacatatttatggatttaataaagaaaagaaaaatatagtcgtataattctatctatctctccatatttttatacatttgttgcatatttttatagatttaatataataatattcatatgcagatttttttgaataataagtcaggttgcctcaaaaattttgacactattaattttatcttctaaaatatacactatgtgaaaaattttcttgaagttttatatttacagaaatttaatcattttgttatagtgagatttttctcacctagaaactcgaga

SEQ ID NO: 121229 - DNA, 1704 bp, Cannabis sativa
tcaacctgaacccttacaggtctcacaaaccagagccaacatacctgatcaccatgtccctgttgtgaaccagcatcctatgcaaactagagccaaagctgggattcgaaaacccaaagttctcactgcctcctttgttcctgccacagtaaaaactgctctccaagatcccaagtggaacaaggcaatgaacacagaatactatgccctcaaaaagaacaatacctggattctagtaagattacctccaggcagccaatgcataggctgcaaatgggtttttcgagtcaaggaaaatgaagatggcagccaaactcaatacaaagcaagacttgtggctaaagggtttcatcaacaaagtggatttgactttaatgaaacctttagtcctgttgtaaagcctgaaacaattcgagttctcctcactgtggctgtcactaaagggtggacacttagacaacttgatttcaacaatgcttttctcaatggtgatttggaagaagaagtttacatgtgtcaacctcctggtttcattgattctgaccatccagagtttgtgtgtaaacttcaaaaagctttatatggcttaaaacaagctccaagagcttggtttgccaaattgtcatctgctctacttagtttgggattcactcatgcaaaatctgacacctctctctttatcagaaatcagtcacaacatacaacatacctacttgtctatgttgatgacattattgtcattggaagtcatgctaaagaggtatctactctcatctctaatctcagctctctatttgccctaaaggatcttggaaaccttcattattttcttggtgttcagattacaaagacagataatggtctgcatttatgccaaactaagtacatccaagatttattaaacagaaccaaaatgcagggagctaagtctagcaatacacctatgactagtggccttaaactctctcattttggaagtgatcatgtccttgattccactctataccgatcagttgtaggagccttgcagtatgccacaattaccaggcccgatattgccttttcagtaaataaagtctctcaattcatgcaaaatcccttggagtcccactggatagcagttaaaagaattctacgatatctggctggtactttagattatggtcttcacctacaacgatctaccaactacgacatcactgccttctgtgatgcggattgggcatccgatcctgatgaccggcgctctaccacgggttactgtgttctctttggcaacaatcttgttgcttggaaatctaaaaagcaacagacaatatcacggtcctctacagaggcagaatttcgtagcttagctgctgttgtaacagaaataacatggcttcagtcccttctcactgaacttcgcatctctttgtctacacctcctactgtgtggtgtgacaacttgagcacagtcatgttagcggccaatcctattcttcatgcgcgcaccaagcatatcgaaatagatctctatttcgtaagagacaaagtcatgcaacaacaacttcaagttaatcatgtccctgctcaggatcaacttgcagattcactcaccaaggccatctctagcaatcggtttccctttcttcgagacaaacttagtgtggtttctcaatccacactcagtttgaggggggctgttgaagaataggattagtt

SEQ ID NO: 121230 - DNA, 2708 bp, Cannabis sativa
  modified_base (859)..(863): a, c, t, g, unknown or other
  modified_base (1674)..(1674): a, c, t, g, unknown or other
  modified_base (2661)..(2661): a, c, t, g, unknown or other
gcgaatggacaagtagaagctgttaataaaaccatgaaggatactatcaagaagaagttagatgctgccaaaggcagatcggaagacgagctaccccaagtattttgggctcacataactactgagaaaacagcaacgggacacactcccttctcgctagcattcagctcggaagtaatgttacttgtggaagtgaacatatcgactcatagacgagaggtttctgattaagaagaaaactaagaagtcctaaaattatctttggatctgcttgatgaaaaacgaaccgagtcgcaagtcactaatgcagcgtatcaacaccaacttacaggatactttaacaaaagagtcaagaagaggctattcaacgttggagacttggtgctaaggcgagtattttcaaatacgagagatgcgtctacgagagtattcaacccgaactgggaaggtccttatgtgattgaagcgatagtaggaactggggcttagaaattggctcagccaaatggctcgctaataaagaactactggaacgtggaacatttgcgatcctactaccagtaaattaatgattgtaactcgcattgttgatgtaatattttcaacttcagttatgaataaagtgaatcatttcttttgtttaagtaattacaaagttttactctttaaagttacttaacgggcatatgtgtatgattaaccagaatttatctggaaatacatgatatagtgcaaacccaaaactttaaaaattttcaaattttttttaaggtttttgctcaaacctttctgacaagaaagggatcaaaccatcgtaactttttgattcaaaacctgtctgacgagaaaggaaaatcannnnntataaatgagatataactcataacacacgtgcaaagctgtatattaacggcttgcacaatattggaaagtattaaatgagacatcaaggtgtcttgataaaagtacttaaacctagtgtatgaatatataatataactattcatgtaagcaatcaaaaatatacaaagtgataagatcattgaatgtatattcaagtttgcttaagacatattataactgttattggaaggcagaattgataactgctcgcaaatcaaaagcctagcagataacaaactgtccgtgcacgtaatagattactaactacttaagtacgaaaaatacgggcaacgaaaagaccaagagtactctatatttgatcaaatataattgtttacattgtgaataaaaacgcaagcaaacataaatatattaagtttgaatgcaaaagtacgaagtatttccgataaaaaagagctaagctggccagcgaactttacaaacttgtcttcacgaaaatgccacaaggggcaaaccattagactgttttttatacaaaaaatacaagactcattataggggacagtagggctcgaagagaacaatccctggaccagaactaaagtgtaatgactgcatttcataatatcaattagtaaagacaattagcactaattactgatatttttatattatttgtgaatttaaatttttgtgggtcccattgctagaaatgggtattagagttataatttctcaattccgaagattttattaaactctaggagtataatttttgctcggcgacaacagaaaatgcgatggatggcnagtttgatcacatgggtaagtctaaaaccttatttcttagtgggatgtgtattagggaaaataaaatatcgaggttgagcagcgttatattttttcaccattttacccctatgcttgaattaggctaaaattaagtaacaagggcattataatcttttgccaagggagtgagtggtggctgccttaggtgttgacacctggccttgttatttttcagcaaaggattagttcgaaagtcctttctttaggttgattctaagttttggtagctagttttagtgtatggtgttggatttgtgcaagtttgagttttgaaactcaacctttggtctctaatggcatgtttgaattcagtgggtttttctgggatttattggttggtatatgttgtatatgcactgattaggtactttggaaagttttgtggcaactggttgagttttgagcaagttttggatttttcgtggaaaactggtacaaaccggttaactggtttgccagtacctgtaaaactggttaactcattttggtaggttccccgaatatcccgttttctcaaatcttgtccattttaatgccttagttgggtgtttctttgcttcctaggctagtgtaattcctagttatgataacagagcctagagttgtagattcaggtttctggattacggttttgaacatgtgatttccacagttttaatatgtgattagggcatccattcagcacgagacttttcgttcaaaccggccaactcacttgaatttggaaaggaggtaagaactatatataatgtgtaatatgaatatgcgagtgtatgtatatgttaagtgtatatgcatacttatatgtttgccacactatcaacatttgtacggttatggtacatagtgcattggtatagtgtatattgttaagaagtacattatggtgataccagcacaagtacgggaaagtacagggtatgtgtggtatatcactcagtggtnctcagggtacgaaacaaaccctacgaacactcgtacagtgaggtacg

SEQ ID NO: 121231 - DNA, 1920 bp, Cannabis sativa
  modified_base (1873)..(1876): a, c, t, g, unknown or other
aagtttagagggtttgtggtaaattcttgattctcaatttaatactaccttaattcgaaagtttgggttgacctcttgttaccatgtatacatggtatacatacagaaattataataaatggtcttcaactataaaattatattattaaatgttttcattttaaaacttgtaaagcaatattttttttttgattatttattatttatattatattttgccatataaaaaaattaataagattttatatatatttttttaaattaaaaacaaattacttacatattatatctatattaattttgttaatttttattgtacattatatttgtattttgttgtatggtatattattattattagatgatatttattttttatttttctatgtataatagtggtatataattttgttagcataatacaaacaccttaatgtatgtttataattttattggcatgctacatatatttaactaggaaacaaactgcgcttcgcgtgcggttgtattctatttaatgataattaaattataaaactatatcaaattttaaattttaacatttttgtataattttttaaatagtgagtatctattccaaaattcattttttaactcttaataacacaagaaaattaaattaaattttagaattgatttttctaattttttaaactcaataaattttaattattaattaatttattgtagacatatatttctataaggtccattttcaaaacatatatctttggcataaattaaattgaaatcaagaagttttagtaattcgataaatattattttggtgtgattaaatttaaatttataaaaatagaattgggaaaaaataatgattaataaatctataggaaactcatcaattttaaaattattgtcatcatcgtatctcactcgtcactacatttaaagtcgttgtcatcactgtatctcacttgtaatcgtcactatcttgaaaataaaaatataacaattgataaatttatagatatatataaaagataatcatacttaataaagagaatgaagagtattaataaatgataatgtaagcaaaattaatttaaattataagataatatcatgcaattagaaaattcttttgaaaaaacttctcaaaaacctgaaaaaaaaaataaacataagaggacaagttgataaatagaaaaacgtgatgattttttatttaagatttataatattacttaaaaacatgaacctaaaaaagttatcattgtttaaaattgtaattatttttttttatttcagattttaatattactgaaaaaatatgaaaaaaaattttaaaaaaaataataaaatagaatgaagttattgtagaacgctatgttactgccttatacttagctttacatatatcatatatatatagatttggatcgaaaatctcactcaactttccccataaaattatctttaatgtgatcaaactatatataaaaataacaaaacttaataataaataaaaaaaaaacaaataaactaagatatttgaaaaataaaatattgctatacttaattttgatgaatttttttataacgtccaataatctctatatcactgacaccacataagcatccaataacatagagatattggaatattataaagataaatagttaaataatcttttttaaatgtgaataaaagttaataattgaataaatacctgagagtattctgttatcattaacatgtcgatgtaaattaattaactctggggttacgaattgaaactcattgatcgggatgttaactatatattacttctttcagtctcttcaatgaaagataagtattatttgtaagtgttttatattagtattgatnnnnctaatggtggcgactgtattggacttacaaaagtatgaaacaat

SEQ ID NO: 121232 - DNA, 1538 bp, Cannabis sativa
atttatgttcatattgattctcataatttaactagtaatcaaactaattattttctaatataaaataaattttccttcgctttaaaattataacttctaagcattaatgtgaaacaactcaattaaatacaaaaaatcaaagaatattatttttaataaaatgtagaaccaaacattaataatttccaactatcaaaaatagtgatattaaagatgaaagaaattattttaagaagcaaaaatcataggcatatattgtactgagaatcaaaacaaaaataaatacttaattaaatacactaggtttcatcatccgccttaataacaagggagcttagaaacccataagaaaattaactaagaaaagcgctaaactaactgagcgttttctttggatttttctgtttgaaactttgaaactctaattgaattctaaaatcctaagcttttatttatagaagggaaaaagaactaatgtgtaattaaacttattacaaattgcatgtgggtaaaaatacaaataaaataacttaactcggagctgccacgtgtcaccctctcattggttgcatgtggagacgtggcaagatgagagaatgccacgtggaaagtggctgaaaccactttgggctgaaggggctcgaaacggagggatgcccactctcgggctggggcgtgatgagcgacgcgtggcccagaatttctagtgcgtgccacgcgcgcgtggaggaagagaaggggacaagcccctggtgtggctactgcgtccgagtaggagaccgccacgtggcgtgcatgttggctggagaagagaatgggttggttgggcctttgtctttttgtgctattttttgggtttcaaaataccaatttctatgactttggaccatagttttactatttttttatttcttttctttctatccataattgttattttctcaatcaaacacaaaaaaaattaaatccaaataaaaaattttcaacacaaaatatatttcaataatttaaataaaaatatttatttaaaatctaattaatttgtatttctttaaataaaaataatacgttttcttaatttctttttttatttgtgtcgtaaaatgtatttttcgtacaaaattaactcaatactacaatattttcaaataaaaatatattacattaatttcatgaaaatattatatagaattaattttcttttgtatttttacactaataaatatgcagtttttactacttaacatatgcttatgtctatttatatacataacaaacataactaacataactaaccaaactgtcacaactcacaaaataattaggcaatcgtaaatagagaatgtgccttaaaatcaccaaaaacaaaatcttactttctagaccataacacaacagattaaaataattaaactaataaactaaaaattagaaagcaatcaaatggcattttctacgtacactgtttgtaaagcccgcttagttaatttggaaattatcagttgtttgtgattgattatgagattatttatagctat

SEQ ID NO: 121233 - DNA, 2935 bp, Cannabis sativa
aactttcaaaaaccttctgaacatattgcagagcatagaagtagcctttatctttcctttttcactctcaagcagttcaaaagttcgtgcaagatgtaaatatggagcccgctgtccatcccgccaacaagctgcacaagaacgatcatgtcaccaaaagttctaaatgcaaagaaaattaattatagctatgccaaaataactttcgtagttgcaacatgctactctacaagagacaccaaccatgctctgtgggattgtatttttcgggagatagtgatacagatgttgtgcttgcattgtccattaacaatcccggtgtcgagtattcagctttatgccccacattttctgtcgaaagtttcttctggccagaaaaactgctgagaatgctgcactggaattgtgaacttttgctagtgcccacatcaacttcacccccaccatgtgcaccctctggattattgtaataaatatcaagagccatattaatatctccctttgtcttctccactattgaggcagcatagcttctgaacgattcatttgtatttattatcttaataaattgatctatctctttcttgtattgtttggtgccatcactagacaaattttcatcttcagtgattttatcatgcaaggttgtatcagcactttgagaaccactatccaaaactttactaaagaaccttgttattgttggttgttttgatccacttgtttctagcttagacttagacttcaatttcaatttcttgtttggcttgttctcaatattctttttccttttcccaggagaagcactgctaaacaatccgcttatttccgacttagccttcaagtttactttcttgtttttcttattttcaatattcttcttctttcctggagaaagtgaaacgccacttagtatttgctttatgttaacaaccttaaaatcttgacttgaaggaataccaatcttcccagacggactatgatttttagtggttgtttgcaaaaggggtgcagagtcatttggtatgttgatctgggaagtagaattagaagttgaacaagcccatgcttgttcatggaattctgtctcatgctcatagaaggtggaaactgcttgaacaatgtccctactagaggttgcaataagattcaacatctggtctcgtgtaacccacgagggtaaacaatcacgaagttcctgaagggttttctccacttccgcatcacttaacacaattagtttttgtgaatcagattcttgcagtgggagtgatgattcagaaccaaaacaagtatcattattttcattaacttccatcacagaggacgctgtctttttgtccaagtgcaattctttggttggagcattgttggtgtccttcccatctttatcactcacttcacaataccctcgatgaaaaccctttaagaaatcttgtttgttggccatttcatcaactaatccagcaaaatgttttttcatcttattagcatgctcgccatcaagcttttcaacatccaagccaactgtaggaataacacgctttggtttcaaaagcctaacatattctctgagctcctcataattagaatgctcactatatggtacaagatgaatatcaaatgaatctttagacctaactgaaaatttgttacgcttcacttcatatgtccacccagtgggaacaaatccaatggccttagagtaccctctctcaaacataatttccttaattttaagaaaattcggcctaaaatatggccatgtctcacctaaaacgttccaaccaacaacatgtacatcactttcagattcttcctcagtaaaaacttcactttcctcacagcccaaaactcgcaaaacagccattttcttagcatccacgtatatcttacgattacatttacgtgcaatttcaagcaaaatcttctctttcccgataacatatgtagctacaagaaataatacatctttcacagaacctttgctttcacttgtaaccctttctatcacactaacaatatactcaatagactcttcttgcgatggaaaaataaatttcgggttacaataagtggtgtccaagaacacagaatccgaaccaacaaattctcgtaaaatggtgtccgacttcattgaatgacagaagcggaaatctcctgtatgaacatatctttcaaaatttccgtctgtagtcggaatcttaaacaggaattgtacagcaccagggcaatgattcgcatcaataagtacaatctcactcccatcaacgattacagattcacgaagaggcaatgggaaaacaaaaacagaaggtaccttgagtacttgaacgagaaagcgagcagtgatttgggagcagaagacgattcccttagaccaattgggggagaggccggtgtagtggtcggagtgaaaatgtgagaggaagtaagaaatggagtggtcgccggcgtggcggaaggcgtcgacgagaaaacgagtcttgggaatacgtttggattgtgggaaagatgaggggaaaggagagagggagaatggaggtggggagggatggtggtggaaggacttttgggcggtgagaaagaggtgggaagaggagagagttagggcttcggtggaagtggaagccatgggagaagttgctaaaacgagagggaaagagagcgggagaagaggaagcagaataccatattgaagagaataaatggcctaagttcagtgagtgtgtcagttaatgcagccttgcttgccttgccttttttcttttccaaaggtggaaattaacctcggcgctcaaatactatgcagctaggacatgtccacttaaagttcttatgaaaataatagattttgggtagatttatatttatactattaaaacggaaattttttacaaaaatattccatgattttttacttttatactatatt

SEQ ID NO: 121234 - DNA, 1111 bp, Cannabis sativa
cccggacctggacccggactcgggacccacacccggaccccggaaccccgaacccaggacccgggaccgagaaccgggacccgaacctggacccgcactcggacccagactcagacccgagacccggacccggaccccagacccggacccattgatataaaattaaaatggatataaaattataagttaatattaaaattctttaaaaaaaatagttgggtaggatctgatccgatccgagtatctgatccagcggggcggggcaaatccatacatgatctggaacaggtcggatcatagtcaaatcagatgacctgccccattgacattcctacagtgctggagtagaatgattgatgccaaagtctttgaggagagtgaggatccaagtgagttcagaagtagcatttcccatggctcgatattctacttccttcagtagatgaatgggatacagcttgttgtttttttgatttccatgacacaagggatctgccaaagaataggcaataatcaaaaattgatctccttgtgtctcgacaagtcctcgaatcaacatccaaaaaaaaggagatctggatagtggacggggatagacttgtttcagcataagctgagacagatggtgttgtgcttgatgggaagtataggccttgtccaggggttgtttttaagtgttgtaaaatgcgatgtgcatcatgaagatgtggaacccaaggagaaaataaaatttcgctgagatgattgaccgcataggagatgtccggtcgtgtacttgttaagtatattaatttgtcaatgaggcttctaaaattcgtgggatctgggagaaggttccctttgtctttgcttagctttaagttggtttccataggaatagaagcgggcgtaactcctatgtaccccgtgtctttgagtaactgtagtgtgaaaggtctttgaccaaccgatatacctttttttgttcaacaaacttcaagaccaaggaagaatcgaatggttccaaggtccttaagtttgaactggtccatgaagatatgttttgaagcgggagatggcatagttgttgaccttatttttagccaacgataacgagtctgatttagtaagc

SEQ ID NO: 121235 - DNA, 1020 bp, Cannabis sativa
  modified_base (35)..(37): a, c, t, g, unknown or other
  modified_base (992)..(994): a, c, t, g, unknown or other
ttctagggtattggtaaagtatgctagtatcggannnatggagtatacattggactagaccaatattaaacttggataagatatccagagcatgaaactcaggatgataaggctctagaacatgcctttatctattccgtatatactctctggcaacataataaatcggtaagagacctcctcgatgctgaagataaggaagagatttttcccaagattttggcactagaggaggtagacaaagctaagggtgcatctcaggaatctggagcagtcaatcccagaactaccgttcctgttggtgagaatatggatggctgtactcttccagcttctgaagtgcctatctcaaccgagtctgcgatcccgaaggccctatttgaggttcaaatgcaagatgtgcaatcattgaataaatctgcttagccttgattactcttgcctatgacattatctttattttcttttctttttagggggacaagggtcccccttttgagtgtgcagagacaatatattacacccttaccgcaggattttcaagtactcggtactatcttattaattccttggatttctacgttttatatcatagaattcgctaagttttaatgtttccagcctcgtgaggttctggttctaaaggcctgaacctttagttttttctaaattcttagacttaaatatttttcttgtgaaaatgttcttacagaaaggtttatttgaaacctcgaataactaattaacctgggcaaattaattatttgagaattgaaccttttcttggcatttatcacttattctcaggattttttgaacttaactctttaattaacctgaatcaattaatttaaataacctgaatactatggccgcgttaacctgagttaaccatgaagcctaaacttctattttaagttaacctaaattgactgtttaatgtacgaaacttgattcaaagcataataaggtagtgttgggttttatgcccnnnataaaactctttacaatctgattagt

SEQ ID NO: 121236 - DNA, 912 bp, Cannabis sativa
  modified_base (60)..(62): a, c, t, g, unknown or other
ttttactaaaattagaaaaaaatctttaaatctaacaatctctatagttcagggggcatnnnttggtacatgttaaagttcagagagcaaaaatcttaatagcctacatatatatagaattacctaatatttgctattagatacctaacataagtagtgcctagttattagtattctctaacaaaaaatatgttttaatatttctcttaaaatatatataatgtaaattatgatacgaaaccgttagcatgctattaatactgaatttgacatagtgttgttacacatcagattataattatttgacagagatataataaattttaaaaaaaaaaaaatgtacaaaaataattaattaaaatttgtgattattatttttttaaaataaaaaaaaaaaaaagagagtggtggggataagtgaaaagacaagtcaaatgtcaaatcgagggtctttgaaatcataagacagtcagtgggttgtgctgtcaatccaaaggatttgatttattttcttatttatttatttttaatattatttttgggggcaaaacaacagcttcttttaattttctatctctctctctcaattttaacgaaaccatacaaaaaaaaaaaaagaaaagaaaaggaaagaaacaaacagttttttgatctttattgttgttgatattctagatgttacaatagttatttcattaattcatcatccatcacacgtgccaaggtcttgtctcacgtgtgtaccttactttctaactaaattaaaaaaaaatgctaaaaaaaaagaaaaacatagtctaaaatcatacattattattgttattggtatgattaaatatttataatagggtaaataccattttggaccctctgttttgcaaaagttaccaattggaccttgtgttttgttaa

SEQ ID NO: 121237 - DNA, 2237 bp, Cannabis sativa
  modified_base (1447)..(1474): a, c, t, g, unknown or other
acaatagcattaatatagcattaattttacattaattttagcaagtttaattactgtcattttaattttgaatcattgctcgaccatttttatcattttccttttacttaaagttgtaattagttggttttacaacatattttgtttgcaatccatgtggagacgatcgtacttatcattttattacttgtttaactgcgtacacttacgttcataatttaccaggatccaaatttactaacatgtatgtttgattatattatataacctaacatcctaaacaaacatgaatctcttaaaacaataaaataaacacatataaatttctaaaaaatcttacattggtggcagtggaatattgtggctccttccgttcagatttctaacccttgttcctttctatcgtagaatattgccaagagctgaactaggttctcctttcatgatggaattcttcacaatcttctacactatgattgagtattgacttgatatgagtacgcatgtactctttcactatatgacatgatttcaacagggaagaagagaagaagaattcaaatttctaaagaggctctttgtttctcagttatctgacagaatagtgtgatgtagattatgataatgagagacatcttattctttatataggatttcatctagggttaggatttaaattatatagaattcaaaaagataatataatagcttaaattcccttaagtggacgacctcatatgtggaccccacaagtttcagttttactattttattgaacaacttatcttttctttcacaaataccatattttaatttcaatcctataaatgtcaaatttatttatttaataattataattaatcaaataaaattactaattaacttatttataattagaccttataaaatcacttaattaacaaataaaccctaaatcctcttttcttcctaattgagtcattacttagtgaaaattcataaataagacagtctaatttaggattctaattgattaattaaaaccaattaactgagtctacaagctaatattatgctccaataagtagtattaaaatttactaaataaatattctccatcttattaattcccctaactccactatagatttggaattgcactcttaattttataaaatgctctatatgttccaaatatagatgcgctattaattatctattgtttcaatccaaatcatcaatgattctctatagatgatctatatcgagtagagataaatttaccgttctacccttaaatatattttatccttaaaatacgtagcttcttgtaaatgatattttagtaaactaatataattactgaaattaatactctaccatttaatctcgtttaacaaagctcgaaagaaattatcatttcagttctatacatttatagatgctatagattctatatctatgattnnnnnnnnnnnnnnnnnnnnnnnnnnnnttcccaagatgtaagtattgggaagatctaattggtcaatttgaacaagcaagtcaaagaatactagtaatacaattgaaccagaacctaaccatatcaggattgagatcattgatctaagatcaactaagtgatatttacttagaaagatattatggtaagtttatgatatctttttatgtgaatattagtccaagtcgatgtataacaatacatccaatacaagcttattttaccaatgccttaaaaaatacataccactattcaagtgtaagtaaactacattgttgattatcatattagtagaaatcctgtgtaatgataaatcgtgggactaatatttaatcacatagtcttgattactttccactgtgtagacaacacagtaatcatgaataacaatgtgataagaattaaagaatttacaaatcaaaaaaataatcttgaagcaaacatgtgaaccaagcattaaacaagcaataaaatatttttgtttctttattgataaatgaatattcaagataacattaaaatcaagttttagtttgggcaaaaaacccaacaggaaattcctcccaatcccctcaacttttttactcttacttttttaaaggatcccagtcacaacaaccaatgtttggtcaatttgcgagtttatcgcagaagtcgatgatgtatgtgttgggttttgtgccctaaataaaagccattacaatctgattagttatcaatctaagaagtttgaagtgatttatgtttgcat

SEQ ID NO: 121238 - DNA, 883 bp, Cannabis sativa
agggttattcccttggattttactactatgcagaggacaagggaggtcgaacatgccttgaggaggcggcacgagaaagaaaggaggattttgtgagtgcaagtgagcaggctttctactgtgaagagggtgaaacctctgaaggcctatatgccattgttccccctgggccaatggtggagatcaaggctttagaaaagcagatggcacctaaggtggggagagaaactgcattctttgcagccgaactttttgaccaggtggccagtagtgcatccatgttacccttcgagacatgggcgacttccagtagcactcatgtgttcacccttgcccacgctgctaaaaaacaagtagtgggggtatactttgacctttatgttctttttctcactattgtgtactatttttatttcctcaagttttgttcatgtgttaggcagccttgatgaaaaagagggccgttaatgaagtaggcgcccttgtcacagaactcgggcaggcaaaatccaaaaatcaacaactgcatgctgccaacaagggtctagtggatgaaaacaaagttctaaggagagatctcaaagacctaaataaggaaaaagagttcttggaggtcaactatggccagcaagctcttctccaacaaggcgttcacgtaatcaatgatcatcgaaaggaaaccatatagagattgcacaggggaaactcacttcagtcgtccagcagcactcagaggttcggggcttaagtagtctttcgaggcaatgaactcctttggacccttcttcactcattcttccttctttttgctttatctttgattttgcgaaaaataattttactaatgccctaactgttgggttttatgccctaaaagatcgga

SEQ ID NO: 121239 - DNA, 1736 bp, Cannabis sativa
acaagaagtgtatttcaatcaatctagtgtcttgatatccagatcaagtgtagcatatctgactatacccaaataataggaactgtaaggctatggtaagcaacttctttgtccaccattacttcctttgtgttcataaaaaattatgcaacattatgttttctatatgtattactcctctaggaatactgaattctttactgctcattaagtgcatatgaataaatagaagacacacctctaattctatccaaaaaggaatagagatgaaacattttaagaactttcttcagtttgaataactttctagtactttttgaaacaactaaattatttagcttcactggtggaacaaaattattatagatgggtttttacactcttctagaacaattactccaccccagagtaaccaccatctttgataatgagttgatgtagatataaggattcaaatatacacccctatcatttaacatacaggtcactttcagatattctttcttaattgtttcccaatgttccttgtttgattacatcttagatggctcccactaagtagtaggagtttggttaaattcatacacaagtgtgcatttaacctcttaccattggtacttagggatatcttgttgcaacattctatcttagtctggaaactataagttccttctagactgagttatcaacataacattctagtattaacattaatgtaaaatacttgcttacgattaagtaatcaatagagataccataaaactttttataaggactaggaattgtgcttgagtctttcgaatagaaattgcaaaatttcctatctcatcctcataatactgataagttgctctacaatttcctaacccttaacatagttgctctacaattaacctagaaccgttcaagaacaagcaaaattcacagcaaagtatccaaaaataatgcatgccttgcattacaagtgtataaaagaaaggaatgaaagacttactcattgattcagagctttcttgccctgcttggatgatatcaccaagagttttcctatgagttcttcgaaaaatttgagagaaaacttgtttggaaatatttgttcttattttctaagagttaaaatggctgaaaggatcaccaaaggttcctagtcctatttataagcaatctgaaaaggaaattaatcatttcgaaatttgaatatttggatttctccccaaaagtaaatgttagtactcattgcagggagtacatctgtcaagcgtgctcagacatcgaaccgtggtttgaggtatacctatcaataggcattaaatggtcatatattgaagagactcctagtcagagtcacatcaaatcaacatcatcatcaaagacacgtgtcacccacgtggacaagacttcgagctgagtgaagtccacgtgtgaccaggaaggtcctacgcagacttaaggggcaaatgttgtcctatttttggaccttgacgtggcaatgagaatggatgacatgtgtcccatatttttggtacctgggcaaagggaagtattcctagcaacatactaatggttaatcttaatgttggtaacacttggatttctgaacaggatagtcaagaagacatccgaccaagatacagacatagttgtatcgagcaaggcatataagttggccattctagagatcaatcttgtcacctccaagatgcgaagacaatccctataattgtgggattgagtca

SEQ ID NO: 121240 - DNA, 3922 bp, Cannabis sativa
atgtgagaaggggttggaaaatcattcttgtaacttgaccttgaaagaaatagaaagtttataattttctcaccaatttgagatagaaatttgaattcatatttcatctttctttttgtctttaatctaagtttgaagcatagtttgatttttcagccaacaagttaaatgacgagctcattgtcaacagtttggcaccgtttgtaggaagaacaagcttaagccaagttaaatgcctagatgctctcatcaccttcaaaatgtggagggttgccttgacggtgactagttgatcgcttttgggcgagacctccctccggtcgttagagaagaaggtgctaatactgacaaacctcaagtaggaggagaaagtgtgaacattataagacctaaaatagaaggattgggcgcgagctggtgtggatcttaaacaagtcaaggagataattattgtgaagagatcctagtggaagagcaatactacagaggaactgcctccgtcacaacctaaggtaaaggtatgacattaaggaaggaggtcccatcctcactaaggcaacctccaccacaaaacattatgagatttgggtacctcataacaacattttggaaaggagaagcaagctaactatgtgagccaaaaatctaaaactttcctatttaaagatgacataaatgatttccactagaaaaaccaaaggctggaaactactgtggccggcatgtaaaaagtattaagcaccattctcaaaggaaaaacttaaactttgccctttctgtacaaaggtcacaagcaagagtgtgggatctcaactgtacatggtgatgaggagaactccatgtcatcaacggattgcatcctaaaggatgggagcgtaaatggcctattgcgaaacaagaacccaagatgtcactcaaagcaacatgaatctacccaatggggtaagactgcaaatgtcttatgaaaggacttcagccaagtacaataagcttttgctcagctccctttggataaagctcctagcattgatgggtttaactccaacttttacaaagaaaactggtcggtcgtcaagaaagatgtgattcctgctgtgttgagcttcctcaatggatatggaagcatagcacctctcaacactactcttatcactctacttcccaaaaccaagcagcccacaacggtcaaggacttcagacctataagcctgtgcaacataatctacaaaatcatttccaaagcgattgcgaacaggctaaaattggttcttaacaacttaatctcccctaaccaaagtgcgttcctacctggaagactcatttcggataatatcattattgcccaggaagttgctcactcgatcaaaaccaaatctaggggaaaaaaatgttggatggcggttaagcgggatatggctaaagcttttgatagagttgaatggccatttatctaggccattcttaggaattttgaattcccaccgcggataattcatcttatttcggcttgcatcactacgaccacctttcgattcaatgtcaacggtaaagttgcaggccgtgtcattccctctcggggaattcgtcaaggagatcctctttctccttaccttttccttctctgcgcgaagggcctctcatctctgctcaggcagcaagaaaggaaccaaatgctcactggcttcaaagtggcccgcacggtgtcggtcgtctcccatctcctctttgcggacgatagttttttgttttgtcaggcctccatccattcgtgcaatatcatcaaagaggtcctggctctctacgaaaaagctacggggcaacaagtgaacttccaaaaatcatctctctacttctccccgaatgttgccttgcgtgaccaaacccttatctcagactacttgcttatccctgtgagatcctctttcgaaaaatactcgggcctccctcaaaatattggtcgaacgaaaaagcattccattatcttcatgataaagtttggggccaccttaacaactggaaacataaggtcttttcaaaaggtggtaaagagacgcttcttaagtcggtcatccaagccatccccacctataccatggcttattttcatctcccggccgccacatgccattccctcgagtctgttatggccaacttttggtggggtttcaatgataacaactgtgctaagacccattggcaacgttggcaaaagctctgtaagtctaagaaatacggaggactcaactttcgttccctggtccatatcaatcaagctctgctggctaaacaagagtagcgtatctttaagcatccaaactcaactgttgccaaaatcttagccgccaggtatttcccaaactcttctttcattgactgctctttgggtcactccccctcttttgtttggagaagcattttctggggaaaagagttgctgtaaaaaggtcttatcactaaaataggtaacgggcaaagcactttcatctcccatgattactggatccctaggtatcgccaagtcaccactctcatcccggcgtctgatacggttgcttccttaattaagaatgatatgtcttgggatctccccctaattagaaactattttccaactcacattgttcaggaaattctctccattcccctcccccttcaaccttctagtgatactctgatttgggaacacacaaaattgggggtttactctgttaaatcaggtcaccacattagtctctcttccaccgcccctcttgatatcccttcttcctcgtaaaacactttgttttccgtgcttcaaactctactcttccaactcttagaaatctggcctttaggaaaattatgcaatctcctacctatgatcggtgtggaaacaatgttgagtctgtttctcatgctcttttcttctgcaagagtgttcaaagagtctgtaaaggtacgatattttatgattacgttttttcttcccctcccagtattacttttcacgatattgctcataccatatatgttaatttaacaaaggaggaggtagaatcctttctctgtgttgcttggcttatttggaataataggaacagggctcttagaagacaatctcaggaccagactcatgctatagtggaccttgcaaattgttttttggtggaatacaaatcagtagtttcaactcggaaccctcaagcttgtgcaagcagtaccccctcggccacttcttggacacccccggatcccggtcgcttaaaattgaatgtggacactgtagttccaaatgatccttcaaatgttggatttggaggagtcattcgaaacagtgatggtttggtggtcgcagcagtggcatcatcttacgcaaagggaggagacatctctactttggaagctaaatctcttctcctttctctgcgttggtgtgtcgaagagagctttcccattcattgtgtggaaacggattgtaaagctatctcggatgctctttcgcactctagagaagatctttcgtcttttgacgacataatcaatcaaattagggcaactttgtctctcatccctggagcctatgtcacccatgttaaccagacagcaaatacgttcgcacacaaactggcaacctgggctaaagggttagatgaagtagaaatctgaattggtgatgacccttgtgatttgacgaatttcctttctgcttaataggcaccatctcctaaaaaaaaaaaaagaaagtgatacatctatcaaactatcggtatgcaaatggacctttaaatttagcagtagattagatttttcaagaaaaaaagaattgttattgggaattagatcattgaattaattcctgcaaatgctattgcggttggaaaaaccgctacaaaaaatcttacttttagtcacaacaaaacttgtgattgaaagtgaaaaaatt

SEQ ID NO: 121241 - DNA, 2169 bp, Cannabis sativa
  modified_base (2141)..(2143): a, c, t, g, unknown or other
tattttgtgtatttttacaaatgttactattagtatattctagtgatatttttaaaatgatactaaagataaatatttacaaattagtgatattttttttatctaatgccattaaatatatttatagtcacatttttgttaaaagttataaattaaaatgttatttattctcaccaaagtgacatttttggccaaatgttattaaattattattattgcaacatttattataaatgttactacttgaaatgttactaaaatctagttattttcacattttttttaaaatgctacgaaaatttatttttggtgacatttgaaaaatgttatataattctaagtttagatattattatacatttagttacatttttttgctaaatgtcattaaattaatatttttataacatttttttaccaaatgtcacaaaatcaaatgtcacctatttgtaattttggtgtagtgattgaatgggttggtagcaaccagtagtagttagttaggtaatgttagagcaagtccaatataacactaatgttgaatttggtgcccttctatactccaatgtatcactataatgttcactaatttgttgtgattgctatagtggacaacatatagtaatatgcagttttttttttagtagggaaatgtgagatttgaatttgattttttttttaagaagaaatgtaaaattattagactatgtttatgactgcatagcaatatgcagtccactttagcacaaacgacatttttttttctgttttttttttctttattattttattctatttaataatatgttatttatattattattaatgttacacagtttaaaaattaatttattttgtaaatgttaaactgataaaatatatttttttaattataattaaaaaaaaaatcataacaaactttttgtacaatattccttaatattacacaatagaaatattacaaattaaaaaacgcattaaaaagtttaaattaattattagttttaattatattattaaataaatataataatgataataattttagtaaattaatataataataaaaaatattttattttatttaaataaaaaatattattttatagtgtaatttttattattataattagaatagaaaaagtttttaacactgaatttagtattagtggaacactaaattagtgtaaatgttggagatgcttttataatggttagagcaactgcaaggaggtaataaaatttgaatttagtgtatataattcatccaatatagcaacaaattttacagcatatatactatgtggctatagtgcacgtcatatatgttgtggcattgttgttacggtaattttttataattattattatttaatttatatttgtagatattgatattattatttgtatttataagcttaaaatattatttttacgatgcactctctttaaatggatccatcaatgcatcttatttgttgcatctgagaatatttttttgttggattaaaatctctaatgtgggctcatatgtatttatgtgtattgctatttgaagtttgactcaaataaagtgatcattttagtaattgtgggttatgaggtattaaagtgtcatgggctaaatgtgtagataccctaagtgatatttctaatttattgagaggctaaattaaagatacttaaaaattaataacctagctataaggttataaattggtagtggtccccaagaaacaagagtcaatttgtattctcatcttctttcatcaagagagaaaattagaaaaccagtcttgttttcttggaagatcattacccaaaatcacaagatggattcagatcatcactatctaatgattaaggtacgcttccgctatcttccgctatttgagttcttctctttgaatcaacaaaagtattatttagatctttagttatacacttataattatatgcaatatgtttatctatagaattgaatcttgttattgcatattttatgagtaataaagaattctaacatttttagcttgatttttgtatggtcgtctacgttatagatatttaagacatacaaaaaaattttgagaaattcaaaaaaatttaacacgccaaaaaaatgttgggttttatgcccnnnataaaactctttacaatctgattagt

SEQ ID NO: 121242 - DNA, 693 bp, Cannabis sativa
  modified_base (667)..(668): a, c, t, g, unknown or other
tgtacagagggctctgggtgatttagaagatgtgcaacaacagttacagcaggatcctctcaatgaggagaagattgatagagaattagcagccagaacaaagctaattcaggttcagaaggactactcaacattcttacagcagaaggccaaggtcacttggatacaaaatggttatctaaacactacaatttttcatgcaagcatcaaacaaagagtaagacacaaccagattttctctatagaaaagcaagatgacaccagaatcattgatcctaatcagatctcatcgacatttgttgattactacaaagagctgctaggaacaagattgactaatagaagaccggtgataaagaagatcgtgagcagagggccggttctatctacacaacaagttgaggctttaatgatgaaatttactaaagaagaagtaagaactgctctctttgatattcctggaaacaaggctccaggtttggatgggtattcgagttttttcttccaagattgctgggagatagttggagatgacatctttgaggcagttacttcttttctggaatcaggtaaccttcttaaggagatcaatgctacaattttgacattaatacctaaaatgaagtgccctaacacagttaaagattttaggccaatagcttgttgnnatgttatttataagattgcaactaa

SEQ ID NO: 121243 - DNA, 1644 bp, Cannabis sativa
tctaaatttgaaacaccatcactacaaatatatacaaagtaagaagagaaacagaacttggggaccttacccgtttatgaagttcatcatgttattatttatagtaaacttaaaaactaaggaaacaaagctagcacccaaacatcttttacattacatttacataccatatatattcaaagagaagctcactaaaataaaaaagcattgagcatggttctagaaggtgttgaattagaaactattacagtaaaagtaaaattctcaataatctagaatgcttacagcatctaccatggatgcccgccacccttgcatagaagacaccccatatcaaagtctttcattctctccataacttataagaacactatcaaagcaaacaaatcaaatcataatataaaaacaaccaatcgtaataaacaaccaacataacatattcaaattttcacaacttatcaccaaatcttttttttagatcccagttataaaaaaccaaactacatagattaccaaaaacttcaagtttaattgccaataaaattcaaaagcaaataaatttcagtaaaataatttttttgaaaaagaaaaaaaacaacaggagattcaaaaagaaagctttttcatctaaatttaccagtaaaccaaaaaaaaatgaattttaaaaaaaataaggcatgagttggattagttagggttcttgataagactcactgagatgagtttagcagcaatccgcacaatctggttagagagaaacagatataataataaatagggaatataggtaccttatattttattaaatatttgtttggtaccttatattatcaataatacttaatgggtaccttatattatgaaaattagttaaaaatggtaccttttatttcaatttgatcaatagttatttttgtatgaccatattacttttttttatgagttaattttcttattatttgtaatgatttttttagaataataaaattagtactttaataataaacttaaccacttccttaatattatttttccatttacatttatattttcaatttatggtattggcattttgctattaggatttacctcatcttcattcttttgctcttttataacatatgtgacgagcctcatcactatcatcgtaatccccaaataatgtctctatattatattaggctcatcaaaacacttctcaatgttagaatcgtcttcatcatcggtcgaactatcactcctccctcttctccattcccaatcactatcagagtgggactcaacaattgatcatttagtgtgggtacatctagtgtgacttgtgtttcatctagtatgcttgcatcttcaaattctgcaagtgtatctttattgatggtattaggaatatcaaatgaaaatggtatagaactttgaccaactttcttatgcacacgttatttcatgcgcccactattagatcatttaagatcaatcatatttatctgttttactgcataatttaatattgtttctattatatctacttttttagtaagtagcttaaaaaataataattaaagaaagaaaaaaaatttcatggcttgttaattttcatttgtacacacgttaattttgaggtttcaatggttacatttttattgt

SEQ ID NO: 121244 - DNA, 1556 bp, Cannabis sativa
gtaaaataaattccaacagagagatgttcagacttgaagattaatcatctggcatttgcagatgatgtaatgctattctgcaatggagatttctatgcttcagggattgaagttgttctcaatttcgtctggtttgcaacctaacccccaaaaatcagtaatatattgcaacaacatgccacaggaggaggttaatagagtccttttagcctctggttttactctaaaagacgtgccttttacttacttaagtgtacccatttgtgctaaaagaatttctgggaatgaatgcattgcttggctgaaaagatgactgcacgaataagaacctggagctccaagaatctttcttttgcagctcgagttgtctcaatcaattcagtgctcatggctattcatgcatattggtgccaagtgctcatttttcctaacaaagtgattaggcaactggaatcaatatgcaaagcttttctatggaaaggccaaccttttgcaacaggaccaggtctaatagtttgggaatctctatcccaatctaaagctgctggtggtcttggctttaggaaaattcaagaatggaaccaagctgccatggggaagtacatctaggcaatagctcaaaagcaggacagtctttggttgaaatggattaacagtgtctatctcaaggatcatgaatggtggagttacaaggttcctactcagagtagttggtactggaggagccttgtgaacttaaaggaccatttcagggatcttgcaggccttcagacttgtacacaacaacaacaacaatatcaggtaaaaactaggtattctctactctgtcaagtccagatcaaagtttattggtctcagcaagtgtgggggcgattaaataccccaaaacactgttttatctcttggttagcaatacagaaaaaacttagaaccaaggatagatttagaagaatgggaatgaatattgatgagccatgtgaattatgctcagcacaggatgagaatgcagagcatttatttttcaattgtagtatctctactgcctgcttacaggggatcaagaactggctttcctggcatgttgcagctgatactatgcttactttaaccaggtggattgggagatcaaagatcagcaagtttaggaagaatgtcctagctgctgctcttgtttgtctgatatacactttgtggaaagctcgcaatctcagcctgtggggaaagaccaagccgactgtagaaaggctaattgaaggaaaaaaaaaagatgtactccatagagttgctgtagtatggccaaaaaatgtatctttagaggataccaactggtttcaaaagctgtaaatggtggcaaaggaacatagtatgtacaattttatatagcatataaaaaattataaatgtatagcagttttgcatcttaggccctttggggtgctatttgtttgtacaaagatagtttttgatcaatactgttgacttcgcttttagccaatgacaatgagtttattttataagcgataaacgatatgtagtaacagatatatgataaagca

SEQ ID NO: 121245 - DNA, 2778 bp, Cannabis sativa
atgaattgaaattcatgtgggatataatttgaaacaatacatctctccgatcaacaacaacatcaaaacattgtttctcgatgtcatcaaatcttctctaacaggttataattggttactaatcaataaaaaaaatgtgggataaaatttgaagcaatacatggtactcaaaaaattccaattcaaattgcctagaaataccataaattaggatttattctaattccaattcgaatacaccaaaatataggagtatcccaaacttattcccacacagtacatgaaaaaaaaaaaaaatctcagaaccataaattaaaatggcataaatgaaatgaatgaatcaataaacaatgaatttggtacctcaaagaaaccaatacaaaaaaagcgtgtctattttctgttttttttggtaccaataaatcttacctgtccataaacccttcattatatacatacacaacactagtatggatgcgtgcaacccaggcgtgaaaaatttatattaatttaaaagagctgttataatattttaaatcaaacaataatatatacttaaaacttaaggattatttacaaatacataaaaataacaaaaaaaaatttataaaaatacggttgtatagaatttttaatattttaacgatttttatgatttttttttacagaaaatatgatatttttatgttgtactcttattaattgattgttaatttttattatttgtaagttatcttttgttgttgttttaatgttatttttctgttacttttatatagtatttttgttgtttctataaaaaattgtaaaaatatatataaaaaaacctttaaccgtaaattataatttttttacaataaatggtaattttccctaaaacatacctaaataatattacattctacaaaaatttgacacaccaattaatcataacaatttttatgtttttttggaaatttacacattacacttaaaatggatttattttcttacggattttttttatttttacatttttacgattttcttattataattttttacttgtttttttacaaaaaatgttacttttatttgttttccggcaacaacaactcactaggaattaaaattagatgtaattggagataattatacaatttagtgtatttgtctggccacgtaattatacaataattgtataacgggatataactgagaggtctcaattactctctcctattctcatacctccatgagaattgagtataattatactatgtaattacatactaaaaacaactttaattatttaattaatataataattatttaatatgatttagtctttttttattttcttgtctcctatacataatttaattttttattctgatgctattttataatatatttttttagtgtgcttttttttttgtattatttgaaaataataataaaaaaacaaaaaactaatatagaaatatatgatatatgattttcttagtatcatttttgagttgtcttttgaattagatatctaatagcttattcatgatttggcataaattttaattaataaaatacttaaatttgtccttttattaatttttaattgagaatgacaaatactcaaatttttaaattggaaaaccacacaataaatagaatagctcaagacatatggagcaagggcaattagatagtcctaatagattataattattttaaatatttgttacaaaattattatgaaatttaagtttatttaggaagaaatttttatttattttaaatattattaaaagataaaatttattttaaatacttgttatgtaataattattatataatataatattaatttattgtataagtaccaactgtcttgacaaacatgacaatataaattcacatgtaatttctacttgactaaagctgtacattcgagcggcccaactcgtttttataaaagcccattttttatgtaggctcggcccgacccatattataaaacgtgtcgggctgagcttggcccatatttttgaagcaagcccattctggcccataaacacatattacttatattgggtcggacccgtattgggccagtctatttttttatgaaatgattgacccatatttattaaatggcccctaaactaaataagcttatggaaaattgcttttttttttttttgtacttttcaaattaatttttaattttaaagtacaaataaattattttaattaaaatgagcttcaaaatcacaaaaaaagcataattacaattacatatttaataacgaaaattatatcaccttcataatagtccattaataaattttcacataaagttgtcaataatatttaacataatctcttttagcaaaaaaagaaatgttgaacatataaaaatatatcaactattatcactgattcataaaaatgtgccaacataatttagaactttcgcctcgcaaaggatatattaaaataatttaacattttagaaaatacatataatattgaaatatataaataaagtatttttatatgaaagagtagatgagttattaaattaaaaaattattttatgaattttaattattttttattttgtgcttacgtgttgtgctttcgtgttaagaaattcgtattttcttgccgcgttttcgtgcttgttgtatcgtgttgtgttcagggacggagggactttagcccatgtgtgggctaaagccctcactcaaatatatacatcaaattttttatatgtagatatatacatatattaattca

SEQ ID NO: 121246 - DNA, 769 bp, Cannabis sativa
aaaattaaagttaaatatttatttacacgaaagttaaacttaaatatttaagctgtaaattattattatttttaatttattattaaaaaaaacacctattataacaaatagtcacgtcttgttagacaacaacaacataaaagactctagaacagtgtcacgcagttcaaggccgcgttttatcaaaatctcaaacatataaaaacccaaaatttgccattcataaatttgcgcttccgtctttcactcctctttctctctcttcaaccaaccttagttttactgctccattaaatttttagacagaatcaaagttgtaacgataatcttttcatggcgtttcgcactgcgatctccaacaacgtgatctctcccgtccggacctccgtcgccggagcgagatccatctcatcgtggtggcaacacgtcgatccggcacccaaggatccgattctcggtgtcaccgaagcttttcttgcggatcccagtcctgataaagtcaatgttggagttgtaagtattactgagcattttttgggccttagactgccttctggcttcgtcactctgctttgtttttggtttgatctttatctctgtttttccacggaatatgaaaacgaagagtaggaatttatttcgaagattaagaaaatggtcattgaatatgaaaaaagtagaggaaattcaaatgattttatttattattcactaattttgtttttatggtcgtagatgaaaatttacgattgttaatttgtcgatgttt

SEQ ID NO: 121247 - DNA, 2687 bp, Cannabis sativa
  modified_base (33)..(35): a, c, t, g, unknown or other
taccattttggaaaatacagggtccattttgtnnnttaacaaaacagaaagtccaattggtaacttttacaaaacgcaaggtccaaatatttacccttatttctattgtaagtcaactaattgaagcaatgaaaatgttgaccaaaaagaattctattactctttttagtgcttacctttttcttttatgacaatgtaaatgatttgatatgacagagaacggttcttcaaaagatgttagctctaacaaagatgaagaaaagagaggaatggttttgcctttccaaccgctttcgatcgcctttaaccatatcaactactttgttgacatgcctactgtgagcaaattcaacacattgttcacagtcctgcataagtttcctttgaaatgaagattgattaacatattttgtgtatcttattaggaaatgaagagtaaaaaatatgaaggagatcgtcttcagttgttacgcgatgttagtggcgcttttagaccggggatactaacagcaatagttggtgttagtggtgctggaaagaccactcttatggatgtcttagcaggaagaaaaacaggaggatacatagaaggaaccatcagcatttctggttatccaaagaaccaatcgacatttgctcgaattagtggttattgtgaacaaaatgacattcattcaccaaatgtcacagtctatgaatctctactctattcagcatggcttcgcctttcttcgaatgtcaatacagaatcaagaaaggttaaaggcttatagtcatttgctatgctacttcacagttcaatatctttgaatcatgctaagtatgataaaaattacatgtaaattgttcatatacagatgtttgttgatgaaattatggaattggtagagctaaatccaataagagatgctttagttggccttccaaacattaatggtctttcaactgaacaaaggaaaaggctaacaatagctgtggaattggttgctaacccatccatcatcttcatggatgaaccaacatctggtcttgatgctagagcagctgccattgtcatgcgaacggttagaaacaccgtcgacacaggtagaactgttgtttgtacaattcatcagccaagtatagacatttttgaagcttttgatgaggtataagaaaatggttccattctttgttttagtccaatgttgtgttttcctttttatatttaccacttgtctgtgttgttgttgcagttactactgatgaaattaggaggacatgtgatttatgctggaccacttggtcgccattctcataagcttattgaattctttgaagtgagtattatattaatgttgaagaaaatgatctttttcttatattgaaaaatagactaattaataactaatatttataataggctattccgaaaattcccaagattaaggatggttataatcctgctacatggatgcttgagatcactgatccatattttgaggctcaaattaatgttgattttgctgaaatctatgccaaatcctcactttaccagtaagtttgacttagttttaaagtacctccaaaaatcacttaagctaattagtactttttgttaaaagaaacttaaagtcactacaattagtgagacatttttctcttcacttattaacttccattctcaagccacatcaatcatattgtgaatcaaaaaagttgtcaagatacttttctgtttcccttcttaaggtttctttttttcatctcaagattgttgtgttttctcttgacttactttaggagaaaccaagagctaatcaacgagcttagtactccaacaccgggctcggacgaccttcacttccctaccaaatactcacaaccatttcttgttcaatgcaaagcttgtttttggaaacaacactggtcttattggagaaaccctgaatacaatgccatccggttctttagtaccacaatcattggtgctatatttggtattgtcttttggaacaagggacaacaaatgtaagttaatctttcttttgtttattatgttagagaacttcaaaattattaaacaaaaacaaatctcataacaggaccaaacaacaagatgtgatgaacattttaggaggcatgtttcttgttgtactttttcttggaggtaacaatgctaatgcagtgcagcctatagtttccattgaaagaacagtttcctaccgcgaaagagctgcaggaatgtattcagctgtgccttatgcatttgctcaggtaaattcaaagattttccttagttctaaattagtatcatattcattgttaaaatgtggaagtgtatggttaaggtagtagaataggtgagtgtatggtaaagtgcatgagatttcatctcaaaattaattggcaatgagacgagtagcccatacatcttatttagtttcaacacattatcaatgtgagactctttaatattcccctcaagactattttttttttttttttgctcaccattcttgcactactcgattacaagtggctatggctcactatcccgaatcacaagcggctcttttagctatctttttagaccagttttttggcttcggatcggttactcgttagagtttaatttggctctaataccatgttaaaatgtgaaagtgtatggttaaggtagtagaataggtgagtgtatggtgagg

SEQ ID NO: 121248 - DNA, 3166 bp, Cannabis sativa
acgtgtcacgtcatttcgtgtgtgatacattattaacgttatttttgtaaaaacttacctaatatagtatattcctaaaaaaatcccaaaaatattaactatttatgaatgagtgtataaaaactgcacttgtcacttgtcaatgacacaaaaatgcatactattttttcttttattatttttttaaaaaaatgacatctcaaatttctcataataattcttacaatatttgagctctatttctctatattataataggtttatctctatatttgattttgttttaaaagaaaaaagaagaagaggaagaagaagaagaagatgatgataaggagttaatagtaaagtgaatttcgaccacaagcactacatttgaaaagaaaaaagaaattgtgccaaacaagtatttattatggaatattggtatggaccatatagcaacaatgctccgttattggccagagatttgggttctaatcaagtgtaatatttgatttgaagcgtccaaatcgaagggaccaaatgaaagggagagccttacgtgcttacaattatggtttaacgccaaattttatatttttttcatacatatatatattgcacttattaagtgatataatttaaaatataatattttgaaattgaaaaacataatttgttatttttaaaatatagaaaaagatggtcattttgtgaaaaatattaaaaatggtggaacaaaaaatttacatgtatttttataagaaaataaaagaaataagtaaccgtttcttaatttaataaattatgtttatgactggtgatgtaagtttctttaaaacactatttagattctatttttaaccgaaagaaaaaatttaaatcctccatctaatttatataaaaaaaaatatatattatttatgaaaacaaagtagtaaattaataacttttgtgatgcacgttttgaaatgatatttatcatttgtaataatagaaaaaatatatttatacttagttaattataatttttagaatatagtcttagtgatgaatttatatattttataattaatacaaatacaaatgagttcaatattcattatgaatcaagtaatctatttttaccctataaaaatatattattcttttactaatttataaatttaaatgatataaaaatatttgttaaagttttaatgtagttctataattatgtatttttttcttttaaattttgatattttttgtttagtttttaatttaaaatattatttttatgttatttaaattttaaatttaaaaaattaaactaaattaattattaatgtattatgttatttaaaagttgttttttttttaaaaaaaagtaactaaatatcatagcttttcttatggactcattattgaaagggatatatattgatgtttgatatttttatttatttatcttttatctcaaaaaaaaaaatgtgaattcatctttatataaaataataaataataaaatttctcttaaatattatattgcatcctatattaattctttaggaaatgtgtttagtgcatattttttcctttattataaaagtattatttttatgatgctataaaagtcccacatagcttaaaaatgttattagtgttagacttgtaacctataaatatataacccattctttttttgtttcactaaatgagtgattaattaattcaatgttatcccattaagtatatctttttatgatgtgataactctttgatatttggttaaataaataaaaaacaaataattttttttttaatattttagatatttttagtcaccttcaattatttgtattttttatatttccatataatatggatatttattatagagtttttatttttatttttttaaaaaaaagtcccacattgcttaaaaatgtgattagtgttagatttgtaacttataaatatatattactcattcttctttccattgaatcagtgagtgattaactaaatcttaactaattaaatatttggtaaaatgaacaattaaaaaaacaactaaaatttaaatttaaaatatcattataatttagccattctttggactccatttaaaaaaaaatcgtgtaagacaaaaagtaagagaatggtcacaacttagtaacctgaatagttctggagaatatttagtatcgataatagttcaataatttttttggtaataatttaggaaaaataaacctatttattgttatcataatttaagttgtacaaccatgaatttaaacataatattaaaatcattttaaatatattgatattgattgttttattttattaattaacaatgagaaaatagataagagaatatcaattaaaattaacataggatcccacataaattattttaaagttcatatttttttttttaatttataatgtaaactacaaaaagtattttttaagtgaaaaaatgtcaatttttatttctaataattttaactatttaaataatttaaactaaacttacaaaatataaaaaaaaaaaataagaaaaataataaaagaaaaataataattaaaaaatcaatttattgaaataggtatgttttgtattctaaaattgatataataaaaaagtaacaaaaaaattaaaaaatataaaaaaaaatatatttatatacatatatatgataagaaatgctcaaatatagtcatataagtgtgtcacctcttacaaatatattttttaacttttgaccaaattaaatttaagagaaaatattttagttgtaaaaaaatatttttaactcgaacaaacaacaatataaaaatctagaatattaaaataaattcttaaactaaattaatttcataaatatatataaaattaaaaattatcataaaaaaaattaattattaaaagataaataactacttatagaaatctataagtataaaaaaaatatttcttagataaaaaagtatagaaaaataaaagtactatttataatctacataaataacacctaaaaaatttctaaacaatgtgggacttttagctttgtagtttatttttcaaataaaatacgagaatgtgccaaaaaataggaaaaataagaagaaaaaaatagtaaaatgccacctaaactcttcttgtacattcctttacatatatatatatatttat

SEQ ID NO: 121249 - DNA, 720 bp, Cannabis sativa
taagttcgctactgatctaagtgagaagtgagaaagtaaagtgagagaaagtgggtaggggttgagagcttaagtttcatgttgggaccgaggtccgacatcaggttcaaaggggattgtgccagggttcgaggtttggtatggtccggccaggagtcaagaacaaaaatattgataaaaagaataaaaatattataatttcaatatattttatttattttataaaaaaaacatataatattatatagaaaagttaaaaaaaaatagtagtaaaatatatttagctcaataaatagttatctcaacatttagccaagcactattcattaagttaaaaactatgtaaagtagttaatatttaccttacttgttaaaaacataattttgtaagttttctctatataacttaaaattgagctatttcagctcatctattaagaatgctttaatatagtctaaatttgatccatactaagaggaaaattatagtaaatgaccctaaataataagattatgttagtaaatgttcttattttaaaatttgtagtaaaatgacccttttaggttatttattatttatgttgtcttttccgacataaaaaaaaaatcaaaaaaaaaaaaatttcatatttttttttagaattagaaacaaattacttcaagattatgttatatatacattagttttgttaaaatattttttattaaaatatattaatt

SEQ ID NO: 121250 - DNA, 3751 bp, Cannabis sativa
acctgtagaaacaacaacaagaacggcaagatacaacactaacacccacgataaaactgaactaactaacaatatcgatttaatggataatctgtttacagaatgaaaccgattatttatacccaacagaacagtcaacctggcactgactaactccgaacgataagtcatagcagactcacaccaacttaacagtacgcaagtgtgcagatataacaaactaaaaatccagacatgactagacattttattaaaataatatgtcacaaaataacgacacttacagcttcagccaaatccagagcgcctataccagcaaaaatgtttgacttagccatctctaattctccttgagagtcacgagcgactatgccaaaacaaaactcagctcgatcatggaaaatgggggcatcaacagtttaccttgattgtattctcctatggcttaaaccaagattcaatttcatcaaacagcttgaaaaactgaaaaaagaagcctctgaacctttattttggaccaacttccattgcacaagacaaatcacatatgatataagaataccatctactgtagcatacttttgattccaaaccaactcgttttgagccttccataactcccagcacaacataataacctccgcatacttgtccttactgcacctttgcaaaatttgatcaaaccaactgcaaaaatcagtagcaacaatcctaaccccaatcaaaagcctctgccaacattgagcagggaatgaacaggaaataaatgcatggaaaatagttttctcacctctttggaaaatcgaacacatgatttgaactaggactctcttaccacttaattgagtcaaggcgtaaaaataatttgaagcagtccgccataccaaattgagagcttttagtggtaccttcaaattccagagcttgcgccagaacccagaagaattagtagcaatccaatttcctttctgagcttgtatcaacttgtatgcactacgcacagagtagaaaccatgatgctccttagacaaaaaaaaatgatcatcagctacattcagactcaatggaactgccaaaaatatctcgttgatcgcgttcgttaaaaagatctttaataatattagtacacatcaacgagctcaccttatggcccaccaaatattgggcatctgaagtaataaaaggatacacatcatccaatggttgatgcaaaatatcaaccttcaaaccaaaatatattacccaacgaacctagacttaagaaactcatgcgatttgaatacgctcttccacaaaaaaacttgaattatttctaaggggtgttgaaattaagaaaattaacccttggaaaataacgagcttcatataacctactcaccaaagagtttgattttgtcagtaaacgctacccttgctttcccaacattgccaaattaaagtcacgaagattacaaaagtccattccatccttagtttatatctactcattctttcgcaactcatccaataaatacttccaaaaaatttgaatgccaccaaaatatacgcataattctctctaaatttgtagacatattaattgggtgcaagataatacttatggaacaaaagaagacatttaactaacgagcaattctacacattttgacaaattatcataaattagtatcttgaatgatgtgacaatgcttacattcaaaatattcacccaaaaagttgaaacataaattaataaaataataaattgcaacatgacatgtcattcatgatctaatatcatgataaattttcacgatatagatcattttctttaacaaatacaattctgtaggggatttttatataaaaataaaattaaaatttacttttacatggtataaaaaaatgtaaaaggatataagactaaaaactaaataaaatttaaaatttgagaaataaaaaaaaaacatataaataaagttgataaaatttttaagaacaaatatcgcaggataacttgttggagcaaacattgttgtcgaaaaagtcattggagcaggcaaagtttctggagtagacatctttgccagcaaaaagtcactagagtagcagtcgtcgccaaaaggttaccgaaattgtcatcgttgccgaaaaagtcatcgaagttgtcatcgtcgttgaaaaagtcatcaaaaaatttgtcgtcaccggagttagatgtctgagttgaacactagaatatatgataaagaaactgattacatttatcaacaagttgaaattatgagacaaactttacaaaaaaaaaattaagacaaagaagttggttccgtaaaacaaccaaaataaaaattagcaccccaaaactagttacatgaaataaataaatcgaaaataggttccttgaattaattaaatcaaaaattagtttctgaaataaataaattaatacccagttcttgatatgactaaatcaaaaatcaactgaaaaacaacacacataaaatacagcacggtctttgcaacttactagcaaacccatgtgttgacgcggtttttcgtcaactgatctaaggagattgtaaaaataaattaaagaggattgcaatgaattaatttgaccaaatcaaacggcaataaacaaaatgaacactatagatttatactaatataattcaccccccatgttgtaatggtaatggggctatgtctacttttgtttttattgattagatctgacacacgagagttatgttctcaagagtgtgaataaaaatacaacgaaggatttctaggtaaaatcttaattgagacctatgaacacaagactcatgggagaccaatattcataaatctcatcaaagttggtggttgtaaggttcttgggaataataatccaataaggtaggaaaaggcatgtatattaatgatgtttaaggtctgagtgtcgaaaaagtatggtcgactcaaggaaaaagatgaagcaagggatatggtgttattggccgtcgtcaagtaagtccaaaagagaaggacccttcacttcagcctcttactctccatatataggttgtagggtttgttagtgatcccccacatgtcggagtgtctcactaaaaaatcttgtatatcatctttaataatgaataaaaaattacaagagaataaatatctacaaaaattcctttgtttttaggccaaaatcccacaaacattgagaaaatgattattttccgctaaggatgcaccaatttaaaattgagtgacaaaggatgccacctctcagcttggaattataacattggtgatgagtgctaaaaatatgtgttttggattgccactgttttcatataataccacatgggttgtggtagtatcttccaacacctttcacttagttacactactcaattctcgagtaaagtgtactggtctgtcttgtgagccaattattgttccaataaatttagaattggggtatgactatgagacacacttagatctatcttgaaattatttttccaatgcaagttgaaccaagtaattggataaaaattgagagaattctgtccgttttactaagggtagtttatgttgttttgtcccagttgcgagcactgacatggccaaatggtcagtgcttggtcatgcatgttctcggacccctcggatatatttttacttattattttgatggtgagtcatattttgggggttttgagaccccaaaacctcatttcgatgtctaaaaccctaacaagagaccactgcc

SEQ ID NO: 121251 - DNA, 1025 bp, Cannabis sativa
  modified_base (45)..(63): a, c, t, g, unknown or other
tgttattttttggaaaaccataaaaatgtaaaaaaacattctttnnnnnnnnnnnnnnnnnnnttttacaaaaaatggtgtcttatgtaattattctaagttttatttatactataaaaaatgtcactttcgtcaacgcagtttgttattgtactattagaagtaacttttaaagttttactagcgcaaatttacagtgataaaattctaacttttaccagtgcatttatgtactggaaaagtcatttttgttagtacttttcattttgcgccagcaaaagttctaatactagtgttgatttgccaactccttttgccattacatcaaaagtagatttcattttagcagcacaatactaagcttttactaacacaaaaatatgctgacaaaaataacattttttgtagtgttaaatatttactaaatgaattatattttaattttatatggcttattaatttatatatctattaaaaatgctctaagctttttttatttagtttttttttcttttacttttgttttattgataaaatttataattaattacattcattagtatttcatttttttcatcaatttatttagtttatttttcttttcttttaccgtgcaatatacataaatatttttaagatatgttttatttactttttttttgtttagatatttgtagaaagccagtttatatatattgtttgtattttattttatttgtattaattataattacatattaaaatatatagttatatttttattatccttcaccttattttttttaatatacgtattttacaaaagttaccaatttatctattttttaaatgataaaatagactttgtattttttaaaatatttgcgacaagtttttttaatataaccaacttgaagataagtcctaacacgaacagataaagaaaatggaacaagttttgtcataacacctctagatggaattattattaaattttattttaacaaaaaaacagttcaagatcttacttgtactattttaaaaaa

SEQ ID NO: 121252 - DNA, 1277 bp, Cannabis sativa
tgcttcaagggcatttccttcaaacttagaaaactacccacaaggtcagagcttctctctctaaatgcatgataactggagctgatttggaaagacagttttggggagaagctttcaagacaacatgctacttagtgatcacagatgtccctctgtggcaattgatttcaagatacctcatgaaaagtgtactagtagggttcctaactgtgatcacctgaggtgtttgggtgctctgcccatgctcacaccagacaagaaaagttacaattaagggcaataaaatgcctatttcttggctaccctgatggggtaaaaagttacaaactcgtgtctttaaccaggtttcaaaatatgcatcatcagcagggatgtcatcttcaatgagaaggaaattcccttgaagtaggaaaagcaaagtgaactacaaggtacaacaacaacaaaagcactcaggttcaacttaccaatgatatagctgcatcagaagagaggttcgatgaatctacatctaatgaggcttcaacatctcaaggtggacttgggagttactaacttactagatatagagaaagaagagatatacacccaccagaaaaattaggatttactgaacttgtagacttcacatggtttacattgtctgttgcagatgtgattgacactatagagcctacatcctataaggaggccataaatagcagagatggtacaaagtggcttctagccatttaggaggaaatatcatcactgattaagaacaaaacttagaccttagtcaagagaccacttggatagaagtttgtagattgcaagtggataatgaaagtgaaggaaggtattctagggggttgaggataaaagattcaaggcaagacttgatgttaatgggtttactcaaagtgtgactatgaaattcaacatatagatgttagaacagctttcctacatggcaaccatgaagagaaaatctatatgaggcaacctgaggtttttgaaagtggtgatctatatgaagtttgcctattgcaaaagtctctctatggccttaaacaagcacctagaaaatggaacatcagatttaatgaattcatgacaagaattagattcaagtagctttgatccttgtgtctaatcaaataataagttgtttcttctattgtatgtagatgacatatggttgggaaaagcataactgaaatagaggttataaagggtctcctaagcaatgaattagagatgaatgatttgggtgatgcgaagaagatacttggtat

SEQ ID NO: 121253 - DNA, 992 bp, Cannabis sativa
ttttcacctgcactccatttagcactttatgatgatgcgcaaaaatgatcattttatgagaactagagttcgagtccaagtttgttgcaccatctgactccgcaatgagtggatgaatggaaagccattcacaaaacccagacagctttgcaataccaagttcttgataagaaagcttccccgaactatggcaatccccaccttctgcaagataacagtggtgtatgaattgcattgcacaattgaccaaaaaaaaaggggggggcatatacaaaatgccacacaatcttccaaaaagtcaaatcttgcgttgctatagcaaaagaaaaaagaaggtttttggagaatattggcttcagaaaaaattacacaagagatattattaagtaataatattttgactgtgtaaatatctacaagttaccatcggaatcatctatatccttcaaagatacgtcttggggattgcttctttcgtcaaccaccttctgctcaaccgcagcctttgctgcaactatgtcggatctcttcaacagaactcttataatttgcctgcgcttgggtggtaactgaagcatgacatgctccttcaaacgtctaatctagagtaaatatttgagcttcaataaattagaccactctcaacataacttaccagcattactgagacaaactgatattccccacatttcatattgtatatggattatgtatatgtcatgcagaataaatgacttgcaatattgcagcaacattacagaatgacattaacaaaaaagtagccaaataaagctaccatcaaacatcctgaaaatttagaatgaagtaatgaaccactaaggtggcgtttggttggagggaatgaaatggaatagaatggaaataaagcaacttttactctatttctttgtttggttttattttaacgtattggaatgtcattcttattctggctatgttttcattccttccaaccaaacgctacctaatag

SEQ ID NO: 121254 - DNA, 598 bp, Cannabis sativa
aaaagagaaatgctaaagggcacctctaccttcatatatgtcaatatcgctatttggtgcaactaagtatcgggtcccatatataatttaatataataacttttagagaggattgctagccaatcacaacgcgacatgtcgagaaggtgttaggcactactggtgtctaatagcaatgctcatagaaaaaatgtccatttttttttagagtattaactcccaattaagaaccgttcaagtagagacaagatacatatattgaatgtaatatataaatatttagagcatgtaaacatatactaattagggtttcacaaaacactagttgtattaattattatttttagattgtaataagggtatttagtacattttgcaaagttcagaaatttggataatataattgtcacctgtaactatatatttatagaatgtaaaattaatataaaatataaatgacatatatatgtaggaagtaactataaatttatttatttatttattttttttttttgttggggtaaccgataaaggttaaaataacaagggtaacaaaagttacacaaaaagtggagaggtttctttcatccaagaaagt

SEQ ID NO: 121255 - DNA, 2117 bp, Cannabis sativa
  modified_base (885)..(889): a, c, t, g, unknown or other
attagtagactacactgattcacatatattcatcttcctccaacgaaattaagttagtgtgtgtttattatttgaaggtgccaaaattttcattgataataccattaacattataaaacatgtcatgtaatagatatgtcatcaaatactcaatcttcaatttatattctcccttcttagtaaggagccaaatcttctgtcccaattttttttgtctctctatcccaatttaattaaaattatccacctcaatcaaatgttatccccttatttaatagagttaatatatttaaggactattttattttaccattaatttcttcccatggaacttttttttttgttaaatattcttctcatacattttttttttttaaaaaaagataatcaaaacacttgaataaaataagatttaatgaattcagttaaaaaaaagaagaagaagaataaaataagattttagttaaaaaaataatataattctataaaaaaaaaaaaatagacctttcagatttttatttttgtgaagaatcttctttttttttttccttaaaaaaaattagactagtgttatctttaatattttttaaatattaaatgtattggtattaaaacttatgttaatattaataatatattagggtaaaatagggtaaataccattttgaaccctgtgttttgcaaaagttactaattagatcttgtgttttgttaaatgacaaaatggacgctgtattttttaaaattgtacaaataggacattgaactaattttttatcaaaataaaacttaataataataatctgatctagagatgttacgacaaaactggttacattttctacatctatgcgtattaggaattgtcttaaagttggttatatnnnnnaataaaattgttaaaaattgagcttagggtcctatttttactattttgtcatttaacaaaacagagagtccaattagtaacttttgcaaaacacagagtctaaaatggtatttacccagtaaaatatgatttattcaagtgtctttatttttttttttttaaatagtccataaatatgttaactctctttctttattttggaaagagaaatatattaaatctgttaggagatgtatatttaattgaggtgaagcattttaattgaattgggataagagcattttaatagaattgggataagaagatagggaaaattgtgacaaaagatttgactcctcttagtaatgcatcgttataatatctttcttattaaaaatcgtgttcatattaatcttacttttggtaattacttttgtcttttcaagtagtttcgttcgtgtacttagaaacaaaaatcaagtaatgagttaactactcattgtaaatacaatgataagtgattcattcaactatacattctttacattgcaaagaattaattgttgatttttctcatgataaaattgtaataccgtgttctttatcatcaatttaatactgtgtaggccaaatataaattgtaacatccaaaaaaattaaataagagaaaaattaatataatatcaaaaaagaaataataatccttcatcccaaaaatatttatccgcaatctgtgttagtatccctgctgcagttgctcccgtgacccttgcccccaatctcaccataaaaccttcttcaacacccattattgtccctaacagctcctatcccactgagacctgttccataccttctaatcccattattgtccccacagtcgttacttcctcatccaaaggtaaagctcccatgtaccctgaagtccctaggaatctctctatcaacccccaaccaactcagttaagagctcccacaagcactgccaccaccaagaagagatcctacacctgtcgtaactgtcaggtgggctcttctgttaggagcatgctgaagtgagcccgtgcctcaaattctaattttgttgtggtgccttccatgtctgatactgatgaataggcaagtgttgctccgcaaccccgcccaaaaaaatgagcatcataagctggaatgctcatggtttagggagttcccgagcattccataatttctcaatcctaaccaagcatctgttggaaattattttacc

SEQ ID NO: 121256 - DNA, 1316 bp, Cannabis sativa
  modified_base (687)..(689): a, c, t, g, unknown or other
tgaaagaaatgattattttattcacaactggaattcaaaatatttcatcagtaatgtgatttacaatcattaatctcaaaagaacttccccagttcaattacttactttatcaatcttccaggacaatctggttttgatagaacgggttttgataaaacgggttttgatgtccagggtcaatccccaacatactcccacaattgtttcaatattgagggtgaatcccttacatatactggggttctgtgagaccctaacttaggttcgctcggcgaaccttgacatcactcgatgcttagcttgtgggatagcagcatatgagtgaagtgcacctgccagggggcagcaggcagcagcagcataggcgcacaacaacattgggggatgttagctgagcttggctacgtgatgggcttagatggacgtgactttgcatgggcatgcatgaaaatggtttctcagacagtgtgcatggtgacacacgtgaatgacagtcatcggaagttacctatttctatccaaagacacgcacgtgggcttaagtaatctgttgaaggatagatgcatggaatctaggcgagggcttggatgactgacacgtgggtgttagttattttgcataagctatgctgatgtgtaatgtgctggtgtgtccagcatggcctaggcggttggggatgtcaacnnnaacctattattgtgttatatagtacgttgggccctagagtcatcagagtttgtgatgtccagcttgagcattgtgtaatccttgatattgggtgaataacaaggttgggaaaagggtttcctgtatactgtgtgttcttatgcttgtgtatgcatttacttgataggaagagtgtgttgttgagtgacgctgggtaagagtgaaaccgtgagtgtgtgtgcatactaacgggttgttgggttggctgactagattggggtgaatctaggacatcgcagggaaaatttgagtctgagaatttagccttgtgacaactagtatcagagcaggaatcgtgttgggaaatagcagaaatcatggtgacgagtgctgaactttgttctcgagttgaaagactcgaatagttggttggttctcccaacgaagatgatggtgtcagtttgtttgttctcagtgaacaacattctgattaactggaatcccttgagatgctggctcgagatttgttgaaggaagcatcagatcaagttgcgggttgtggcatggccatgatggatatgcaaagagaattcgatgagaatatgaagggggtgatggacaaactatcggacctgtcaaattctgtga

SEQ ID NO: 121257 - DNA, 983 bp, Cannabis sativa
taattaactactaatttccaaattaactaagcggtctttacaattaccgaactattcggggatgaacctctatattcatgtgtctttatattgcttcattatatttcaatcgttataaactacttgtcgcctattaaaatagactcactgtcgttggctaaaagcgaggtcaacactatcaatcattgagtaaattacgtccacaaggggattccccttcaaaagagaaacttgcaattcttttacatttttaagaacaattttatctatgctagataattttctttcttgtacaagattaaatctacttttgaagccctctttaatgcaactatctatacaactcggattcatacactttttctcatttatacacaaatttcaatttagcaaaatgttataaattgcacctgctaacacattcttatgaacattatataatttttatgacacattctagtatatcttttttttttcaaaattatatatgtgtttttaaaaaatatttttttcaataacaaaaaaaaaatagcaaagcctataatagtagaataattaaaaaagaacagtggaataacagcgaaaacttaacacataaattttaacatatggtgtaaaaattccttttacttatcaataaatatcacgcctactaccagctcgccttaaatggtacgtgtgaatgagagctgagagcctgagagtagaggactcccttcaatcaatataaaacagaaataatataataacatctcaaataatcacatacatcttttccatcaaagctatatatatatatatatatatatatttttcctttttgaacatctgattagttaatattgcttccctaaagcataggttctttatatttggtcttataatagaactttcctatatatatatatacggatgttcattggatcacatccaatatttttaggcctaaccagattcgatccaattaatttcagtcatccaat

SEQ ID NO: 121258 - DNA, 2237 bp, Cannabis sativa
ttttttttttttgtatatttttagagaattaggatagaacactttaacttgtaattaagatgatttatttgaatttgatctatttttaatttagtataaagataatcttttgttttaatataaattactttatatttatttaaatgtaaattattttacatttcttcctaattttcaattaaattaatatttatattttaagttaaaataaatattagtattttaattaaaataagcaaaaggcacgtcatgttttcgtgccagtagagaactctttcggaacgttaattgccgtgccaaagtacacttttttggcaccaactttcaggcacgacaaaataggcacgatatatcatgccaataggacgatgggcacgaaaaaagtgacttctaggcactatttttatcgtgccagtagaatatttttcttgtagtgatatgtatagtatatagtatcacaataaattaataaaaaaaattcaagaaaaataaaaagaaagtatcaaaatcagagagactatcgttattatcatcaatcaatttataatttttttctttatagcccaaaaatccaaatacaaaaacatgttaaacaaaacatcataaaaaaaaaaattaaatataaaatttctattatatatatacacttgatatatagtgagaatatagtgagaaaatttctataacatatataaacttaccaaaactttccatgaaaatgccggcttggaggagcggcggttgcaggtgcgtcgtgcactacaaaaaattactacttttagtgacaaccttttagtcacaacataaaatttgtgattaaatgcgacttttagtcacaacaaaaaattatttgtgactaaaacatagtatttaattactagttgtcgctaatttagttttagtcacaacaaatattgtgactaaaaacacatttagttacaataaattataatttttgtaactaatacttttagccacgaactttttagtcacaacacaataatggtaatttataattagccataattttttaactttagtcacaaattttgttgtgactaaaaataatattttttgtagtggtgcggaagtggttggtgatcgaaggtcggaaattggtgatattttgagatggaattgggaatgggattggtgatattttgagatgggttggggtttttttagagaaaatgaaaaaaaaaatggggcaagaagaagagtaaatggctcgagaaggggaagtgtgacttttaatgtgtacactattagaggcgacaattggggtaacattgtcgcccctaatgccttgattttgtcagttggcagggcattagggtcgactttagtcgccctaataatgtgagggagaaaattcctgcctaaaagcccagaataattttttgtcgctttctaattaatactttagggtgacacaaacccagaataaagaaattcttttttagtggtgacattcaattgtcgccccctaccctaattattagagacgattttttgtcgccccttaaaattttatttgttgtagtgtttactagtgacacatttgttgtgcactacgagattttatacaataaatgttgaaagatatggcgcaatgtgaatccctaatttagtgggattccatatcggagatatctccacataagtcctaacttccgaatatctcttatagagcactttcgggaataccccatgagagcatccagatataggccatgttgtgctttcttagaccttaacaaagagtttcatattcacaaaatcgttcttagattgctgggttaactaatatgtattacatgtataatgagttgcataggaattcatcacacccttattcttttacatcagtattcacttaccttattccaacatattggatatgttaaaaatatacacataagattactattcagttctcaatcctaactgttgaaattacttcattagccctgactacttggccgttacatttcgcgccccagcaaccggtaagcaaaattgggtgtggcagggaaaagaacaaaatgtctacgtgacaacgtaatacgcagaatattatatattcaacgagagggatctacacgtaatacatatgtgcgcgccatcggttacgcaatatacaatttacgctatactatatacgtgccgagccacgtattgctagtttcatttaagattttagtctttttaagattttgaatgtattttatttttaa

SEQ ID NO: 121259 - DNA, 956 bp, Cannabis sativa
  modified_base (911)..(931): a, c, t, g, unknown or other
ttttttttttttttttaaatgtgagttttattatatattttattctattaatatgtctttactttcctcactttcaatgtttgggatttattcatatcaaactacatcattattattattaaagttaatttcttttgatggaatataattattaaagttaattagtagtacaatatatcttatagtataaaaggaactccgtttgaatataaaatatagaactcaagttagagctcgggactatatttttattgatagccacgtctatatttttgagaaattataattctttttacattgtagtttccaacaaaaacaaggttcggtagtcttaaaataatatttatatataagatgtatgaattatttttctcattgtcaattagtttcgaaataaaatctcataaactttactatacaatcctaaattctaatacagtattagagccaaataaaactatctaagccaaaaagtattgccgtgagccaagtactgtcagtctaaaaagacgagtcaaacgagattttaattcaatagttaaatttaaatttctatacttaatttagcaacttaattaaaaaaaaaaatctttcttttacactatatcaaaaatatttaactcaaacttaacatcttttatatctctcaatcaacgtaacattctcagctcatataataaaaaaataatagtattttttttgttcaattaaacaacaatattaagtgtagaaactcaactttcataataatactcattcaagaatatagcaattaagagtgtacatatatatttatagtatttttgtttacaatatcattaattatttatggtaaatactattttagaacctatgttttgcaaaaattactgattgggtcttctatgttgttaatgttgggttttatgccnnnnnnnnnnnnnnnnnnnnnataattagatttacttattaatata

SEQ ID NO: 121260 - DNA, 2965 bp, Cannabis sativa
  modified_base (2295)..(2308): a, c, t, g, unknown or other
  modified_base (2430)..(2435): a, c, t, g, unknown or other
gaaaatttgaaagatacatttatcattatttttattagttttgacttaatatttattcaagccctcactcaactaaatttctgacttcgtcactacacctcacagagtaaacaaaaaagctacgatgaatcgaaacgtagagataatggattctaagtggagactatgttattctccgaagggaatttaaagatttagaaagaaaggtagacaaagcaggacaatgatgaatcatgtttataatttgattccctatcctattttcacattcccatggtagggaagtacgtgtccgattgacccatactttgagcattgagctctatacgggtttaatattagaggaaccgcctatcaagatattagatacgaaggaatagatataccgaacaagatgattctgttgtttaagtactgtgatgaaacagtaaggttaagaaagtgacttaggagttagagtcactgatacgattattgtatcgcgagttgcttaaataaatttcgaggaaaaaatttctataaggaggggatcgttgtaatttcctaaaaaattaattgtgtataattaggcatattttattaaatatgagattatatgaatatttaggatataatgaataagattataattttattaagctaattatgttataattaagaattttagtaaaagtgagtaaataagcgtaatttattaattacagaaattttactggaatatatgggtattgtatatacgattgatgaaataaaaatatttttttacgttggacaatcatagagacttgattggtggccaaaaatatcacaatgatattagtgcgtggtattggtgattttaataagtttggttagtattggttttatcgaagtatctcggggtaattggttatgaccaaattacccatcaattagaaattacttaagtgttaagctaagggtataatagtatttttttagacttaattaatgtattttagtttttgttttagtggctttctaaagtaagtgggtagctgtttatttagtatattgtaaatgggtttatttaatttttattttgtggatagtcttgaaaaagtttagaataaatattctcacccttctctttctccttgttcggccctagaagaaaccaagaaccaagataggttctgtccgttttcttcagcaattcacctatggaaaaatcaatcaagaataaagtaacttgtggagaaaagcaaggtagtcctaaccctttattttctctttgaattttgaaggttaaagtttggttttaagtgggaattttaaggatttgtttctatatgagtaagtatgaattataatatgtttctaggttagaattagagttattttgatgtttctaagcttttagtgtagctggttatgtgggtgaagcaagcttgagctcttggaactcaaagcttggtctttaatggtaagttttgaattatgtttttattttagtttttgttagttgggttgtgttatattgatgatagttaattgttttttgaagtttgagaccatttggttaggtttggagggagttgtagataagcgaaactcgggctctaattctacagaaaaacggtcgtcgaccatttttctggggaggaacacctaaaaatggtctgctattctttttaaacggtttatcatttttggtgatgttcgcgacccccatttttttgtgttttcttaatatttagggtattgccatactatgtatagatagggaaatttcgaattatgaatttaaagacctagaatgggttaggtcaagttgttggccgatttaccgttgttgtgacctaggaccgagatcgtcgtccattttttcattttttcatttagattggccagcatgcatgactctagaattaaaagtaagaaaagtacaaatgtactaaatagcatgtcatgttaggatacaactattatcatttataatatacgattattatcgtttataagacacggtcattactattgtgtgagaaaaagccctggctataaattgaaattgttgttaggtttcttacttgttagtgttgtggtatttttaacaccaaagtatacatatcattaacaagttatagactcacaaagagtgatgtcgatcccataagaattgtagttaagtactttaaaattaattctttacttctatttgaaaatataaaatttaagagaaaattaaaattagaaaataataaaaacagtgaaaataagaagcaggtaaattaataaggaagttaacaatgaataaaagttagggctttcgannnnnnnnnnnnnnattgattatggtttaacatgattctattcatattaccgaattctatgcaatagcaggtttacttaggtaatttatagtcttctcagatatataaaccttaattacatgcaaattttctactnnnnnnataaattaaacatgtaaaaggcattaaacacagaaaccctataagctatcgaaattacctatatcgaaattacctatatcgaaatttagttctatgtcactatagcataattgacactcacttctaaaattttatattaaaaatataaataattaattgatggtcaggcaatttaaagaaattaagtacgaatgaaatataatacatagacattgaggggaaattaaatcatattaaaaccaaaactcaatgtcaaataatatctatctggaccctaataaactgtttagctactcatattcatcgtagcaatttcacacatattaatttaagaataaagaagaaaagaatgttgaaaaccctgatgagaaagccttcaatatcaatttcgctctccaaaattcgtactccttaattccttgttgaaaactattgatgtccacttctattatagccaaaaaaatgataaaaaaataaaaataaaaagacgctgaaaacctatttttcttaggattagaaggggcgggccg

SEQ ID NO: 121261 - DNA, 550 bp, Cannabis sativa
acagctcagatcaaataacttcctcatctaatatctgtcgtatatcacggaatacattccgtgaaagtacaatcacgggacaaaatcatgttatatgacctactgatgtttagtattaccttgatgttttttctcataatcgtttatgatattttataaaaattattatattaaataatgtgacttaatactaattaattatactatactatgctaaatacactaatactttagtttattttttttaataaataagatttattttctagaactacaaattgtgacttttatctcttaaatttatttttattataaaaatttcttctgaactataaaaatcattttaaatattctcctctgtataattacaatttatcaatataacactaatgtagtgttaatttagcccagattaaaaatctaaataaaaaataaatatataaacgacaataatgataaattatggaaatatttatgtgcattcttataaaactaatgtttatatatctcactcattcaccttggttatggtttgtgccgtcttgttctc

SEQ ID NO: 121262 - DNA, 906 bp, Cannabis sativa
catgttccattggctgcttccactacagatgatatgggtcaggagactgaaactatatatgatcccctatagctagctgcttttaattaatttaatgttatatatatttatataaccaagctgattaaattgacaaagagaactatataaagggattttacaccatatcacatagctaaccacatctgcctttcatcaccaataaatgtttttatgatatgtataggtacaagacaattcgtggagatatatataaatgtatatacgaggtgtaaagcacattcaaggttcaaggtatgtgttagtgtttttattttattattattttaattaatgacaaaaatatattggattaaaatcttagtttatatgtattagtgtattattatttaaagtgtgattattttagtaattataggttattaggtaagaaattatcatgtgctaaatatttctaatttattaaagggttacattaaaaatacttaaaattaataacctatcggtgagattatagtggtctccacgaaacaagagtaattcctccatcaagagagaaaattagaaaattttaagtcttatttattggaagattattacctaaaatcactataaagatcatttctacaagatagattaaggggttgaagatagattaaggggttgagatgcaaaatgaacctaaatttggaaactaagttaataaatgtccattttttaaaaaaattaagaaaataaccaaatctaataaattagcttataaaaattataaaaatatattgatctcatatttttaaaaatatatatatatgtaataataaaattaagctacataatttttttttattgcatattattatattgtaataaaaataaataaatatattagatcatttaaatatatac

SEQ ID NO: 121263 - DNA, 915 bp, Cannabis sativa
  modified_base (854)..(877): a, c, t, g, unknown or other
aatgaaactaatcttgttttaatccctaaaaagaagaatgttgctacaatgggagatttaaggcctattgctctttgtaatgtcatttacaaattgatttctaaagttcttgctaaccgaatgagaagtattattgatcttattatctcagatactcaaagtgcgtttatccctggacgcctcatctctgataatattatggttgcttttgaagtcatgcattatctcaaacggaaaacaaaaggcaagaaaggctatatggctcttaaattggacatgagcaaggactatgatcgggttgagtggagttatattcatgctgttatgcttcaaatgggatttgatgaacaatgggtaaagttgattatgttttgtgtttcatcagtaagctactctgttatgcgtgatggccacggaatgggacctattctcccttcacgaggcattcgtcagggcgacccattatccacttatctctttattatctgtgctgatggcttctctgctcttatcaagaaattttaatctcaatagcttttacaaggatgtcgtgtggctcatggggcacctgctattacgcacatgctctttgctgatgatagctatcttttttgccaaccaacattcggtgcatctgtgggtatttcaaatctgcttcatgtcttcgaaaatgcttcaggacaaaaaattaacttccacaagtcgacaatcttttttagtccaaatactattggtaaaaatcggaatcaaatttgtgacagactcggagtgcctgaagctttagaaggaatctctatttgggtctcccaaacattgttgaaaaaataaataaaataaataaaaaatatattttnnnnnnnnnnnnnnnnnnnnnnnnaaaaataaatttcaactaaatataattttctatttaat

SEQ ID NO: 121264 - DNA, 1103 bp, Cannabis sativa
ttcacaatttgtattttgtaaaacgatctgcaaataagttggctcattgcttggcaagagactcttgtttctctacaggtcgtgtatttctgttggaggactgttcctctgaagtgcgttctattgttttgaacgaatttactaattaatagatcttatgatttttattcaaaaaaaaatagttattttttaaaaaaaaaagaaatagttatattttttaacaaataatagtaaaaatataaaaatgatatttttaaaaagtaaatttaagatatttttgttaaaaaaaattgggcttgtgtgtgggccctactgacccaaccttcggccctgagaagaaacagaaagagggaacacagtaccctccttttcaaaatgaacaccacagaatttcccatcaattataataatagtagtactacaactcatctcctttgaaactatgttattgttcttttacttctttccattatgtcttttatttatgttatcaaatattcattatgagggaaaagctatgccattcattatgtatctatttgtatatctaatatctatctatctactcctttttgtcttctccaagggaaattattaaagccaactttgtcgtgcatagacattgtgataatgtgttagtgtttctttctaactctataatacaataatttaacaacgacaatgtgttttgtccatagtttaccttaaagcaactaaagtccaaaaccaaaaagaaaagatagagatattaattctctcttattctttgatgttatagtttaaaacaatgatttgtatcccaagtatcatttaattatgattcacattgcaattagtgatttgtttgtagtgacaattttaataaaagaatatattaatattactaaacatggattccataagaacaaaatgagaataattctacttacaacatctaccattcactcctcattattctcctaaaaataaatgtatctaaatagggtaaatactattttaaaccctgtgtgttacaaaagttatcaattgaaccatctgttttgttaaatgataaaatggaccatgtattttctaaaatggtacaaataggaccctgaattgat

SEQ ID NO: 121265 - DNA, 1577 bp, Cannabis sativa
  modified_base (1471)..(1471): a, c, t, g, unknown or other
gtcggttacggttttcgtaaaataaaaactgtaaccgaccggtcggttataaaattgtaaaaactgaccataaccgaccgattttcacccttacttacatgcagaggaagaagagaggcaccaccgccaactccaaaactaagtcactttctttcttctctcccaagacacctggctccgacgtctcccaagcccttgcctctcttcaccttcaaggtactattttattattatcatgaatctcataagccccttcttagaattcttattagggttagagtttggtactggttgatttgatttaatttgatctgttattttttatttttttaaataaatagaggattatggactatcaacgaatctattttctctctgctaggtttacgactctcagcgaactgttgtggccatggcaggtcgtggccggtcgagaaaaatggagatacatggttttcgacaaggttttggtaagaagaagaagaagaagaaaaaagaggtctgacttcatccgatcaaccgaagaagacttggcagatggatgagttgtttggtatcgaacccatagatttctctaatgttggaacggacattgacggagtggtggatgggattgatgattctattgaaacggagcttaagggggcgattctttctctgagatcgtctctaaagatgattcgaaaacaggaggaggtccgacaatatttctcccactttcttaaggcttctcaacagtgccaattggaggttagagaaggttaatcacctatccccctattttgcagtctgaatctgtgattaagagtctagatgctaaattttctaagtgttttaaacaaaacgtgcaataattgtactatatgtattaattactattttctttacattaaaatgttgtttatatatatataattttttaatttttttataaatatgtgtatattagattgaatcagttacttttacatgtcaatcaacgtccaattcgcacaactacagattttgaatttttcaatccaatctaatccgtacaagtgcaaatatctttgcggattggattagattggatcgtgcgaattagattcggctattttatgaacactcctacaaaataaccatcgttcaaaaatatcataattattttagaaatgctttttatttctttatatttttatgtatttgatttttttaaaagtgaaaataatattgtttttagggaaatttgcggcataaataccatatgttttcaattttatacacttaaataccatatttttttttacggattaaatactaaatgttgtgttttacctctttccgtcactactattctgttagttataaaaaaaaaagtacacgtgtaaggctgagattaattctcacttattttttaaaaaaacaaatatttattttaaaacttatattcccttaataaaacttaaacatatcaatcatcaatatatatatntatatatacatatatataaatgagggttttggagagatgatgtggcattctcttcttctaatgttctactttttctaatttctaatttttttgttttttttttttt

SEQ ID NO: 121266 - DNA, 2675 bp, Cannabis sativa
  modified_base (46)..(47): a, c, t, g, unknown or other
  modified_base (2146)..(2150): a, c, t, g, unknown or other
  modified_base (2362)..(2375): a, c, t, g, unknown or other
  modified_base (2647)..(2650): a, c, t, g, unknown or other
catgtgaaccatggaacatagaatgatttatgatctttattaattnntaaatctgattatattaaaatagattttatttagggcacaagacccaacagatactacatcatgaaatccattgaaagtttcatgaccgtagaagatctaataatagaattgacacaactggtaaaaaaattaataagtattataataatattattctttattaaatagcatatgataataggtctttactaattaatatatacctttggttctccacgtcgtacacaaatgacgagataaatgttatacgtgatcggtggattctttacgtgaaagcggaagcggatcgatgttgccttgttaatccgtgtatagatctcaatttattgttactatagatttgtaaatatatttagatgattattaatgttaatttaattattgttactacataaatttgtaaatatatttaaataatattaatgttagtttaattattgttactatatatttgcaaaaaatttaaaaattaatgcaggagaaaaaatggtagaaaatttacattttccccctatttttccaatataatgattgaaaaaaaaaaagtcgctcaaatatacattttaaacttgaaaattgttacctgtactatatggcacggattaaaactgtcgcctatgcttaggtataggcgacgatacataaccgtgccctatactataagaaactgtttataggggacgattttaaactgtcgcctataatataggcagggccgacactgagttgaaatgagccatagctaaaaaatattttttgagcccttactatatagataaatagtatttttaaaaattattaaaaatatatgtatttttttaaaaggtaatttttttatttggacccctaaaataagtgggccctaggcgcgggcctagtctgcctatggttagggccggccctgagtataggacttggttataaactgtcgcctatacctaagcataggcgacagttttaaactgtgaggaagttcaaattggcgagtgtttcaaactctcgcctattccgtccattttgtgacggtcgtataagtgacgattatagaaatcgacgagagtactttatccgactgtttaaaaatgttggaaaaaaccaatttcgtagtagtgcggagagagagagagggatcattcaccatggatatacatacatatatatacagagagagagagtcgacgttggcctactcgttcaatggtggtttggagtggtctgagagagatgttgacggagaagaagagagagagagaggtaatcgtgatgagaatattttgtgcaggtgagaatggaaaaggagagttgtaagatttcattaaatggactgttggcttccgaaaaaaaaaaataatggtgacccttcataatcgacgagaatgtccaaaaaatatataccgttttttagttttcttgacaatgacctttttaaatcgacaaaaactctttatgaccgttatagaccgatgatatactatagccatcagtttaaaatagtcacttaattttattcacatcggtcctttaaaaaatccaattttgtgattgacgagaattccctcttttatggtagtagtaatagtaacactcttggaacaatttttcattcattcaatacagaattatttctgttcattttgcttcatagcattcttatcttgtttttctattagctaactctatgccaaagaattcttattcttttctgtttagccacaaaactgtgcgtcataactgtatcaaccatatccaaatattttattttcaaatcaaacggcctaattcataatcaatataaaattacttattcgctgaagaaaagtattgattttcagtagccaaaatatataactaataatcaaagagataatgctacttatttcttacctaaatattagtgggtttggttattgggattaaaacattgaacagaaaggtataagagagtgtaattttagacgaatatatttatatttatatttatatatataatattgtcatagttatatttagtagaagaataatttgcggcataaatacttaaatttaactctcagttgtaaataaatacttaactttaatttttggcggtaataatacnnnnnttataattctggaacttttgtaggtacctaattgttaatttttaagtaaattgccacgtggcaattcctaattggtcaaagtcattaaattttattttatttttttaaaaaaattaaatataccaataagaaaatgacacgtggataatgacataatatttaacggttagatacctacagagttccaaaaattataacttaggtattattannnnnnnnnnnnnnacttaggtatttatttgcaactgatgagagttaaacttaggtatttataccgcaaattactctttagaagaatattgttttgaggcacctatctaataccatttaatacctgtatatataatttaataatttggccttacagaaaaaaaggttaattatgattttttcccttaaattttaacatgtactaaattatgcccctaaatttttctaacacttacaaattccccttgaactattgagattgatagatttaaggacttttgtctaannnnattcaattttactatttcagtgatt

SEQ ID NO: 121267 - DNA, 1476 bp, Cannabis sativa
actttttatgccatatttatcataactttaataatttttcccatatttttgaaaatagcccatttttttttctgtggcccactttgtctcagggtcggccctaggcttgagctaaggcatgttaagcctaagcctaaggtgcactaagcccagaaaccaaaaaaatattttttatttaaaattataaatatattttagtttatatattttaaagagtctaataatttttttaaggccgtctaatctcaggactactcaagtttgtggttaggattacgtcattcttcttgcattttgcttataatatcttttatttcacttatatttgttgtgagctcaaaattgtgccacaatgagacaatgcatgtgatttaatgaactttggggggcacattagtaagattttaggtgtttggtcaaacttgctcaatgaaaagattttaagaatttaattatttttttagttctcaaataattggtatggaattttgttaaaagcttttgaaataccatacatcttcattaatgaaaacatgtgaggaccaacaagccaccaagttaatataataccgtacatgatttggatcaggttggatcagagtcggatcaaatccgacccgccccattgacattcctataatacacacatttaacaatgaaagaaagatgaaaaaattgtgatatatttacatcaataatttttacaaaatattgagtctaaaataatactaacccttatatatatatttttacatgctcttttgagttaaataagacataaacatattaaattgatcataaatgactcctaacaagattgtaaacatcttaaagttgttatacctaaacttcaaaaccacaaatacgaattgccaccctaattgtaatgtaaaatttacattatttagtattgtgatctcaatttaaataacttttgacacaccattccaacaaaatttttacaaaataaactacattttaacaataaatcaccaatttgaatttcatggagatactcttattttagtttgtatattatttgaaatctcggttggggaagtaatatgaacaaagaatttatgtggaacaagcaccttaaacatgatttcatgagtaataaaatatgaacataaaagatacactaaactaatattacatgtaatattttagtgcatattttgtgtgcatacattgttactaaaatgttctttggttactcttgtacatattggaatagttatttctcttctacacattggaatagtcataatagtcatttcttctagagaaagagtcctacatccaaaatgggatgatgaaaatgtcctccatcttcaaatttatacacgtttcatgtgctacctaaattttatagaggttttaaaacaactttaccacaaataaacaatttattattaaaaaataaatatgaaatagttgaattaaaatacaaatgtgataactaaatatgtgatt

SEQ ID NO: 121268 - DNA, 2962 bp, Cannabis sativa
  modified_base (2920)..(2923): a, c, t, g, unknown or other
tacagcgacttagggatcacaagttgtatgcaaagttcaaaaaatgcgaattctggttgtctgaggtatcatttctgggacatattgtaggaaagaatgggatcatggttgatccaaattgaacattatgattgttcgttatttatatattattttttatattattttgatgttttgttgttgttttaatattattttaagttattttttatgttatttttcttatttttatagaataccgtgaaaatgtaaaaaaaaaaataactttaaacgtaaaagtgtaaaaaatttatcaataataacagtttatgtaatttttccattatattattataattttatcaatatttataataaataaaaggtaaatactatttttgactatttgttttataaaaattatggacctatccctcagttttattttaactctaaaaatttgtcttccaacccataaaactttctatttcttatatatctctaaaaattatggttcaatttttaccaataatagaagttttgtaattaattttctattatattattataattttatcaatatttataataaataaaaagtaaatactatttttgatcatttattttgtaaatattattaaccgggtccctcaattttattttaactctaaaaatttgtcctccaaaccctaaaactttctatttcttatctctaaaaattatggttcaatttttattctatcctttatctaaaaaaagtttgaccaaaatggagtttgaggtatcattatgttctattttacaaaatacatgatatgagttgttatttaataaaataaaaattaaatccaactgtaacttttgtaaagtagaaggttcaaaataatatttccttcttcttatacaataaaaaattgcttataattaactatatagatggcttttctagcttttaagtttaacaataatttattatctctcacgaccttctttgagatttaggaaaaaaacatattattgagcccttattaaaaaatgtaaagtatttttaaaaattattaaatatatatatatttaaaaaaaaaaagaactcttgggcttggtgtggagtacaagcctaactcgccctaacataaaaccgaccttgttatcgctatatatccaacaaaagtggcaccaacaacaacaacaacaacaacaataataataataatataaaatgacaaacaaaaatgaaaaacttttattaatattattattattctcttctttattcaactgaaacaactcaaacaaactcccatcacatgtttgaaggggaatagagatacacacacaaatatatataaatatataatagaagagagaagacatgcatgcatgcatgtacgtaggcttacacactagcttgtgcgtagtaggacaacatcatcatcaataaacttcaactcgccattggtcgttaatctttaacgatgtgagtatctcattccaatctttgtccttttttgttgcagcatcacttaaggcatcttcaattggttttaccatgtccttaagcccagctaagtatatgtaggctcctttaagcaacaactctagcacctcatcagcatagtcactaaaaatgtcttgaacatacattttcccccccaatttgttcttttgttctctgctatatgctatgttataacaaaaattatttgggtactccttttgatattgctcaaattcatctttaaagagtgcgctatcgttgttgctcaccccatggaatagccatgcaagtccggagaattggaatgttggaatatcttctttgaagaaacgacgaagatgagccctaaatggcgcaacaccagtcccagtagccacaaatatgtgagttgcattagggtttctgaaatctcccgaaatcattgcctcgcgagttgggcctgtagcaagtgcagggcttcatattattagcgatcgatagatgatatatacatcctatgtcgcattgtaaaaataatttataatattactggaataaaattccacaataaaatctttttgatttgaactcatcagaacgacactacattcatccaaggtcggccctaggcataagcgggctaggcccgtgcctagggcccacactttttgggggcccaaaataaaaaataaaaagtttcattagacttttatttaagtaaaattaagaatattataaacaataaatatttataacttagttggttgaggtgtatgacatattacacaatgttacgagtttgaatcccataatactcttttttaatatttatatatatatttctaaggactccaaaatttaattcgccttagactcatatattctcgggtcggtcgtccctatttacatagaatcatagtgtaaatactgaggttagctaagagtacctacgagttgaattttatctccacgcttggacttgcacaaaatctcactagtggtgccaggaatactacgcacacataaggtggttgtttttccattaaaagaatctccatatcttgaagaagcagctgaaaagaaactcaaattttctggatttcctggttcaaaaggattttcatcgggctacacaaaaattaataaagaaaccaataagatgatcatgtcatttcttataataattaataaatcagtgtcactattaatgtgatacaacgatttgggtagaattcactcccaaaaattagctagcctgagagaggagggtgcccagtagctatagtactactaactaatgcaaatatataaatattgaatctcacatctcaattgaaaatgtgtgagatccactactaaatggtggtacgataagagtatgtccagggacgaacctagtagtatcaatatggggcctatagcccccactaacaaaaatattaccttttaaaaaattaaatgtannnnttttaatttgataattatagactaaaataataaaaaagc

SEQ ID NO: 121269 - DNA, 3734 bp, Cannabis sativa
aatctcaatagttcaggggtatttttaacaaccttaaaaatttaaaaaatataatttaatacatgtcaaaatttaagaaacaaaattcataattagacttttataagcattaacaacatatgaggttgaaaaagaaaaggaagaaaaggacggtgcaatttggtaagaaagggcagttgtgactttttggatgtcactttatgatagtcctcacgtgacctatttacgtttgttgatagtagcgattagagagagcatatcacgggccatactggtactactggactacgctacccacatctatcaaccctttttctcattaattatttttacatctatattttttatttctataatgaaatgaattattatcatcatttattaatattaatagtctagtagaatcaatgtatgatatgacttattataattatacatgtacgagagaaatgttaaaagcacaactcaacgtccttaccttaaaataaaaacgtgacacatataacaaattaacaattagttgttgttgttgtaattttgatgacccatcttctacaactccaggatatctttattaggttctagtatgtcatatatgtcatatgttccaaattaaaatatttatagcttaataataatacatgcatatggcgacaaataattttaggtgaattggagaataatggaagaagatagttagaacccagctcttattattagttggagatcaatgactttatccccaacttttacaaatttcaatatataaatatttgtttcttaggaagtatcaagatatataattattaaatatactaggagaaagctacgtgcaaggcacgtatatttagttttatgttaagtattatataatttaattaggaacgatacaagaaataatcatatatattttaatttattattatggtctaattaatttttttaatatagagtgattaattattattataaaacacatattattactcgatttataaatggagactactacgagattagttttttctcattggtttataactgtcttttatgttatttctcatcgattcttaaaaccgttggctatgtatgataaaaatgcagaactttaaataatggtttataattattggaaaaaatcattttaagtgactgtttataactgttgggaaagacttccatcggattgtaaccgacagtaaaagttactttaaatgacagtttataactgttagaaaaagtcattctgtttatattgcattaataatataataatatattattcatattcatgagagtcttcttattttttagcatttgaaccaaattagtattcatccactgacgataaaatataaaactaagctgcttatgagtacatcatacctaaagaataaaaactataatctatcaatacatatattggtattggatatattttcaccaatatgtattaagaaatttttgtcaagtacttcaaccttatacatattatcatcttcaacaaaatgtacatgaccaaaagaaaagaaaacaagaaaggaaaaaactattataagagtaaaatagtagtgttatctatttcacttcctaaatgataagtgagataaaaaaatcttgacctcattttgttgtgaggaggagattggctcctgaaccacttcctcacttatatccttctcaacttcatagttatttctttgtgttttggcgcagctggtccattgttgggagattgtgtaccttcaggctcatagtagtcatcctcagagaaccatagtatccattagttgtgcttaattttatatttgtaatgaatacttgaagtttagttcccactattaatattatctgcaatttgtgaaattaccatattgatcatcatgaatgaatttacattataccataagttgggttttaaacaaggaagaaattatttagaatacgattaatcattgcatatgtactaattgttcgtgcattgtgttgtacttacaatcaaaagtagaaatgacagctacaaagaagagtatattcctattaaaaaagaacaacatttcagtgatgaaatagtaaattgataatcaagagagagtaatatatatgttctaataataacagaacaaagtgtccaataccatatgtgttggacagtagaaacaacagtactacaacaaacctaattattgggtgcataaatttaacaactccttaatacttaccatatcgttcctaaaatacaatctattagaattctatatacacatttatcataatcttgcaacataaaacacaaaggatatggagcttagaattttcaaaagcaatgaattcgggttctaaacacatacaatcaaaaaccaaactactctatatctcataaaaaaacctaatcacataatcacacaaaacttattagtatataataaatgctaacatatataagacaacttcctggaagaaaaaaatatacatgtacatcatgattcatttgatcaatatttcatggcttacaaagttaaaaggttatgtatactaccttctccatagaaaaaattcaatgattcaaaagaatgagtaagaattcaagcatgaatgaaaattaatgagataacagttcatttattcgatcatgttgtgttttcaagagcaaaaaagggttagaagcaaaatcatttaacaagccagtattatccttaatttggccaactgaaatatctaatgaaggagaatcgttgacgaactatacaaagccagtatgataattaagcatgtgtacttatatacatatatatatttatgtattataaaagtactctccttctctcccataacttagcatggaggtaaaaaaagttagtactttaatatatattagattatgatttttcgcaaaaggattcaacatgatcatagagcaatgacaataatgctctctttctcactatcttttacaatttacagtcctctcattacttgacacgagtaataaagacttaagagttaatattctaataataataatatttcatacatcgagcaaggggcacataaaatagggtgagagtagagtgctgatagtacttcattacatacataaacaaagcatatccataaatgtaacttgcgagcctatatacttatattaattaccaattttcttgaacaaccaaactcagagaggccaaaaggaacaccaaaaagtctccataagatccatttcatagtattgcactttaaataaaggcacctttaaaaaaaaaattatgcaatgtaaacctagttgaatatttccttaaataaaaataaaaatagcgtcttaataaatagaggtcactgtatatctcaccttaatggcgatagagcaacactatgtgagagttcatcacccattgccacataataaaattcgatattaaggggatcccacaacataaattgagcactgttagtgctaatatattgctctcagcaatttggaagtggacgtaagaaccccaattaaatccaataaaccatggttagaaaatatcgaaaaaagaaaaagatttttgattctggtttctggcagaatacacataaaaaccaacagattattcaataacataatgaaacgaagggatttggaaattcaagctaagtttaccgtcaaagagagtatgaacttttgagttcttatgttgtaaccttctcttgagatcttttacaacatcttttgcctgcctgcacattca

SEQ ID NO: 121270 - DNA, 1208 bp, Cannabis sativa
  modified_base (48)..(66): a, c, t, g, unknown or other
taaactttatgtgtatttaattacattgttttagagaattcatatttnnnnnnnnnnnnnnnnnnnttgttagtaaatctagatcctgatgaaatatattccaacagagaccctcaatgatcgacaaggcccacaagacaccctagatccagtctctgatcatcttcctcgcctccgtccacaacaccaacttcgaaccaggtgtgttttttttttctgtaatttctactttaaattcgcaatatatgattaaactgaaatgtggtgatcaatttatgaatttttgagtttggggaagaatctaggtttcaagatatattattttttgggattttctttgtttgtgcgatattatgtgatacttatgcgattaatctttcaattttaaacggttttcggttctcatgttggttcgtattgttgtgtaattttgtgcgataaatcatgacgatctaaagtgtttttgtattcctgttggtttgcgatttttgggcgacatttgtgtgatttaatttaaatgtttactctaaacagtgcttgaacaattttaagtgaggtatttgcaatctttgtgtgattcatgcttgttgttttgtaattttatgcaatttttacgtgttgttttgcgactatgtgcgatttataaccaattaataatcatctttagtttgtaaatgcagatggctcaagaactcattctcttattgtttgaaaatttttagggcatatcacttacagaaagaacgggtactttacttcaataaaagctaagtttgaagcctttaagttgattgagaaggtaaaaaaaaaaactccctttggagttttttggaatgccagtgatttgaaattctccgacgtgattgtacatcaactattattaagggaaaaagaaagtcggtaaggtaaaaaatgatgaactgcgatttggcgtgggtaaaacaaagccagatttgggcggtctaagttcaatttgatcacaggcctaaagatgagtcatgcccccttgacaaatgaattagatacaaaatgtgattctgatcggatattgtaggactattttaacaatgcaaaaggggtgacctttaaaaccctttcgctggcttttgaggcgtgtgatgtgttggaaatttttaccaggatctagatttattaccaagtatgtttcattaacatcctaatacgaattctaaaacaatgaaataaac

SEQ ID NO: 121271 - DNA, 1882 bp, Cannabis sativa
  modified_base (1822)..(1842): a, c, t, g, unknown or other
atctatattaataagtaaatctggatgtgattaaaaaaaggctttctctctctagctttctctcaactctctgagttgctgctatggcaaagacgagggcgacgaagcagggcaagccatgatcaccagcgaagaagaagaaaaaacgtggtcctgattcctctgcagatgtgaagaagaccaagactatggatgaggtgttaggaattgaacctatcatcttttcggatgcagaagagggtgaaatcgaagatcaggatacagaacatgaggcgggaattcgaatggaacaggaggattcacggagggagagtattcgactggaattcgcacaactgatggaggcaaaacaattcagggaggcgcaacaactatctgcaactgctgttgcgagaggtacgactgttatactccctattctgcgatctggtagtataattcgaaacttagaaccaagttttgctggttcatcatcaaagcagaaaattaagattacccatgaggatatccaggaagaggtggatttttggactccttctattgtgtgttatgtgcttggggctaatcccccaacgtctatactagatggttttgttagaagagtctggcaggataaaattgaccaggtgggaatgatctcctatggggttttcttggttcgtttcaagacaattgcagaccgagatcatgtcttatctgggggatacatattcttcaacaaacgacctgtaataatgaaggcctggaatccaaacaagaattttaaaaaagaagatattcattcagtgcctatttgggttcaattgtagggcttggaattgaaatactagggtgaacaagttctgttcaggattataagtcagataggaacacctgttatgttggattctttcactaaagcaaaggagaagttgaattatccgagaatacttatagaagtctcattgcaacaagatttccctaaacaaatagaatttgaagatgagcatggtgatgatatcacagtctatgtaacctatgaatggaagcctaaaacttgtgctcattgcaaaggagtaggtcactctactattgactgtaggaagaaagaggggaacaaagctgagtgggtagttaaaaaaccagttgtgtagaatcgggcaaagacaacaagtgatgaggatgggtttttattaccaaaaaaagtgtggaaagagaaaactattgagcaccaagttgcttctattgtggcagtggcaaactcttttagtagtttgcaacaagttaatgaaattcagcaagagattgctgatgggaatattggaagggaaagtgattcattgctggttcatgaagacatagagacctttggggaaacaagaggagggggagatcctcctcttcccaatggataaaatcgttagttggaatgttcggggagtcaacaaccaacaaaagcaaaaaatggtgaagcaatttattaatacacagaaggttgggttggttggtctcctcgaaactagagttaaggcctcaaaacttgggccattatactcgaatgtttttaatggatggtgcttcacttcaaataatccttggcatcttggagggagaatagtagttagttggaaaccaactagctataatgttaatattctaagctgttctagtcaattggttcacttgcaagtttcaactgtggatatgaaggaattattttatgtaactttcatatatgcctttaatgatgaagatggaaggaagaaattatggcttgatcttcaaagtttatctaccgtgaagccatggattgttatgggggattgttggaaattattttacnnnnnnnnnnnnnnnnnnnnnaagtatgttgattaacacccaaaatatgaactttctaaaa

SEQ ID NO: 121272 - DNA, 2440 bp, Cannabis sativa
  modified_base (1377)..(1384): a, c, t, g, unknown or other
caaataggtgatgaaaatacttctgtttctttattgatatttaaaagataaagattacattgaaatagagttttatttagggcatgaaacccaacacttataacttgccaactagattcatcccatgggtgatgatttgtgttagagctactacctattccattatgatgaatggcagagttcaaggatgctttaaaggagaaaagggactctggcaaggtgatcctctcgcccctctattatttgtcttaattatgaatatctcacaagaagattgttgttggatgctaataactctgcttataggtaccacccaatgtgcaaaggtttaaaaatcataagtatttattttgctgatgatcttatgttgtttagcaaaggcaataaagattctgttcaagtgcttaaggaaactcttgatgatttcagtgctacaagagggctctttatcaactccaacaaatcccaaatctatttgggagggtttggaggtgatgagaaatagttgatcctaagagagatggctctaatggagggaaatttccatcttaagtacttgggagttcctttaagcctactaagtggaaagtttaagattgtggacttatcataaagaagattaaacagagacttttcacttgggcctgcagacacctttcttttgtaggtagagctcaactgattcattcagtattacttggacttcgtaattactggatgagtatgttcattatcccacacagtgttacaaaggagattgaaaaactatgcagaggatttctttggggtttaaataggaacagaagaaagatccatgtgggttttggtcaccttcacgttggcttctccttgaacgtgttgaccgtgtagatcgggttgttcgtgagttgggaggcctccgtgagcccactggctctttttcagcacgatgagtagtctcttcagggtgattaatatcgttttccccgttgtcagccatggagaaaaaatttccttttggttaggagagattttttctgagcttttttcacataggctctcaatgaaagcagcaaattgttaacgtagatttacattaacgataatcagactatttttgtgataggtttagcacagaaattgtagaaaataaaagaaacaaaaataacaccaagttttttacgttgttttgcagttaactctgcatagtccacgagtcaatcttattcagacttttctgatacagaactagggttcttttctctcaaggatttttcgtcccctttttctgtacattatgtccctatttataataacataagttggaaattcattacattcaaactcaaattccacaatattatgtccccaaaattgtgggccttaattacgctccannnnnnnnaatgcagttattatttaaaaatcatacatttgtgatttaaattgctttaaatgggtcaacgctgatgtggattaagtcacactgcaaagtgtatcttgtcagggaatcttgcttggtacttgaacaacttagtttgtgttctcaatagaaacagtaattctggcagcgagctggagcttttcccatgtatttttgaggttgaagacaacgctccatctgaaaattgcagttcttggtgccaagatgaacttcggtagccaacattatttgaatgtcatcttcttctgaaacagttgacacaacgaagcagtgaagctcattgaaagatgtctggagctgattagtgaaggtaccagttgtatgccttcctatagcgagatggatgtctcgctatccgttatctatgtcctccaagctattacacatagttagtataatgtatatgatacgctaagtgttctaatagccagttcgccttgtcaacacttctacatattgcgaggttgatgcctcgctatgtcatgttgatatcatccttgcgattatgtcttttgacacgaaatggtttctcgttaatacgtgggtcaacagtttgtacatccttgtatcgctaaggactatgcagtctgcgagttataaatatacactattgacttctacatttaatgagttattccatttaatatctttaaatataattgccattatatttgttgatttgtattctccaaggctgacacgtgtcatcctctgaagtaccagccaaatttcgggtaaaatagtattgtccccttcggttgtatcaagacaaagaggcagtgggaccatcttatatagagaaagatgatagaacaattttggaatcaagaaaaaaaaaattatctcctctactttgctactttgtttttagacatagtcattttctcagataagttgttgagataaacactttcttatcttaatgaccataggatggtctacccctaatcacttagaatagttataaaacatgcaaaccttagttaacaattttaacttttcttaaggtcacgatca

SEQ ID NO: 121273 - DNA, 2474 bp, Cannabis sativa
  modified_base (883)..(886): a, c, t, g, unknown or other
aattataacttagatactattccaaatttaaaacttaagtatttatttttaactggaagttaaatttaagtatttatgccgtaaattattcattatattataatcatatatgagttttctatttggtttgagtagatctagagactagagtgaagaaaattaaaataagactttcattttttataaaatgaaaatcgcacttattgctcacaattctgtagatataaaaatataaattcccatgatgattgaagatttttttaggaaagtttttcttttggggcattactcaacactcgtgtagtgggagtagtgatttatgaagtttattaagcttttgctaattagataaatgatagtttaatgtgattaatttttttgtaaaaaaaggtttctctcatctccaatattaaaaaattatatgttaattaaatttttttattaattttaacaaaaataaaaatattttatgtattttttttttacaaattaaaatcatgttgttaaaattgatagattttattatacaagtgtttttttttttgttagaaaattctaattattattatattgttatcacagtagtttagatcatctccaattagtgctgtaaatacgggtggtattttttgacacgacacgaaatcggcacgagcacgaataggcacgaaaaaatatagacttgggcatgacacggcacaatgttacaaattggcatgacacgacacgaaaaatatgtctttaagcacgacacggcacgagaagcaagaaaagcacgacacgtaagcacaaataaactagctcaaaaggcacgacacacgacaagcccgaaaaatacgacacaccatattaaaaaaccttataatttaataataataataannnnaataagatatgaatttatcaattataaataaaactattaatacatgaaaaattaaaattatgctaatttatttatatggtatgatataaaaatttgagtatttataaataaatattcaaaatcaaatgatgttaataaattttataagattatctataaatattgttcaaaatttatataaatgtagttaaaactttgaaatatacatatatttagtaattgtaaaaaaatatgaaaaaataaagcacgaatttaagtccacatataaaaataggctagtcggtttaaaaaattcaggctggcacaagcaaagtacgaaacaagtccgagcacgacacaaaaaatactgggggggcctacgggctgtgccgggcctaccctttaaaaatattggcacgacacgacacgattcatatttattgtggcacgacacgtcatgacctgttttttaaaaagcacagataaatatgtatcgggccagcacgaacttatagaactatctccaaccatgctctttaaacactttccttagctaaaaatagaaagtgagacttgaaaaataagctcgaaccatacaaaaaatgactctctataatagcaaaagaataaagagctctctaaatgtagggaactcactacatttttgctaaacttttttaatagcattttaatcaaaactattattacttttttattattttataaaattaatttatatttaacaaatattattgaagcaataacaataaaatagctctctattttaactttctagcttttttagctaaaaaaaatagagtatcaagaagatgctcttataaaccctattgttattactaaattaagaataattagtatttttatccccctaaactttcggcacaacctgattttacctcttaaaatatacgacttgttaaaaattcctcctaaaatatatcagttgcataattgtgtccattctgttaggttctgtttctttaacgttagaaaatagtaattttatccttgaactatgactaatataaaattttgcccccttttattataatttttttaaaaaattataatattctattaattctaaaaaaataataaaaattattaaaaaattctgataaaaatattaaattcataaaaaaatattatttttacttaaaaaaaatatattaatcctaaaaaatattttcaaactttatttttatttataaccacgtatctcaagaaatcaaaccaaaattattaaaaaagcataaataatttaaataaactatgattttttgaagaaaaaaaaatcaaacttatttatatttataaactcatatcttaacatataaagaaaatttaataaaaatataattttattttgaaaaaaagttagaaattaaactaaaaaatgttatgtttacttaaataaatttatttttttaaaaaaaaaaacaaaatagactcaagtttgtttccgtaaaatttaagttttacaaaaattaaatttttgatatacttttttctaatatctaaatgaattttttaataaaaactaaataattttttaaatcgcttaatcagttttaattttttttttttt

SEQ ID NO: 121274 - DNA, 652 bp, Cannabis sativa
atattacatttattttccgttattataattttttactataatcgtactgacttgagcgtcggagtccctttggctgacaccccaccggtgctcccaattgaactattgtctctctctttattcttgacaggttgctggtgcccaaattttgtaattgtagatttcaccctctacaattatatactatagtacaaaatattcacatctaacaaaattaaactaatatattatagtaatgtacaaattctccaagaatctcgcggccactatgaaaaaagagaagtttgaagaaaaatgagagatcttaatgtgatttcgacatgaggcaaagtcctgaactctgagaaatccccagggtaacgatcctcaatgagccctagtccccaaagaggacccatcccgtgcgacatcattagtctcgtggggaccccccatgtgcatcatgttgcgatgctgggaagaggacttcctaagggagccttctccctgtactgcgaagcttccccaagggagccctctccccatgttgcgttcgctgtcccaagggatccttctccccgtgctatgccactcccccaagggagccttctcctcacgtcgcgctgctcccgaaggagatgttgggttttgtgccctaaataaaacccattac

SEQ ID NO: 121275 - DNA, 1798 bp, Cannabis sativa
  modified_base (1769)..(1773): a, c, t, g, unknown or other
tatcttcatcaaggggaagattctcttagctcttacttcactaaactcacgaccatttgggatgaaattcatcaattgaggccaaaaattccctgcacttgtgctgcagcaactcagtcccaagatcatactaatcatgatcaagtccttcaatttcttaaaggacttaatgaaacttaccatgctgttcgtgaccagctattactccttgacccttgtccccctctcaacaaagttttttcaaagactgtccatcaagaacgccaaagaaccattggccatcgaaccatccccacctttgctgccactgctacttccacaccaacagccaacaacacagatcctgcccctgcttctaatcagacttcaattaagaaacaaaaagccccgtccaatgtgtacccactgtaaaaaacctgggcattataaggacaaatgctattttttacatggtgttcctccaggatatactcaaaagccaactgatccctcaacttcaagaaaaccagaccagaatttaacaaatcgggctcctcaaaccatgcagattcccacccctagcatttatatctcccagtctcaacttaccaattctcaatgccaacaaatcatcaatatgttaactcaacaactccaacttacaacagatgcttccacctctgttgacacaccagctgccaacaacttttctggtacattcgaccctttttctttcacttcttggatcattgatagtggggcaacccattatatatgtttgtgctcacttacaatgctttcaatctttcactaatgtacacaatggaaaatatgtaaatttacctaatggaaactctgttcaaattaaaaaggttggtactgttgtaattaattaatgttttatatgtccttggtttcaaattcaacctcttatcagttcatgcattattagacaacacttctaatatagtaaaattcacttctaatgattgtataatacagggacattctcagacatcgaggattgggattgctaagagacatggcaaactttactacctcaagcaagctgtccaacttgcacctagtattcttttttcatgtaatgtacaacaaaatcaataccaatggcacaatcgccttggtcatccttctgtattgataacaaataagatcaataaacaattacattcttctcatgaaattgctattccctttcattgccccacttgtcacttggcaaaacaaaagaaattgccttttcaatctaataataatttttctaaggcaatttttgatctaatacacctcgacatatggggtccatatcctacaccatctgtcgaagggtacaaatattttttgacaatagtagatgaccattcaaaaagatagtttttctcttttactattaacctttcgaacttcttatccttcttttgcttgttcatcctcaattcgacttcttctttttcaaataagttccatatttttccatttgacatttgattccaaaactatttctagggtttcattctctttggctccgtctctgcatacatcctcttcgacttcttctttttgaaataagttccatattttcccatttgacatttgattccaaaaccatttctagggtttcattctctttggctccgtctctgcatagataaatcaaacggtctttgggagaaaataggatggagagcgacaaagtagagagatatgtactaagatattttttttaatacgatgttttttaatttaaaaaaagattatttaattttttnnnnntaattattgggtttatttgttaacg

SEQ ID NO: 121276 - DNA, 675 bp, Cannabis sativa
atccataaatattatttcatatcaaaactttttttattgcaattttttaacatatatattttttgattttttaattaattttttttttcaaattaattaacaaagtaacagcaaaaaaaaaattacatatggaaagttttaaatattaaattatttatataaaataaatgaataatcttaaaaattacaccaattttaatgtttgggaatttatttgtccattgtcaaaatatgaaaaactattttcgacaaaaatgactttaataaaacctcaagagtaaattgagtgggataaacttaagaaaaaaaaaagagtgtgccaaaaaatattattaataaataaaaatctgtcaacatacctgttatgatgtaattttagataacctcacattactaataacgtgtagaaaaataatagaatatataagatgaatgagttactcctctaattatttgatttttagataaaacctcattcactttatcccaaattctaaaatataataaaagtaactaggcatcaaacatggaaaaaaactaattttgtaaaataataaacaaattaacaacaacaactaagatacactaagggccagtttggcacaactgtgatgtaagaaaaagcagctgtagctgtgctgtgagaaaaatcagttgtaacaaaattgtggaaaa

SEQ ID NO: 121277 - DNA, 602 bp, Cannabis sativa
agtaaattaaatatttccaaccaaaaaatttaacattaaaatttaagaaatatttaatttatattaattttatgtgcataattaagaactaaaaatatacaaatttgaaccttaatcatatcatattaaaaaataatgaataataaatataaataaataaaaatatagaaaagatcccacatttatagaaaaatattcaacaatcattcggtttgtcattgaagtaggtcattttccttgtcttttgaacttgcttatgtggcattttgctttgaagtataaaattggagaagaatgacaagggagtgtcacctctcagctaggtggttataaaattaaagaggagtgccaaggtatgtcacctctcagccaagaggccaaataattgaagaggagtgagaagggatgtcacctctctatctagaggccaaataattagagaggggtgacaagcgagtgtcacctctcgaataggaggttaaaaattggagaggagtatctaagggatgataattctttaccatgattccacataggttgtgggatagctctcccaagacccattagggtccccacttagcataacttagtaattcccgaat

SEQ ID NO: 121278 - DNA, 5125 bp, Cannabis sativa
  modified_base (5096)..(5100): a, c, t, g, unknown or other
ttcccttttgcttacaatatctataattagtaaaaacatacattacatatttagaatacataaattgagggattcagacagcttgccacatccctggatacgatcatgattgtagggattgcttgtgtgcttcacgatatcaatcttgaagtcgctaagtcttgatacattgctcggagaaatgacttcgtttgttgtttggatcatctgcccttgccctgctctgtcaggcagactttgtccgtgtagatccatggctgaggtctgttcggaatatctctctagcctgtagagaatagcagacatgtgtcaccgatatgcgttgccacgtgatagtgtaaaaaatgcgataacatttgccctcaagtctgcacgggacttccaaagtcacgtgtagacttcacttagcttaagttcgtgtctcaacaggtggcacgtgttcgatgcgcctgttggtgatctgatgtgattctgaccaaaagtcccttcaatattcggctaattaatgatttgatcaatttgcacctcgaacactccaatcgtttcgcatgttttgacagttgcctttctccaggtacttaattgcttttgatttcccaacatttactttttgggggaaattgaggcatttgaaattcgaaatgattgcatcctttcactaattcgcttataaatagggcaaaaattcataataaaccacttttagcatttttcttgtttagtaatcccacagcaagaacaccttttttctctcaaattcttcaaggaatttccagaaagtgccgatcaacatcgtctgagcaacctgaaggctttaaacagtgagtaagtttctcatcttttccttctttatcatttggatcttcaattttatgggtttccatcgtagaaaatttagtagttttgaacttgttctaggaaaaactgtagagaatctaggtttagaaatgtgaaactttgcttgtaattgaccatataacttgactgttatggtatgttgactttaatttcactatattcgattctcactttgcccattcggagtttagtgaagattaacccttaattcgaggttttgaaattctgggttatgaacctaaatcacacaaaattttcctctttttaatcttttgattagagctggtcgatatactttgcttgttttttgttcgatatcccagccaaatactcatcttgtgtcttatcttttgtagatgaaccctagtgagttttggggaggagaacaccatatcgactaggatcttctccaactcttgtatgaggaccaacctcgtctttgcgctagtccgtcctcatcaagcgacggactttctaatttgagtttcgaggactgggaagtgagcagtgagggtacaccttccccagaacctgaggtgcagcatcatttctattctgaccaaatcgcaggtgaaggctacgggtgcttcatttgggaactcaggaagggttggaaatgatacttgtcgtccaactggacatatatcgtccgaccagacgtagttgataccatccccgtgggccgtccaagttctggtgcctttggaattcccaatgccacttccactgtaactgttgtgatgcataccaaccaaacgtcgtccaaggataggatgatggcccgcacaaaacaaactatgcagaaaattgttgcgactgatcctcacgtggcttggcttgccacgatgccgagcgctgaacatgcccggcctactgctgaggaggaggataatgagggggacattgaagtccaagaaatggaggaccaaggcgaggtctgttctgatagctcctctgaagctgaggaggaaggagttgctcgacctttacgcttcggaggttacaatgaagtcgaggaactggtgtccgaggttggtgatgtcctggagaaggcgatgattacgttactgaggagtacgctgaggcggttcctcaaaggaggcaaggttccttaggagctcagtggatgtctcctccatccatagtaacccaggcccaattgaggattttggagaaggatggatacctgggcggtgtcaagtgcttcttcctttctccaaatcactgggcaactagcacaaggcaggaatactgtgcctggttgggtgcccatactaagcagggtgcaatgctacccttgcatccgtacttgaagaggattgcggactatcaccatctctaccgacccagttcacaccaaagggcatcaagtacttatccgccctgttcaacctctatgtttctcaaggatggggtgagccgtccccacacgacaccaattggctcttcgatctgaagtcaactcccaagcatagtaggtcggggtacttctagttctcccaaatggacgagaaatggctgaagggtacttggactcgaagtcaacaaaatagggcatggatactgcccacactcggtttcagcaaattccctcgtactaccgccctcctttcacattgggacttagggaggggcacaaaagattctccaaatgccagaggatgctcgaaatatcactaagttgaccactgaggacaactttctgaagtacaagctcttcccaaatgattttgtgctaaagcccgtgaaggagaagaagaagaattccaagccgaactaagctcatgatgccaagcaggagaaagagctcattcaactcaagggtgaggctaagttgaagggaggtgttggggccaaacagtatgctcaagaatattttagagcaggagcagtacgttgaagaatattcagagcaatagaggtcgatcaagaagaagaagaaggctcccccgaccgagcaagcacctgttgaacacgctatcaagattaggcaacctagtatgcctgctcggccatcaacccatgtaaagggaaaaggaaaagccgttctggtggagcaagaagactgtttagatgatgatgctccatctgtgattgttcgagaaaatgcctctgcccgtgtgcagggtactttaacttgcatttacctctcttattttatgcttttcacatattttatgtctgcttctaactgcattgttttatctgtgcagaaatgtctctgaagatgatctacgcctaaaagaagagagtaggagacaactcaggcatgtctcctccggcgaagaagtttaaaggcagtgagactccatccaaggagaaggcgccagttgataaggtcattgacctttccgaggagagacccgtggtggaccttccagttcagaaggtcttgaaatccaagagttccagaggagggagctcggacgggtctgaacaagctaggaccccttcaacaaccgtggcactgtgcacggaggttaagaggggcaaagacatgttctaatactatctgatctggtcacttcccgaagtgagtgatcagctgtccggagcagacatttaactatacttgggactagtcctaggaggagtcctgaaagaagctactcaggtaaatatctttcttttttatttcattctcttttatgtagctctgattttaacacgcttgctgtgcaggtcaatgtgaagatgacttatgcctattctcgagtcaaatcagttactgctaagaaccttgccaccaccaacacactgcagagggaggtggatttggccaaaaatgactctaaggacatgcggagccagctcaaggacgtgaggaatgaacttggggaggtgaacaagaagcttcttgctgctaacaccaaggttgaggagctgaccaaagagctacaagatatgcctttaaccgagcagctggaggctgacaatgtttccttgtctaaggaggtcaatggtctcaaagatgagagggagagtctccagactcttctttccaaactgggataggatgtcaagaacaaatagaccagggaggaggaacttgagaaagaggttagagataagcagtccagggtggaggagctcgagagggaggtggatgttcaggagacagctgctcttaaggttttttatgatttttggaagttcaatcctgaaggaaactttgattaccttggtgattccaagagcatgtatcttgatttttgtgcggctcaggtggcctaagaaaaccccaaggcagctacctctacagttctagtcgaccagagcactgaagtccctgccgctcagactgttgatcctccagccccttcagactaaaacaatccgtaccaagagcctgtcactcttgttgtctgaatgttttttcttttatatatatatatatatatgtgtttgttcgacccataggccttcttttgagatataatgaccgaccaagctgtttttaaacttagaatatgctttcatttttaagacaactagcttatcgggcagcctttaatcccgggtttactgtgctttgttatatttttctaatgaataccattccttgttatgataattatctgtgcaactgtgtttgttttgttttttcgtgcttcttgtttatttttaccaatgctttgtacgagtatagttgtcccctaagtgatcgagcaaacttttgactcttggtcacttccatttcacaagtattatttttgtatgttcggttctttgagttcgagcagacctttgtacgcttttaatggcaaattcataacttgttaataaaattgacacaatctgaatttaaatagacatctttattcatttattggtcgaaatatttttggtaccgtagtaacttacataaaagttattatattgatctaaaccgatctttagcttaattttaaacaaaacaaattgcattaaaaagaaattgtactttcagaggtggtcatccgacctgagtactttgtcatttcatccgaacctttgggtgtggttcgcctaaaaggccatttacttaagagttaatgttcttagattttgtacttagagtggacatctgacctggtacttttactggtagtattttcttaaatgttccccattccaataccttggtaccataacgagtttcatgttttcgtcatacggtcccagtttgtatgcttctgattctagaacttcaaccacctaatatggttgttgaccaaaagtcaatcactcacttattnnnnngataaacaaatatttgattattatt

SEQ ID NO: 121279 - DNA, 1521 bp, Cannabis sativa
gagagagagagagagagctagggttttagacttagagcttgagagcttcaagacttttgagacttaagagaattaggtttagtctaatgctctttatatatgagagcttacaagagaataatgggttaatatcccttaaaactaggaaatatgacctatttgttacataattaaaataataaaccattaatatgttaattaatatcaaagaattggtaaatagctgatatttactacctatttttgtgggttgttgaagccccattcgtagcctgtagtgttgtccaggatgcaagttgcgcaaaaagtgtctgctagggtcaacgctgcacaccaggtgcctgccaaggtcaaggctgcataccacgtgcttgctagggtcaaggttgcacaacaagtgcctcgcaaggtcaaggatgcacaccaggtgctttccagggtcaaagctgcataccaagtgcctgccagggtcaaggctgcacaccaagttcctaccagggtcaaggttgcacactaagtgcctgttaggatgtaggctgcacaacaagtgcctgccaggtttcccacgtgttggccaaccttagcatatgttggcctgcctttgtataactttccttacaatggtcagacttccttggtcgaataggcccttcttagtctgaaagtcaccatttggttggccaagttgtattgatagattgtgtaaggttataatatattttcaataaactcgacccatacaccgactacgggtcgggtctaggtccgggtcccatgcttaggtcccgaatccaggtcccagtcctggtctgggtctgtttcccagttcgggtccgtgccctttcttaatttgggtttgagcccgggtacgggtcctgggtccgtttctcagtttgggttcgggtctaggtccgagtctcaagtctcgggttcaggtcagggtcctggatctgggtgcatgtctcgggtttgggtcccaggttcgggtctgggtcccgagtctcgagttcaggttcaagtccgggtcctggtccgggttagggtcccaagtttgggtccgagtctgggtctgagtctgggttcggatttgggtctgagtttgggtctgggtctgggtccgactttgggtcccaatcccaggactgagtccgggtctggtttcgggttcgagtctgggtcccggtcccgattcttgggtctaagttcaaatcccgagtcccgagtgcaagtcttggtttaagtctgtttcctgatccgggtctgggccagggtttgggtcttgggtccgtttcccagtccgagtttgggtctgggtctgagtgctgggtctcgggtcttggtctgggtctaggcctgggtctcaagtccaagatcaggttcgggtctcgagttccaagtcccagaatacaacttacattgtactaaaaattttagtcgtaatcattagggaaattaccccatatacagttttttttactttttttttttttttttcaaatttacggtttgggattctaaagt

SEQ ID NO: 121280 - DNA, 927 bp, Cannabis sativa
ttggtgtaacctttaccgtctttgctttcttatcgatttttacttagtttttatggctccgcatcagttgaccaaaatctaggttagcaaaaattatttgcaatgaaataagaaacatgtagaaaagattttgaacgtgcatttggagtattgtaatctaaatttgcaattattgctggatcgatacgtctttagaatatatattttttttcatgatataatgacttcatgtattattatgcataatatgatagtagaaaatgaacgtgatcttaatgcatcaattgaatgaaatgccaagcctataagttgagatgatagaagaagataatgctcagttttaagaagttcttgctagacaaagaaaaatcaaggatgttgaagcacacattgagcttgaaaatacattcgttgaatacttgtgggacaaatatatggtaattcacaaaattaatatactttaattaattttttttaagtgtgtgttttaggtttaattttatttaaggggtttttttttgtaatgaatgtaatgtgtttttagtaatgtaatatttatgttactatatgcaatatgatattttgatttattgtattttaataatttacataattaattatgaatatagtgagcttttcttttaatcttctatatatcaatattagtgaggatattatagaaaaaaaattaagatttctcgttcctaaatttatagctattagaagttgtcttttttctcaagtcaggcttgccgacttttgttgggcttaggcgtggcttggtcggggttgtattttcttattgtgattagtcttgtttctgcgatataattttgagtgttttagtcttgtcttagtggcataattttgagcatttttgtatcttgtctctgtgatataattttgagtattttagtcttgtttatg

SEQ ID NO: 121281 - DNA, 2098 bp, Cannabis sativa
cattttattataacttttaatagtataatttactataataattttacagttattgtatttttttaaaaaaaaaaatatttttatagttttttttaaaagtagttcatgtagaatgtatgattttattagcattgaatttatggtatttataattttattattttatttaattatatattagttactttatatatcatattatatgtataatattatgtacatttaatttgtatttacttatactttatataacatgtttgtttttttggtataatataatttaatatacttattattcttttttagacagaatcataatttctgtgatcttatttattttaaaatttttaaccatattaattcagtatttataactatatatattatatatatatggtattgtttaaaatatatttatttttgttagtcaaactattaattttcttttaaataattaactaaatatttttattttaatttattttcttgatttaaactattgtatttctaccctattgatagtttatacatttatatttagcagattattcttacttaatttagtaccaatttgatggttgagttgcgccattattaatagttttggtaacttttaaggcttttgcacctataatatggttggtccctaattatttagggtaatttggttaaaatatcacgatatcatgaattttaaaaatataataaaattttaatgttaataaattatacgttgttctgattttactaattgctatgtaagggttgatttgggctaagttgtaatttaaggaaagatttaaaatgatttgttgtattatttaagatgattaaaggtttaaatggtaataacttatgtattatttaggatggattggaatctaccaatttccaaatagggggaagttttcaaaaattgtattaatcaatttctaaggatatatttataaattaattaagtaaattgagtggcaatactatttagaagggctttaatattagtttggtgtgcgtattccaattcatctatataaacagtaaataaggaaatattaagtcataatactcaaattggattgtgataaaattaattagttcattttaattcaatttatgagaatttatattgtcaattaatatgagttttactttatataacataatattattttggtgtaaaaattataaatgtggagagttcataatcaatgggaggtggtgactttaatagtgaattggggatatttttattctactattggaaaatacttaaataaataagtagtaaaggttaatgagtattgaatttattgttttttcgttgtaaagataaataccaatatgaatgattttttaataaatcgaatgacataattaattagaagattttagtattggttatgatggtggtattccaacctatatgtatagataataaatacgaaataattaagtcgaataagattgtgattattttagttaattttaattaatttatattgactataaatatgatttttaccataaatagataaataatataatatagctttattgtataaataaattataaatgtgaggatttcgtcatcaatgggagataggggacattaataatgaattaaaaaattttgatttaatcctataagatgctaaaataaatggacattaaagcagtatgagttttattatttttcattgtattgaaagatacgaatatgaatagctatatatattagaattataacagaattagcctacttccatcaactattgacagtttgttagttatagtttttaccgttaattcagttagtctattctgttacattagctatcttttagctgatttggtttttgttttaatgtcggttacttttctgtatatatattggtgttcttcttcaattgtatttaagcagattgtattttcttcattcagtaaattaaaagttttttcattctctctttgtttcgtgttatggtatcagagcgagagagtatgctttcccacttctgaccttaatcgcttccgctttcctgcctaagccgtgtcttcttctccggcaatggtggcgctcatccaaggctggtgatc

SEQ ID NO: 121282 - DNA, 1979 bp, Cannabis sativa
aatcaaaatgagatttttaaactttattgaattaaaaaaataaattaattaaatttagatttatttagggcataaaactcaaacattatatgtttaacctaaatagatacgattgacatatttttcgcaaatagaaaaatacagtgtcgccacactatgtcttgtgctctctccttttgcatgtagcacattccctctctttttcatctttagtgagttaagtatacgaaaagaattaaggataccttgataattgtattggattcaatgatcgtttgagtatacgaaaagaattaaggatactctattaattcatcaacttgtataataatcttatttcatagtgtagacttaatctatgtaaatatagttagatctgttgggacttattttactagaatcttaatttactaatcatgtatattaactataaacattataatctaatatcctaattatgaaaattataaaataataattaaacacataaaagataaagatctcttacataaattgcaataaaataatatgagtcattctgttcagtactctaattcttattcaattgcagagtagcaacaagtacgaaacctagcttacttctttcaaatcacgaatagtttcttctacatagtcttttacaaagatttgagtattagtttgaatgtgtgggcaagtactctatactataaaataaaaaattagagagtgaaagagaaagagagaaactaaaaattttcttaagagaagaggaagactttttttattcaattttcttttttgtttgtcaaaattgaaaagtgcaatgtctgtcttgaatcaaagctttaagcctccttttatagtttctcttttaggtttagggtaagtttataatgggctatttaggaaaggagaatagccctaaaaatctccccttggttgaatacccatatggatccaaggggtttgattttgcaatttttatttcatacaatgaaacctctcaatttttttaaaattactattttcttgtcttaattatttaaatgctaattttatctatttaataattataaatagttatcaaacaaaattactatttaaatatatttattaattacaaccataaagtttcttatttaataagtaaacctttctcttttagtttcttcacatgtgcccttccttagtataattcgtaaatcagatatattcttctttagcattctaattaattaactatgtcaattagttgagtctacaaagaaatattatcccagataatgtggggaccatgtgcctatttaatcaagctcctaataagtagatctaaaattaaccaagtaaattttctcacttattaattactcttgactctactatagattcaaaattacactcttgattacatagaatgctctatataccaaatgttgatactctatgattatccattgttttaaccttaatagtcattgatcctctataaacggtttacatttagtggggacaaaatttattattttacccttcattgtattttatccttaaaatatacatagctaattataaatgatcttttagtaaactaatataattattgaaataagagctcttccatttatgttattaatcaaatctctaaggaaactatcattcacttctaaatagttatagaagctatagattctatatttataattaacgctctcactcaattgtactatcaaattcccaagatgtaagtatggacaattcctatgggtaagctgataatgaacaagtcaaagatctctcgaaagcaaaatagaattgtgtctgactcggaggaggaggatatataaccgtgtgtcaaaagaatcatagatgcatagttgtcagaacacttcaaaatgtctcagataaaattgtatgaaggaacaacggatccccaaagataatcaatcaaagtacagccagatgatgtaggtagcaaaagctagtgatgacgtaaagcg

SEQ ID NO: 121283 - DNA, 1328 bp, Cannabis sativa
gctcacgctctcttttatgctcttttgtggtgctcagctataatttgtctatcactcacattgaaacagattgtcttcaattagcaacaaagatcaagtataaatggaaagatccttcagctctctctggtcttatctcaaagatccttgatttcttatctacattttctaatgtgttctttttatcatattctaagaaataataatgtatatgattataataaaactcaagatgcattatgactttataggtggttactttagagagcttagctctccttgcttttgttgtaattgtaacatttgtactcatcatctatgtttctttgtagttacaatttctgaaaaaaatttgggaaagaagggctcgacaaacaatgaatatatatccgtttaaaattgagctattattggttcaagtacagttggactttgatgagggtttaggtaaccgaactcaaccttcacctaactctaagtattctattatattttataaaagttcccactttgtagatttttgactattttcacaattcaaacaaaattaatgtttaaacttctaatataaaatttggttaatatcattactcgttctagtataaattgctatgtctttattcacaaccaaaaaaaaaaaaataattaggttgtacatatattcttaagatttaagactacttgtattttgacaatatttttaacattaacccaaattatagtgtttacatgtcaacctattgttcgtatgtcaactagatctattatactctattaattaatagttagaatttatattacacaattgatttattttataatttttgctgtatcaatttacttgactcattaaagtacaatgtaagaacgtataaagttttaaatgaacaaataaaattaaatgattaataaaaaaaaaaaaaaaaccttcttatcaattaattataaagtgggaataatttatgttatttttcaaagaagggtgtctacacatttggtaccttgtgttttatctaaatccaagtttggtattctgtatttttaataatacttatttggtaccctgtattttaaaattatacttatctggtaccctaaattcaaattgttttgataaaatttaatcaatactatcaatagtctaaaattttatgaattctaaattctaatttatttatttgattataactgagaattgtttggttaaattaataaaattgtattgattagattttattttaaggtacctgttgaccaaggttttcggcaaccaataaaataatgaaagattaaggagctgtaagaaattaagagaaggatttttacgt

SEQ ID NO: 121284 - DNA, 1396 bp, Cannabis sativa
agccagagtgacgttctcgtgtataagagccattcattccgtgggtgtaagggcccaatagaggcttgaagcgggggcgttacaatatatatttgaaagaaaagggaaaaaaaatagaattaaaaatgaaaaaaaaaaaattgtacatttttgatgaatatattataattttaattcaaattcaataaatttgagaagatttgaaacacgttaccacattagtcctctttaattttgttaggaatttattttataatttgtttatttgttagataatttattttgtcaaattatttgttatataattaaaataacaataatttaagttgaatttaaatttaaatataaatattaaaaaaattgaatattccaatttgtgattatttcattaaagatatgaaatttctaatttgttaatttttttcatttatttttaatggtaaagtacataagtaaaaaattcaaattcatataaatgagaacaaatacaaaaacaaaaagtgatttgtcattgtaacaatgcacatattttctaactccttctatagtcttcttctcttattataacaatgcacactcgttaaaaaccataacaaacaaaaataaaaaggagcatatcacaaaaatcaaaattatctttcttaattcataaaagtaatataaaactaatagcaattaagtcagaaaataaaaaattatctactaataaaaccttaaagatgtatacctaagtcaatcaaatcaaactaagacaaatatatgtatggttaaaagaataaaaaaaatactaaagaaaacaatataataataattatagataatctttccctttatagtagtaaaactatcttttatataaccatacttctctttatatatatgtgtattaataaaactacatttttttcagccaaataataataataacactacattcttgtacttacattgacacatggaagccaaataatggaccaacaccataaatttataaagaaatgtgcaaaaataattaattttttttaatatttttaatagaataactatttcttgccaaaaacaataattattatagaaaataagtagactatttcttgccaaaaacaataattataatagaaaataagtagccagtataaccttataatttactcctatttcttgccaaggatcagctctctctcaattctatgtcattacctaactacatatcatagccacaaaatttgccttcgtaccaggtaggttggaatcgccccgataatacatttatatgtcaccattatatgtaagaaaataatcattaattaaatattatttaaaataaatatataccatacaattaaaatatataaaattaataattaaatacagcatgccaataaaattatatata

SEQ ID NO: 121285 - DNA, 624 bp, Cannabis sativa
aaaatgaagatcataactcaggtacttgaataatcttaaatcacttaaataacatccaagaaaagatacttgaatttacaactttgaaatatttttttgggtacattttgatgatacgtattcttagacatatgctatatataatataactacaatttattgttgacctattgcagatggacatgtttcaagttgaagagaaaggattctacgtgaaagtagtgtgcagtaagggagaaaaggcagctatatcactttacaaagctcttgaatcccttacaaacttcaatattaagagctccaacttggccactgtttctgatacttttgtactcacatttactttgaacgtacgtacctaattaatcatctaaataatcaatttattatttcaatatgtatagttaatgaattaatatacaatttcatatgttggcctgaaacaggtacttattaataaagaatgtcatgatcaacgggaacccatgaatttgccaaatttgaagctttgggttacaggagcttttattaaccaaggatttgaactcaacacagccacacccttctaaatcagctacatacacatctgctttttatttatataaataaataaaatttctatat

SEQ ID NO: 121286 - DNA, 3834 bp, Cannabis sativa
  modified_base (35)..(35): a, c, t, g, unknown or other
  modified_base (93)..(120): a, c, t, g, unknown or other
  modified_base (3777)..(3793): a, c, t, g, unknown or other
attcatacattatatgtatatataatcatgaaatnaatcatgtgaaccatggaacataaaatgttatttgtgatctttattaattagtaaatnnnnnnnnnnnnnnnnnnnnnnnnnnnngggcataaaacccaacactaataacctactcccaagaggctccaccaatagaggggccatcttcatttgtgtttggttcgatttcgaagaatctatctaaggagaacagaaggaaggtttcggtcaagaaagattcaaaaactaagaaagggaagaatggaggtacaatggagaatgtttctcagaaggaagattcagcagccactacaatcactgaagaggcgaaccctgcaattcagggtcgcctacagcaatgaatatcctgctctggaacgtccaagggctggggaacccttggacttttcgttccttaaactccctgatgattcgttacactcctcaattggttttcattatggaatccaaccttaacaaagttcatgcagaagctttgcgtgtcaagttgggttttggtgggtgctttgtggttgaagccaaaggtaagagcgggggtcttctttttctttggtccgaggaagttgaagcccatgttctctctttctctcctttccatatagattctttcattagaattgaggaaggacagtggtggaggtttactggtttctatggagatccggatccaagtcaacgtactcaatcttggaagctgttgaacaggatttgccgtatgtactcggggccgtgagcagtgggtgaatatttcaatgaaattctgagccaaaaagaaaaaatgggaggtcctcccaaaccagggtaccttatcaaaaacttcagaaaggctctggacgcttgtaaactttgggagattgtgtttgaaggtagtgattacacgtggtgtaatgggaggaagaataatctcattttcgaaagacttgatcgagtttgtggtaactcgaattggtttgacatgtttccctttgctcaagtgagtcatttagagcgaaccaactcggaccattgtccccttcttctcacggcaagtggatcttctcctatgacaacgaataagattagatggggaactcaatttcattttgaaagtgcctgggcagatgatgaagattgcacaaggatagtcaactcggcttggcaacacaataatccaattatgaccactagggaactgaaagataagttaggcagatgtggggaggctcttcaaaagtggaatagagtaaagtggaaggaaatgacaaagcagttgaatgaatatgcagataaaatttaaaaactctctcgaagtacagatgtcacggaatggcaacaattgaatgaattggaacaaagacaaaatatccttcttgacaaggaagagaagttctggaaacaaagaagtagatctctttggctgaaaagggggataaaaacacgaaatttttccatcggaaagcgagcaatagaaaggctaagaataccatcaaagggctgattgataataagtcgaattgggtgacagggaataagcaaatggggcaggtggcttgtgagtactttatgagcttgttcacttcgaattcggccaccccggaagagctagaagagtttcagcggattgtcccaaaccgcatctctagagccactaatgagtatatgttagagcccttcaaggtggaggagatttataatgcaatgcatgtcatacatccccaaaaagctcctggaagtgacggattgcctgggttattttatagaaaatactggccgactattggtcatgaggtgtcaaaagtttgcttgggaattctcaatgatggtattaaggtggaggaaatcaatgatacccttatttgcttaatccctaaggtccctaaaccgaagtgtatggcagaatttagacccataagtctatgcaatgttgtatataaaatagtggctaaatatcttgcgggacggatgaagactagcctccatcaagccatctcggaggaacaaagtccttttgtggggggtagactaatccaagataatgctgtgataggatttgaaagcctccattgcttgaagacaaaacgattcgaaaatggcaagaaaatggctttaaagcttgatatgtcaaaggcctacgatagagtggagtggagtttcttgattacaatgatgagaggccttggctatgaggagaagtggattgagaagataatgagatgtgtgataagtgtgtccttctcggttctaattaatggggagaaaattggaagattccaacctacccggggtcttagacaaggtgactcgctatccccatatctctttttgatttgttcagagggtctttcctgccttattcctgaagccgagagggctggaaggattaatggggttcaatttgggagtaatagagtcaaggtctcgcacttattttttgtcgatgatagctttgtgttcctagaatcaagggagaacgaatgtgacaatatgaaactaattttgtaacgatacgccaggctgtcgggtcagcaaattaaccttgaaaaatcggaggtgtgtatgggaaagaggattccaactactcagggccatgctcttgccgctagactcggggtgcgtcttgttcctcatcatgctaaatatctggggctgcctagtttcgtgggaagaaagaaaaaagaggtgtttgagattattaaagataaagtgtggaataaactaaaggggtggaaggcctcgatgttctcccaagcaggtcgagaaattctaatcaaagtcgtggtccaagcaatcccaagctatgttatgagctgcttccgtcttcctaagaaacttatcaaaaacctccataccatggcagctaatttctggggggccgatacaaaagaaaacaagaaacttcattggacctcgtgggataagctttgtaagccgaaggaagatggagggcttggctttcggagtttaaccgaatttaaccaagcacttttggccaaacaagggtggcgtctcattcataatccccattccttgttggcccaggtcttgaaaaatagctatttcccacttcatctttcatggaagctaggtgtccaccgggggcctcttgggtttggaaaggaattatttggggccataagattctcagcgaaggggcaaggtggcgtgttggtaatggaaggaaaattagagtttgggaagacaaatggttacctcggccttccggagcgattctcactcacaagcctagagtggaaccgaacactaagctacatactttcataacagaggaggggacttggaaaatggaggaagttgatcaacattttcatagagaggacatcccatggatctgaggtatttcgatagacttatatactgaagacatattgacttggccttatacttctaatgggaattatatggtcaaaagtgggtatagagttgggagggaaatgaatcttcatcccacgagatgctcaaatatgggagaagttaataaatggtggaaaatgctttggagtttgcagctgcctccgaggatgaagctatttgggtggcgggtttgccacaattggctgccagcaaagactaacttgtgtcatcgacgtatgaatgtcagccctgtttgtgatctttgtggaagtcatgctgaaaccctccctcatgcattgtggaattgtgataaagtaaaagttgtgtggaaactacttccttggtataaacagtgtgggaagttgggtgtgttggatatattttaccagnnnnnnnnnnnnnnnnnaagtatgtttcattaacatcataatatgaattctaaaacaa

SEQ ID NO: 121287 - DNA, 1072 bp, Cannabis sativa
tgaaccgaaaattcgattatggtctcgtcgatttgatggtcggtttcaatttatcgatttttatgaacacccttaccaacaagggcttgttcccctcctcctttcgcatgtacacatgacgggcacgacctatctcgagccttccatttcttccacctcccaagcttgagagtggggctttctacaccatggtccacaagccacaaaaaacaatacacctttttattcgacacatgccacatgtcatctaattgtccactttctctcatctttagccaatcaatgattgacacgtggtcgaggttcaccacatccaccaatctgagcacatcatgtggcactctgaaattaacttatgtgtatttatatatttaatttctcatgtaatttgtaataagttcaaattgcacattattcattttaccttcctataaatagaagcttaggtttttaaaatttagtgcagttttagacagagaaatttagagaaaatgctctaagcattcaatattagtttatcgatttttcttaattaattttcttatgggtttctaaattctcttattattaaggtagacgataaattttactgtatataattaagtatttatttttatgttgattctcagcattatacatatgttaatgatttttgcttttttaaataattttgttcatcattaatatcatgtgtttttgatagttaaaaattattaatgtttgattttttattttatattaaaataatattttttttttgattatctatacttgcattaaattgtttcacatttaatgtctagaagttataattttaaagcgaataaaaatctatttttgttagaaaataattagtttgattactaattaattatgaggatcaatataattataaatctttctatatacacttaggtggaatctaaaatctgaataatttctctaaatatcattaaaaatacctgttacttgtcattttcacctattaaaatattttacttataagaatatttttatttaaagaaataaatttctatttaaggaaataaataaataattgattttctgataa

SEQ ID NO: 121288 - DNA, 1581 bp, Cannabis sativa
ttacgctttatttgttcctttaattgcatttcactaattaactcttaattagcttaagtaggattataatcctactctaatacccacttaatcacatattttttagttaattatcataataattttttaagatattacaactatcccctccttatagaaatttggtcctcaaaatttatctaaacaacgcgagataccgctcccacaattgcgactttaattcccaagtcgcctttaatcttgttgttcatcctcagtgctttagctaacgatatagtctttatttcatagtacttttacttttctcgttcataacctgaattaactattcctcatatgacaagtctattcaaagttccatattttcgtaacttggtatacgaatcgtatctgcttcatacctctgaacattgaaatacaagttgtgaacttcaggtaaagcagggagtatggctagctgataagttacctaacctccactttctagaaactcaaacggatcgatactcctggaacttaactttcctttctttctcaatttctaaattctcttcattggaagcacctgagaaagataaaattcccaacttggaatttaatatctctacactttggatcagcatagctcttccatccactctataaagcaaacatatgaactcgaatcttttctatttcctcactcgttctttagaccgcatcaggtccaaggttcctccattcactaacttcattccaatgaatgggtgaacgacatttctttccataaggcatattgtatggtgccacatcaatagtactccgataactatgattgtatgaaaactcaatcagagggagatgcttattttaggaacccttaaaatctaatacacatgctcattatagactctctcaacatttggatgtaaactttaaatctcaatacgagataattacttttagggcaccacaggcttaaactatttccttgacaaaaatattagcacaccaatctgccataaacatattctactctgataaagaaactatactgactttatatatctatccctaattacccagatagaatcatagaaccctactgttcttggtaatctaaccatgatgtctatggttacttctttccatttttactcaaatatctttagagattaaaatattactattggtttttgatgctctatcttaacttgctaaaaatttggacagttaacacatacttcacaatgccacctttcatacctagtagagggcttaaacatacattgtgatacatacatctttagttgctcctgggtgtaaagagtatggtgcaatatgagactcatttagaaccttctgttcgatatccttattgactggtacacaatccatgtctttatatcataaaattccttttgacaaaattgaaaagtcctttgtcgatccggttccaagtctttctttgtaccggtgtagctcagagtcaccttgatgggccattttaattctctccaatagatcaaactacaatgtgatattaacaagttctccaatcacgaactcaatccccgctctggttattgttgggttttatgc

SEQ ID NO: 121289 - DNA, 954 bp, Cannabis sativa
  modified_base (525)..(528): a, c, t, g, unknown or other
tatataatatatgtggacatatgtaattgtgatattgtttcgtgcatatatatatgacagtactataattgatttgccactgtattattaccttaccctctaaactagaattctttacagtggtactgcacatgtgtccaaatttaattgaaatttcaccaaaattaaatgtatatatatttatattgacttttttttttaatttctatatgtatataaaataaaaaattaattaaatgtttacaggtactgattcataaaaagttcattgactttttagtcttttattttttttaacagtacctgcatatattactttttaatgagtactcactgttatacttatatatatatatatagtcttcatcccttaattattttattaccaaacacacatgtacacatgaacaaaatcaggggaattagatcattattgttcacaggaaagtatatatacatatgtatagattatagatatatcactcacacatatacatatacatatacatagatatatatatatannnngagagagagagagagagaggaccctaggtctagccgaattatcaacatcttctgaatctttttgtcatattctacagaaacatggaattgttctaccctttatctcatgaaatttcagcatccatcgatggagggaccccattctgtgttccacacacaactagtaacactctctcatgcataccataccccacaacaataaggacaccccccacacgctattaattaatttcttcccccttgtattaattctcataataataatgctagctacaattatatacatatatatacatacttgtaggtaaggccccctcaaaaaaaaataaaaaataaattagcctatagtacaccccttcaaataatgtttcgggaaacttttcatttgttttaacatttagtagattttttagttttttttttttt

SEQ ID NO: 121290 - DNA, 1296 bp, Cannabis sativa
tctggtgtcaggtagtctcggattgaagggtggtggctgtgtgcactcttggttggggtgtcagcacttacaggtgtggtgcctccactacttgtacattctcgccttcagaacttgcagagggcatggttgtacatatctcacatgcacgccttgtccttgtgattgtactcttgttaccttcatttcccttacttaggaaaacttctttaagtatagttatgttgttgtggaagtagcatgttgagtggcaagcatgaagtccatgccgagtaagtttcctcaacacttggtcaagtgaattttctctatgcttgactgaatgactctccaaggggtgtggccgagtcaccctcaagaggtatggccgagtgaccttcatgaggtatggcccaaggcttctttgttgtgtgggtcttactcgccttgcacctattttgtgttttgagcataactttctcaatattaatctgatttggatgattcatgttgccatagaaagctgagaaagatttctacaaagctgagatgttcttgggcgagtgacattttattgtcttggccgagtgacttcttggaaaccttggccaagtgaattccttgaagccttgtacccctttcgtattttgagcataactccatcaatactaatctgatttggatgattcaagttgctaaagaaatttgaggaagagatctacaaagttgagatgtcattggccgagtgacttattggaaaccttggccgattgacttccttaaagccttgtaccccttctatattttgagcataactccatcaatactaatccaatttggatgattcaagttgctatataaatctgagaaagagatctacaaagctgagatgtccttggctgagtgactacttggaatccttggctgagtgactttcttgaagatttgtacactttccgtatttttagcataactccatcaatactaatatgatttgggtgattcaagttgctatagaaagctgggaaagagatctacaaaactgagatgtccttctccgagttacgttttattgtcttggctgagtgacttcttcaaaaccttggtcgagtgacttccttaaagccttgtacgtatgcttgaccatgtgggccaacaccatgtgatcatgaaccgtgcagtggccttcctcattactctgaattagccatctcgtgactaatacttaaagctggcctcttttatcttttgagttatcctttgactaatctcgagaattagccttgttaatttttgggattaacacatgcctccgta

SEQ ID NO: 121291 - DNA, 946 bp, Cannabis sativa
attcatctctttatcaagtaatatgttgcttgcttttaaatctcgatgaatcacttttaaccttgaataattatgaagataaactagtccttgagcaatccctccaataatgttgaaccgtttttcccaagtcaatgaacactttcttctttcatctaaacaaacatgtgaatctatgattcagcctaaacattctcatattacccagaatagaagaatctttatagaagaggaaaattaccaaagagaaaaaagtctaagcttttgttaggcatgtactcatagatgagacttttctcctctccttgaatacaaaatcccaaaagcctcacaagattagtgtgttggagtttggcaatcagtaaaacctcattcttgaattccactagcccttgccctgaacttcttgataatctttttactgctacttcttgtccatctataaatttcccctgatttttgcaactttttcatcagaaacaagtcaaatggtataattatttatcctaaaagtgcaaagtaatcttttttaccttataaactggtccaaagccaccccctcctagcttatttgatgcagagaaaccatttgtggctgaggaaattctttcaaagctgaataactgcaattcattcgcatccttatgacgtttaccagcttttccaagttcttgcaataacaaagtatgttcctttctttgcctattccttttggccttacattttttcaacagaacatacaatgaggatatcaccaatgggaaaatagctgttcctcctgttagaatcgtgagccatatccaccacattccaactgcatgaatggaccaatcaaaattgtaaggctaattagtaattttttcccttgaactttgagatgtaccaaatcgtgctcctgaactttttttgccgttaaaaattcccaccgaactattgagattgttaa

SEQ ID NO: 121292 - DNA, 847 bp, Cannabis sativa
aagtatacgtgccttgcacgtaatcttcttctagtaacttatataagtatatatatatatatatattaattattgtgaaatttaaaaaaatatcttttcttaaaattattaaaaaatttataacttaaagtgtttatttacaaaaataaatttagttttaaaattacaaattaaaaatacactttattattattgaaaacaactaaaaatcaactttaacaactatacaaataaactataaaacaatcataaaaaaataaaaaatattttttttttcagcattaaagatttttgtaatttttttttaaatttttaatctgtaaatttttgttaattattgaaaagaaaaattaagcaattaaattagttgcgtatataaaagtaaagtgctgtcgtatctttcttaattaattaattaagatccattaattagcgtcatacatatgtaactatctgttgtaatcttctcaatttctctttcactctctgtattattctgtatatatatatttctttgtattaccaaaagtcatcatataataataattataataagatagcgatcacaaaatatctacaaatttttttttgtttttacttaatttccttgcatagcattgttgacttataagaaatgtcacttttgccagtacatttttgtgctggcaaaagttagtattgcgctggtaaaatagaatttacctataatatgttagcaaaagggagttgacaaatcaatattagtattagaactttggccagcataaaatgaaaagtattggcaaaaaagacttttcccaacgcataaatgggctggtaaaagttagattttaaccactgcaaatgt

SEQ ID NO: 121293 - DNA, 911 bp, Cannabis sativa
tgtatactataataaaccagtttcaagcattagaactcaacaattcacacaaattctcaattcaccattagagagctagttttgacttcataaactctaactttgcccaaacctcaaatcaacctataatttcagttcaaataacgttaaacaacatcacaccatttccagaatacccaactaaatcatcttcaatcatacaacaacctataacctaaactcacaaataaaacctaacttaagttaagagaataaagaaggaagaattaccttggatcaaaacttgaggatttcaatcactatccttgaatcaatagtgaacaacacaattctagctgctccccaagagaatcgaaagagagagagaattaaagagatgaatgaatattttctctaatttctttcttttccttcaaacctaagtaatatatatctttctttcttttctttatttttttttattaacttaaactcagcctattataatccaaataagacaaaagaggtctttgccaaaagaccttcttgcccctccatcaaattaataattaaaaccttccaagggtaaattggtcaattaccaaaccccaaaaattctaacgcctctaatatctaacaatgatactctgataatattcttatacatataaaatgtgactctttaaaggcccaacgtcacttcccacagcttcagagcacaatcacagaaattaagaaattcacataaaatagcataataaacatatatgacataaaatatatttccaaaatatgcatttcacaaatattaattaaatctcatgcttaaaccctaattagttaataacccaaagtattaatcataggcggtctttaaaacgcgttagattcctcctcttttgcgtttagaatacttcttttcaccatatttt

SEQ ID NO: 121294 - DNA, 1953 bp, Cannabis sativa
tagatacttttgtgtatgcatgtatatatataataaataggtagatagtggcttatgccagtttttcattggatgattacatttataaatttatatataaaaaatatgtgagaagcacaaaaggaataaatcctcattgattcggaataaagcaatagatgatattttggtattatatatatatagatatataagaggtcggccaccaccccacaatatgtttcttctttggtttaattaatttaattattatgtatttgtcctcaaacgaaaaagagtgcatgtctaattatctataaaacctactttaataataataatctcataaacgaaaacgatgtttggaaaatacaaaggtttaattaactttgagaagagaatgacttaaacggtggaccccctaattcttgtccactaccctaatcatgccaagtaatgccccaatatttttctaccttttttgtttggtgatacccaaaattcttaaaacttaatcataattttattatgctttatttgactgatttaacgcgttcttaagtgggatgttatactattttttttttctttaaaaaaaaaaaacttttatattaattatggggtgggggtaggggacattttcttatttattaatcataagggtttcactgaatcctaacccatttagacaaaagaaaaaaaaaaggaagaagaagatatagttcatgcttcatatagtgtaatgatgacgacaacaaaagaaaaacgagtatgtaactaatgttatttcaatgtatattagatatgtatggccatttaatcttaaatttaatattacatttgacacaacatttaaagttgtggttcatcagaaaaagataaataaaaaacatttgtaattatgttccaatacacaatagtatttaagtaataacaacactgtaattaaaaaaaatgtgtattaaagattatcatttataattattactattattattagataaaactataattaaaaaatagtatttattattatattaaatttgttttttttttttggaagaattatattaaatttgttactttattatatcttgtactaaactttgcatagtatgtgtcaaaattcaaatttggtccaacctccattttgcacacaatttgagagttaataaactaaaaaagtataagaatttaaccctgcaaggtgacatctctattttagtttttcatgagagatcctctaataaaattagaattaaaccaaacaaataaacttttatgtatttactgcaatagtagacctttgccacacgagtcaaaattttacaatgaacctcaaagtcatgtattttatgtatttatcacaatagtaaacttatattgtacaaaaaccctaaacatgtcacatgtatgccgagattcaaatctaagcccgtaaaaacttttttctatcccttcaagtaaggggaccgagaaacttttaggttctctctaagcttttttcttctaaaaaaaacctagagagaaaaacgctatagcaagaattaaggtttcttcaaattgtaagactcatttataatacatcaagccttcttaagccaatacattgactcgtgcactagagtttattaatacctgaaccatgtaaaaaatattcatcctttttatttttaacaaccatttaatttcttaagctgttataaatctcgatctatatattagaatggtattatttatttttttgttttttttgagtaatgaatgatgtgttttagtaatttataagaaaataattattattattttcttaaaagaaattataatttagaaaagtttattttctttcaacaaaaataaaactgtcattattattaataataattttacactgtttttaatttataaagtatgatgtctttttctcctagtatttttttttttttgaggaaaatacctgttattataaattaa

SEQ ID NO: 121295 - DNA, 928 bp, Cannabis sativa
ctcaaagatcttggcaatctacactactttcttggtgttgaagtccaaaacactccatctggtttacacttatctcaagcaaaatatgtgcgggatcttctcacaaaagctcacatgctcgatgccaaatctgccccaactcccatgacaagtggccttcgattgtctggttttggtagtgaaccagtacctgatcctcagctatatcgatcaatcgtaggcgcacttcaatatctactcattacacggcctgaaatctctttcagcgtcaacaaagtttgtcaattcatgcacaatcccctattgactcattggcttgctgttaaaaggatacttcggtatcttagtggaacaatatctcatggacttcacctcaagaaagctcctcttcatgaaattgtggccttttgtgatgcggattgggccacggatcctgatgatcgtcgatcaacctctggttttacaatcttttatggtcccaatctgattgcctggcagtgcaaaaagcaacataccatctctcgctctagcaccgaagctgagtatcgaagcttagctagtacagttgctgaactcacttggattcactccttattctctgagttacacatttcacttcctcagccaccaataatatggtgtgataacctcagcactgtccttctaacggccaatccagtacttcacgcacgcacaaaacacatagaacttgatctttactttgtgcgtgagaagatactgcagaaactagtccaagtcaagcatgttcctgctcaagatcagcttgctgatggactcacaaaagcaatctccacaccacggttcaatcaatttcgtaccaagcttactattgaagacatctctgttctcatagatgcttccaataataagcttgaggggccgtgttaggggtattagttagttagtt

SEQ ID NO: 121296 - DNA, 636 bp, Cannabis sativa
aataaagtgtagtgacaagatcaccaatattaatggaaacaacatggttggtttggtcgtcacaagtgatgtacaaccattcgcaacagttttgagtggtggaccaggagtagaaataaccttcagaatcatttattcagttatttgtgaataaacatattttcatgtgaaataacataagaacaagaatcaaaattataaattttgtggtacataagaagacccattaagtagaacaagtaacaactcaattatatagcttatattttggggtcggataataattattctgtaaacattaataactttatataaatttaagtgaaattgatatactatttttctagtctagtctatgatcagtttagatttttgaattattatggttaaaaacaaaaaagtttagagactgagagcttgactcatgacttgacttgagtttatgtatataggctttagtgttagtaatgtggagaaagtttctatctaatataatgttcataatcacatgtcatgatcatacacaactttcgaaaattatgtgtatattgatttacatatatatatatacactacaaaaaaatagctgattttagtgataattttttagtcacaacaaaatattacttgtgacta

SEQ ID NO: 121297 - DNA, 1033 bp, Cannabis sativa
atccacataattattaatatttataacaatattaatgtggtatttatttctaaattatttattaatttacaatttatgagagttgatattgaaatacactattaacaacagcatgctatattttatggtgcttgacaccttaatgtgactcttaatattttcattattaatatgtacatatctttattaacttcgattagaattttaaagtttttccttaaagtgttcaataacatatcgaagtggtacttaataattaattagcaatttttcaaattatttattaaattaaaatttgtgggagctataatatgaaaatacacaaataacggtatgataccttttggggtgcttgacatcttgatgtgcctcttaatatttttgttattaatatatacatttctttattaattttttattaaaattttaaattttttccttaaggtgtgcaataccatatcgatgtggtacccaatagttgattagtaattttctaaattatttattaaattaaaatttatgtgagatgatattgaaatgcactaataaaggttgttattttttgtggtgattgacatcttaatgtgtccccactactatgaaaatagtttttttcgacgattttaaacagtcgtttaaagtattcccgtcggtttctataaccgtcacttatacgaccgtcgcaaaataggcaacggttaaaaactgtcagtaaagtggacttcctgaaggtttaaaatcgtcgcttataacagggtataggcgacggtttaaaactgtcgcctatagtataaggcacgatttaaaaccgtcgcttataccctattataggcgatagttttaaattgtcaaaaatgtaaaaaaaagagaaaaaaaatactgatttttttgccattaatggcagaaaattctgtattttctcccttctttttcctgaattagttttataattttacctaaactaaaataaaacaactaattaattttattacaataacaactaactttaaaacacattaaatttatacaataa

SEQ ID NO: 121298 - DNA, 1663 bp, Cannabis sativa
ctgtactttgaattcttatttgagtatgtgaattattcctagctaatttcttgaaaaagaattaaaaatttctgtaactacattatatacaccatcgtgtaagaaaaaagagttgcaacttatccatatgcaaatactgttatcaaagacaaaataatattttgttaaaggttataagccacattaagtttcaaattggtacaagattcttttcctcccaaagcaagtaacaaataacttttacttgttagttgatataactataccaaatactcattttctttgtctgaaagagaaggcaaagcatctttgttaagggtcctctactaataaaataaacttaggaggaagggacgaaatgggattgatctttcttttcttttttgttttttcatatttgattaaaaatgaccaattaggctagctatagttgtttactactcttcataaaaaggatagtctcacgactcattttggcatataatatgtaaatatatatatagtttttgagccttaacagtgcagaatctaggctatatatttataaatcgcacatgaaatttacagctcattttccaaacttcagggcttcttctaagttctgaagtcaatattattcacacagttctctataacccaataacaatataataatatattatataaaactatcaaatcttccatgattttactatatattactaaaatttgtcagcttatctttttgagaacgatgtttctctctctctctttgtccatatagagatataatgcaaaaaatatcttatctcagactactatagtctacgagttacgattattctatagatgatagatcacatcattttctgccctttttttcttcatattttgaaataatattaactctgccaaaaatttggggtctttttttccaaaaaaattggttatgacttattattattattcgataatggacttgattcctatatttaaaccaactatatttttacttactttttttatatatacatatttttaactttacacaagctgttatgttgtttttattttgaaattatgcagtttttattttataaaattatttttgtttctatgttatactaggcaagatagtcatttttcgggcggctagtttaattttttttttaatattataataaatagttacttaaaaatataatactaatatataataaagttataaatatattatcttatttcatattattataaataatttatttattaaaatctgcacaattttattaattattatttagaattatttattaaaaaatttaaaatttattatatgtagtattttaaattgctttgttaaaaattttatttttataaaaataaataaataaggtggtatagaaaaaattacggcgtttctcataatgcattactttcatatctcaatcattcaaaactattgtcattattgtatctcacttgttgtctcattgtatctcacttattttcatcaccgtacgtatctcattgtatctcactagggctaacaactcgtgttatcgtgtcgtgttcatgtctacacgtttataacacgacacgtttatggtgaacacgaacacgacaagattatttatcgtgtcaagtgttagattaaaactcttttgtgggcacatatgtataa

SEQ ID NO: 121299 - DNA, 3467 bp, Cannabis sativa
  modified_base (701)..(704): a, c, t, g, unknown or other
tactcgccattctaagtgagtactcgcatatctattatttggtattcaagcagctcttgaatactcgcacaaaactggtgttgtcgaaatttgcttgacaacaatctctaaaacattaaaattctttatttagtggagtttgaatatgttagatattcatccgtagtgaagtagcaactgcgattatttgtgttgtagttggatgggtggaatatgcatgttagaagagtttgtaatttacatttagctattaatttgcatatttttgtatattctaatgtatgattacaaatttgtgtgtgattttatatcatggaaccaggtggggacgatgagtggagtgctctgttagattatgatggtgatgatggtccatccatgccagaaggatctagtgttgatcctgaacaaccatccatggaagaagaaggtagtggtgatcctgaacaaccaacacattaaaatactggcgggagaagaaaacgaaacgatataacaaaaatggttagcgagggaaaaaagttggaggttgactacagcaactacagacaaaactggggaaagggagcgaatgtaaaagttacccaaattggagcatgggtgcgaactaatgttccactttgagacatttttgtctagagtgagttgggacattaaaaacttattatggcataacataaaggtaaaattaattctattannnnagttctttactattgattataatttgtacttataattacgattgtcaatttggcaggccgcgttcgatgaaccgaacacagataggaaattaacaatttctaaaggctgatagaggtggaatgattggaaaattaccctaatagaagatattttacaatcaaagatgtggctccccatcttctcgagaagccaccgaaactttatgaaaaaataattaatttgcaacaatggatagagtttgtggcttcgagattaagtccaggattgaacgagaagaggaagaaggcccaaaagagtagggcttataatatttataaccatcgcagcggacgaggttgtgtaataatggttcaagaacaaatggagaaagaggcaggccgccaaattactaaatttgatagatctaaaatctagaaaagactttacgcgaacaccaaaggcgaggtggagggcccaacatgcagaaatcattaaacggattgtaagtttaaagattaatttcatttgtattaattgttatgtttcataatttatttctaactctattttttttataggacaaattttgtaagcaagtggaagagggtgttgtacaagtggaaggtaaaaaggacgcgttgaccatggcactggggacagatgagcatggtggctaggttcgagccatgagtttcgacgttacccgaacaaaatatttcaacacaccatgccttaaaaggaaaaacaccgattggtcgaaccaggcctcatctaatttggagagacgcgtgcatgagaaagagggaagcaacagaaagctgcaggataaagtagcaaaaccactgggtcctgccaatgtcttctctccaccagcatagcagcgttgtctagtttcgatgttggaagagcatcaaatgaacaaccccatgttgaccttgcctccgatctagtaccacaaccattggatcctgctaaagtcttctctccaccttattccatagcacaaccgtcaggtgctgtcaatgtctctactccatcgccatcacgttttagagaggaaatcgatccagaagcagcaccgccacctactggtggtagttcagaagaggtaatcttaatgttttttttacgaactaatctaatgcgaaattataaatatggttaacttacaaattggattgtggcttgtttgttttggatttacagaccttacattgtcaacgagaaatatttgaaagattgaaagttttccattaacatggatgaatacctacaaaaagattatcgtcgggtatttattgaagaagtgaatgcagagaatgcacttctcccatgtctgatagccgatgattcattgacaatagtaggtcaagctataaaatgttatgtagcatggttgaaagactatcttacgccttttggaaagcattttgtgtgtttaaatttgtttacttaacttattatgtttattcattcatgacattgctaactttactgtttttttccatatatagagacacaaccaccaacaaagaaacttcagaagcaacccgtgaaaagaagcaaaaaaacctctgaacacttactcgatcctccaacacagcctccaaaacaacctaggaggccgagtaaggcaaaagttcatggtcgttttgtcaaaccacgccaaacatcctcagtcattaccttctgcaactccatcaaaaggtcgcccaagccgtccataatccaattccaggttgcttatgaacttttcggggtcgaagattactctatttggcttcttaaaagtgacattcacaaattgtgcaccatgcaatacttgggagcccaaccaataggagttttgtgcaagtataatttctaactctaaataataaactagataattttcttttgacatggacaattattaattatgactttttatcaggtacatgaaagaaagactggtggacattggtgggctcaatcgactatatgaatttttgaattcaggtgcgattcccactgatgcaggggctgatgtaatcgttgtcaagcactactcactcgaatgactagtatgactaatttagacaaatggcttattattctatataataatcggtatatgtagatttaatataaataattttagtattgataactctttagaaaatttattattatgtatatattaatagtttcacacatatttttttgtgcaagaagatgtttcattagatgcttgtactcatccaaccaagtacgcagacgatagcatacttggactgaggcaagagcgacatactgaatgatatgaacttcatcctattcatgtaagttctatatcaaacattccaatatgtaagcgtgttctacatttataaatttatatatgctatttaactttacgatatataatcgaatgataggatgacctgatccacctatccagtggatgactcctatctgtcctgaataacatgatgacaaacagcgtagatactacgacatgaaattcattgaaagtttcatgaccgtagaagatccaatacaactactgaaatgacatgatacgttctccactgcatacaaaatgatgagataaatactatgcgtgatcggtggattcattacgtgaaagcagaagcggagcgacaacagttaccgtgtaaatcagtatgtatatatctcaatttattattactatatagatttgtaaatatatttagattattattgttgacctcgcttttagcaaacgacaatgagtctaattttgtaagcgacaagtagtt

SEQ ID NO: 121300 - DNA, 1088 bp, Cannabis sativa
  modified_base (1022)..(1058): a, c, t, g, unknown or other
atatgctatattacatacactatatatatagtctaacactggacttatacatcataactatatattaattgcattaaaatttaaagcaggtataggatatatatagttggagttgctcagctatgtttgttatcttcccaccaactttaaataaagtaacattattgcacccatattttatttatggtaaagacacaagagattttttcttaaagtaggaagatcaatacttgtccccccattacaacctcatgattaatccaagagccaaatctttagttttttctccatggatttaattatgcataaattttgtatcattattattattatttatcacaattaacttaagtaaatatatacatttttacaatgtaccctgtaattgttagataaatagtagaattgttcaaacaatgattttcagtcatttaaagctaaataattacattagaacaagattatatataataatacattaaagcttgatcaaagtatacatgaaataatcataatatataataagcgaaaacagaataattttgggtaatgaactctgaaatctcagctcatttcaatatgagccagagtcatggtatttatatataaattctggtgtaaaaccagtacaatgaaatacaaccccaaacgactattccttacagttgtcagcaatacataggtgaatattctaactgaatgatttcctaatcattacaaagataatgactaataacagaaagtgacagcacaccaaatacaatatacgcacgagtgatattctacctaacaatcgtgtacagcaaaacacagtagcaattggcgtcacagcaactgtcattccttaacatcttccctcaaacgaaagggtgaaattctcacaccgagtttgtccacaaggaatgagaatcgaaagtgtgatagacttttagtgaggcagtcagcgacttggtcatgtgatgggatgtaacaaacttcaagctgtttttgcaggactttgtaatccagattattcaatatcnnnnnnnnnnnnnnnnnnnnnnnnnnnnnnnnnnnnntgttttggttcaccttatcaattgtttgtc

SEQ ID NO: 121301 - DNA, 1237 bp, Cannabis sativa
acatatcatttaactaagagaattcaattggaattttaaaatcgaataaacgagctaggagttataagcgtatgagggcccaaaaaaatgaaaattctctcttccccttatccggaccctcaattgggaaccagacgactggatgggtcagttcacgcttttgattccaacctatcgatcagataagcgcagagttgcatatgtttccatgcccagcatctaaatataactagttttctcccaaactctatataaactctattctctctcaaaagtaatggttggctgagaatttattacatataccaaaatctttcaagtgatttcaagagcttcctagtttaaaatccaacaaaatattttttacacactttgagataaaatttgtatttattttttctaagtgtgtttgctaatcactctaaattttttttattgtattattacatttttagagtaattttgcttgtaatcataaacatatatccatatgtgttgaggtgaggttggcactggtattgtaaacaacccaattaaagtgagatttgttagggtttataccctgaaaagcctgtaaagacatttatcattatttataatagttgaatattttgatatatgtatgaatgttaaattattaatagttgatgttgaataatttatatataaatattgaaaaattctttattcataaatgaggttgtgacttatgttgttacaaagaattaagatcacttagctatgaataaaacagtcaacaacatattatagtttaggaatctttaatcaactgtggttcactgatgcctgttattcggtgcaagtaatctcaattcggattactaatgtagtatgacatctaagtaaatgttttgtatataataaagattatatataacaatgactgatatgaataaaattatatttatcaaacttatcgtttattataaagacctaattcatatcataaaaatgaccaattgtagatcgacctaaattttgagtaatcatgaattccttttcatgttattagtttctttgatttactcgttaaagtttctcatagaatatgattcttacaaatcagttttgggaatctaataatgtggatgcatggttaggaacataatctacaaatatggaatcctaattttactaacagatcgacttttggttctctttaagtgttaattatggaactgaaaagttgtgttcaaatttagattggatctaaatt

SEQ ID NO: 121302 - DNA, 799 bp, Cannabis sativa
  modified_base (162)..(165): a, c, t, g, unknown or other
tctctctctctttttctctctctacctcagaaccttaatctgaacagagtacgtactcaaacttgtatctcaattgcatcatcaaatgttgagtcagggggtggtatttataagcttaggaccaagatcctaaagtcggtggctgcaagaaacgaggttgtnnnnttagttagaaacaactaacttaactaactcctcatttgatcaaagtctccatgtcaagataagcaccagggcctccggggtcatgaaggagctttcgggcttaaggaccacgaacccttgctgaagacgcttttagataagatgaaggcatgttgaagttgactatctgaaattgtcattctaggagggataactagccagatggaactcctttcaagggagggactagctatcctgaagactggacccgaagtgaacatgatagacatctaggaagacccttcgggactcgactatcattccacaagactcctttcgagaccattaacaactatcaagaaataacgaatacaaaaaccttttcatttagagaaactataccgcaggctccttatagcagacagtttagaaccgacgccaaatgtatagccgtcacttcccagctggtgtatcactattctcaacagtcgagaaaaatattagccagtttttgaactgtgcctattccacccaattttacgtcaatgacataggcatcggttataagactcgacaacaaaactttaaccgactattttaaatagtaggaatgcatgttgaaaaaccgtgtttttgcaaatgtcagttgtatata

SEQ ID NO: 121303 - DNA, 543 bp, Cannabis sativa
ctctaaattactaagatgtatatattattattagtaattaatattcctaaaatcgacattggtgacctggcagcgtaagtggtcttctactggtcgggtccatcgtctcgggaggagttaacactcaaagtttgacttgggtgttattagatggagaattgctaaatagcactattggtacttaacaccctctttaatatcacatcgctattggtgtaattaaatagcaggtctcgtataatttaagaaaataaactttagggaatatcgctaacagatcatgggataacacctataaaaggtcaatagaatgctaaatgctttattagggcatctccaatagagaaactcaaatatagtgttaaattaacaccaaaaaactactattttaacactaattttttttttcaattccaaccacaacaccaaaaaattacaccaaatattatattaataaaaatactaattataaaaataataaaaattacaccaaaatttttttaatatgcggttcaaaccgcaccgcactgcacattataaaaa

SEQ ID NO: 121304 - DNA, 1141 bp, Cannabis sativa
  modified_base (68)..(80): a, c, t, g, unknown or other
cttatttataactggcccaaatcgggacttgatttttttataacaaattagagattattcttgaatannnnnnnnnnnnntagaggttctactgtatatatgatccttatctgttatttaatattatatatttttaaattattgtattcaaattatatgatactttaattatttctttttctctttcaaaataactttaatttagatcgagcttatattagtatatataattctaatttctatttatgatcatttttttaaatggatagtgatcatttaagttataatattaattaatatatttttatcaaagggaaaaaaaatattgttagaatacacatgataaaatactaataattaaagataaaaaaataaaataaaacaatttgatatatctgaccgggttacacataataaatacataaaaacatatatagaacatttgcacaagtatttttaagttggtaatttaattaatatatatatatatatttaagagtgattttttattaaataataatgagcttttttcatttattttccttctagtataataaaaaaatatatttaacagtgatcttcagttaattatagtaataaaatttaaagaaattaataaagttttttaaaatttctatataaattagctccaacggacagccggtcaaagattagcatttattattcttgttgtatgtgataatttgacccttatatatataaaagttaaatacaaattagttgataatatataatataaaatatttataatgcatccataaaatgatacacgaactaatatttgtttctgtcatttgaaataatattttaatttttttttttttagttttacaaaattttaaaaaatttaaaataattacaatataaaaattagtgttcaaataatttaaataaaagagagacactcgtacaaaataatttttttttttaattttcaacatgttaaatattttaaaattttatatgatatcttaaataattttacgatcattaaaataatatagattaaaatctttttccaataagtagtaatatattacattttttgtgcattgttgaattttttaaatgtttatatataaatatccaataatgttgttttataaatatatatatatat

SEQ ID NO: 121305 - DNA, 2135 bp, Cannabis sativa
ggcgttcaacattcaaatataatacaataacacaagttgtttttttagttgtgctcatatataaagggcacatcgttttaaatgttgtgataataatgcaataaacgatcgacatgatcaacttcgtataagtcaattacgtatttgtccctgttttgtatagccgattcgcataacttcataaacagatagatagaaacgatattatatctatctaataaagcaatagagttctaataggcattttgtccgtttttaataaattttaaataatttacagtaccaaaaataaaattaataataacgagttgcgccagtgtaaatataactataacacaactacaaaaagtataatatggtataataaaaatagcctataatttctaatcaatatgtatatatatgtacaaactcataatttgatcaaagctaatgcaaccaaaaaacttggcaaaatcaaataaattaagcaacttatttcctagctagaaatatacatcttattaagttttgcgctcatcaaattggaaatccattgcaacattctaatttgaaaactctcactcactgccaaatgggttgtacttgtacagtaatgcctatacagaaaagttgcaatagcttgaacattttttatatggtcactatttttattttcagaatagggttactagtgtgctaaaatccatatgtaataaaaataaaaattaaaaaataaatgtcaaagtacatggttacaaaatatgaaaaaaattcatagtaactgatgactatattttacagagtctaaaaataatgatagagtgattgtttaacaaattttgtaatgttagagcaactacagctataaaatatttggaatgtatacgacattaattttttcagtttcaaaattgtaactggttacaatattctgctaaaatcttagaaacacgacattgtatctcgttgctagttttttcaacttcatagtcaccattgtcggcaactaaattaactaaaataaaatatgataaacacaaaacaataactagtatatatattatgtttttacaattaattaatgttaagacaacgatttgatcatgtcgatcgtttattgcattattatgacaacatttaaaacgatgtgtcctatatatatgagcacaactaaaaaaagaacttgtgttaatgatgaacgccgtttttaatctctggaaatcatgaaatgttaattggcctaatatataaaaaggaatatttgacttttctctttatcagctgagaatacaaaaaagacaatgaagaagaagatgcaacaatatgcataaaaatatgtatagatgaattgtattaatggttcttattttgttgcatgtaacatatttcttcatggatatatcgaccacgtacgtagacgacccagtccaacgttgctatatatgtatatataaaatcaaagttaagacgactcatgagtcgtgatcgagttgattgttcacgcgggtaaaacttattttacgcctaatttgacttttattttttgtacgtaatattctctaaggtcaaaatcctccttgaccgatttgtacgttgtgatagtacaacatttggattttgttttaataatatactatttctttttaaggaagatgtacaattcttatttcatatatacagtaactagagatatatacaaatttgattcgaggatttaaatacacactttggtggattatgggacgagtgggggataattttttatatatttatttgtataatagtattaaaattatttgatgattgaactttattattattattataataaatattttttaatatatagtgttctatctatatatcaattttaatttttaatatcattttttattttgttattacttacaagcatagcatggttaggattttataaaaaatttaagaaatatataaatcacagatctgaatatattcttaaaagtgatttaatatagaaaatcttaaatcataaatctatagaacctttgctaaattaaagatgaagatgatgataataaaatgagcggaagcactaacctgaagccattgttggagattgcagagaaggttttgatcttccaagaatacactattttctaaggtattttctc

SEQ ID NO: 121306 - DNA, 1043 bp, Cannabis sativa
ttttcattgtataatttattctgcacgaattggcaacatgagttcaaattccattcttgtaaagaaaataaaatagttatcaaattaaaacaagaagacaaaatctgaccattcagtataaatatttttaatatatatgagttatgttatatttaattttattgtatttgttttaatctataataataaattatcaatagataattattttttcaaaattaaatcaattataactaattaatttaaatattaaacgaaactagaattaatatatataaataattttatttttatatttaaattcctattataatttttttaataattaaactacttaatataatatttacaatatttttttttaccacattagacatccactctttctaaaaaagttagagtttcaatttatttcaacttaacatcatataaattttctaattcgatgcaatttcctacatctctgccacaaactcattcctccaatctacaagctatatcacgttctttccctttctctctggttctcagccatcctgccgtacagccaaatccaatgataatgcacgttgttcataaatcaactgacaataataacaaaatattattttaccttgtttacttttttaaaataattatttttccacatattttttttttcaattatatgatgtcatttttaggtccatgcatttttaaatgacatcctagcatgatcattatcccattcatgtataatacttgtatttttttctttttgctaatatgaaaaacttcatactaaaaaaaactaaaacaccaagttcatagtagagaatctagaaacaagagggctccacctctatcaatcaatgttattctcagtgattgtttcactgtgtaattttgtcccacttgtttcaaatattttttgagcacgatgaggaaggagaagtaaaaaaataaaagttaacttatctttaattttataattgttattagattttaaaatattttttatagaaattttaattaaaaaaaaaaaaactaaatgacttgaacta

SEQ ID NO: 121307 - DNA, 780 bp, Cannabis sativa
  modified_base (730)..(739): a, c, t, g, unknown or other
aagagggtcaagaacaaagggtgtgctcgggttggtagagagaaaactatgactgttttctctggtgtgtatcgagtaccaacagggttgtgattgctctgattcttgtaattgtattgatactcttttattccacatattaattaagaattggtgatgtttctcagctggagtatggctagggatcatgttgatctctaggaccggaagcaggataaaatcttgtgttgttctttgattgatttctggtttgattcattgtgttgttaattggtttatgttcattattattgtccaagttgtgagtttattgcaggttttaagattgaatccttgatgttattttcactggaattacaacagggccctacatggcactaagtaaaaattttaatgtcacctacttagctttatatcagatgcaattaggcatattataaattgcaaaataaaaataacttaaacaaagctagttaaaattaaaaatgcataattaaaataaaaaaaataaaacatatacattatagaaaattgaaaagacaataaacgtaaagaccaaaatcaatacaaaaaatcgaaaggttctccagccattgaaatgggagatgagaaggcgatttggatttagaggaggagttcgatcgtcgatggtggaaatgtgatatcttaggcaattgtttagcgataccccacctgattacggtaagtttctgtaacaccctaactaacnnnnnnnnnntacgtgatttttaaacatgctgtgtagctcgttgctaatca

SEQ ID NO: 121308 - DNA, 897 bp, Cannabis sativa
atcacatgaagcaaaatgtctttgcgtttcactgactttgagcaagtccgcgaaagactggtggaagaggttgtctccaagatcgatccacaactggagggatctacaagtaatgttcaaaaagcaatatgcagcagcgaaggccttcgacctagaagctagttccctggccaatgtcaaacaaaaaccaagagaaagcttgaagaaatacatccaatgtatgataaatattgctgctaaaaccaaggttactgatgatatgaagatggtgggtttgacattaggattgaccacaacatttgcccaattcggtaagaataccagtcatttatcctggacaaggggttgcacatagatagctttttattcctaaataacatggagctattaatcctcctcaaggagtaggacatccacaagctcctagaattcaagctcccaattcacaagcccttgagcgggtacaaaaagctccagcaacaacgcttgttgcagcttctggtcttgtaaatccatatcctcctggagcaacccaacctgtgctagatggtcatgtagcaaccatttttggtggaccacacattaccgaaagcacccaaaatgcacataaaagatacttgaatgagttggatcaagatgaaacttgccattcaggacaatcacatgctcagcatcctcggataatgaatttgccaatgactttcatagaagatgatgccaagcatgtgcattttcccccacaatgaccctttggtgatagaagctcagattgcgaataaaagagtttctaaaattctcgtagataatggaagctttgtcaatatcattttcaaagatgcctttgaagccatcggtcttgtggaagccaacttgttaccttgtccaattcaactgcaa

SEQ ID NO: 121309 - DNA, 622 bp, Cannabis sativa
tttctttaatttttaattgtaccatttttaaataacatagaaaaaactagcataaaattcagtatacgtgcctcgcacgtagctttttgctagtttattataggttagctagaataatatatagaatttcttgctaaataaataaaaaaaaagaatgaatttcttaataatttaaccaaaaaaaaaaaattagaatttttgctataccaaatgagaaatttacgtaatacatctcaaaccattttttttaatttttattatcttattaaaacaatttacttaaattttaatagttttattttgttttgttttaattaatattattacaatattttatactatatttttatcacgtgtaaataacagtttttttaagaacgtgtgaacaatagtctttaaggaaaaaaattcgagaaaatataaaaaaaactaaattttatcaaactcttttaatttgttatatcaataaggctaataaggattttcgtctctcgaattttgatatgtccaaaccctgtcctctaaattttgaagacggttaaattttctccttaagttattgagattttggatttaaggacttttgtctaattttagtaagaaaaatctaatatggatgaaa

SEQ ID NO: 121310 - DNA, 1272 bp, Cannabis sativa
atgagaggatcagagaagttgagcaagtttgtagccacccacaaatatagactccttatcctagcaatggccatagcacacatagagtagcaactaactttgacatcacaattgatcttgatccagtcatcaggaggtggcggccaaacagaagacctatcaaccttcaaagaggtaagtaaacaagaactataatttgcgtaacaagaatagatagaatcaatataatagataatgctacccagaacattcttatgtaccttatcattgcgtgctctccagattgtatccaccacgatcgaagcatacaggaataatttttcaatgtccaaatatagtcatatcgcaaattgaaaaaatactattccagaaggtaagcgagcaacaacaaaggccaataaactaacatacaatatagtatagacgaagataaacacgttaataaagtcatagtcactgtttaaattagaagtaaatattattttagaatttatgtttttaatttttttttattaaattatgttttaaaaaagttattaattcaattttttattttgttatataatgaattaattaaattttgtattttttaaaataacataaaataatacttaagctgatttattattaaataaaatttaataacaattcgatctagatgtatagtatgataaaactaaatatattttttgcttttattcgtgttaaaattatcttgaagatgattatattaaaaaaaaaataataaaaaattaagcggtattattttgtacaattttgaaaaatataatggccaatttatctatttaacaaaataaaaagctcattctttaatttttataaaatacaggatctaaaattatattactctgtcaactatgtagacgaattttaaaaaaaataaatattcattataattgaagacaacattctcaaaatgtgattaaagaatgatgcaaaccaactatatgtatatactatttatttcattattttttttttttttgttttttgaatgaaaagtattatcataagcctaattcaaaaaaatttaaagatttacacaaaaactagtaacctcagccagcaaagagcaaacttttgtttcctctaaagagagagctattttagctaaatcatgaataataatatttgtagaaagattacaaaataaaaagggtttttttttttataaatatggcttttttgtaagtggtttagaaatatatggagaaataaagaaattttataaaacctggaaaaatgaataaa

SEQ ID NO: 121311 - DNA, 830 bp, Cannabis sativa
ttttttttttttgcctataactcattttaactcagagccagtccagaaaagcattggtgtatcagttatggaggaatcggatgatgtcttgtggtcttaattataaggtccagaaaattccatctcatgtgatcaaccaaattaagatggagattaagaatagaattgctaatgaacactcatgatttactatggtttaaacaagtatacaagatattttaaatgtacttacattgtatatggtgaggaaagagtgaaactaatttcacattgttagaatgtacagaatttaatgttgcaatacaatgatctagttcttaaaaaagaacaaaagattatgttaatataagtatgcaataatttatttgaattcaatttttcgtataattaataattagttataaaaattacaatttgctttgattaaatatatttttagttacaatatttattgtgattaaagttaaattaataacaacttgtgcctaaatattctatttttagtcgcaatttagttatattaaaaaattgtcactatagttattttttgtgataaaaatattttttaaaaatatgtgattattattgaaaaaaacccataaaatatttactaaaaatatgtgattgaaaaaaaccattaccaaacaatatgggaaatttacacccataaatgggatatatttgcaccaataatgtggatataccacaaagttgtggccatataattacaaaaatactgtaatttagattaacttttacaaaaatattgtcacacggaaatcttttcaaaaatactgtatttttacaaaataccagtaaaacacaaagca

SEQ ID NO: 121312 - DNA, 1417 bp, Cannabis sativa
ggctggagatgcagacgaggttgaggaagatcaagaagagtcaattaaatcccctactatgtaggcctggtcttttttatttttttatttttatttatttaagaaaatggccctttggccaagataatggttgcccttagtggcattattttttgtaaggaattttgcatagctgaatggccaactctgctttttcatgcgtttgtctttactttaaatgcctcgtatcttatgtttgaattgaatatgtctatttattgcgttttatttcacaatctaaacatttatattctgatccaacttattgatactttaggaagcattcccattgttcctatttttcatttgatatgcttaagtagttattaatctactatgtatatgctaagcagttataatctacgtttagttttaatccgcgagcaattcaattctgccctgttatatgccaccagtgtacaatctgccatatgcaaacttaaaaaatactttgaataatcacctctgtctggaactattttgcatgtctttaatttgattgctcatatcatgaatagttatatcatctattcatattttagctgtagtattatttttcaacgcattcttgtacctcgttaaaatactgctagattgatgtgagccgttagaacattcaactcacatctagctttatgttgttttatgagttgatctcattgacaactgctatttttgactattcatttctagagaaaaaggtttttcatttctttgattttatattgtctgtagacaattttaatcaattatcctttcctttgtggaaaaaatttaaaatgggtttgcaatataatatgtatttctagatgaattctagttaatatacacatatacatgcccatcaagtaattttaaagaagataaagtaattacttgaacaaactttaactttattaataataagaatttacatattacagagataaatacaacatttatattttgaattaactggtaataaggccacaaatgttcactattccagtgtttctttattagcgagtcgttaagccgagctaattaataaacccaggttcccactgctgctaataacatagggaccttcccagtttgggttaaacacttcagcaaccggatctcgtgtgtttgcaaatgctcaccttaacacaaaatctccaatattaaagagccttttctaaactcttttgttaaattatctcttgattccatgttgataggctgcattagttatttgcaactgattacgcctttcttcaagtaagttaaaggtcaggtttcgaagctcttggttttctacttgattatagaattcatgcctatgggtcgcaatgttagcttctactggtagcattgcttcagagccaaatgctaacgagaatggagtgtgtcccgt

SEQ ID NO: 121313 - DNA, 2848 bp, Cannabis sativa
  modified_base (2512)..(2519): a, c, t, g, unknown or other
  modified_base (2778)..(2798): a, c, t, g, unknown or other
tatcatttccctcgatcataatcgagtcacaacgataataatcgtttcccattatttccctcgatcataatcgagtcacaacgatgatactagtttcttattatttccctcgatcataatcgaatcacaacaaatacatatcgggatcttgatcataatcaagactgtaacaatcataacgttaaccatatacggtgcttaatacttttcttacctcagtctagtagtcaagtatgcgggctgaactcagtggaactacgctcgacgatcccgagtcctatgtcacgacaagaaagctcaataaacaacttactccaaactttggactaaccctaacttcgcaatcagacatattctaactctccactggttcaaaatagcttatacgttactaaaatactcaaatctaggctctgaaaaataccccgaacaaaacttgtttcgagactaaaaaccaaagttttcttcccctgctcccaacggtgctatcaaaccggttaactgattttccctgctacaaaaatgcgaaaagcttggtttttgcaccaaaactgaaccaaaactcctgcaaacctaatgaaactttccagaacagtataatcccaccaaaataacacatctaaaacatcaattcaccacatttcatcagtttatacaaaccaccatgttagaaccaaaaatcaagttcttaaaccaaaattccaactctaattccaaaagccacaacaattacataacctattccctaattcaattctgtaaacacagtttaaaatcaatgaaacaccacagctatgaaattcctaataaaacctaatctagactatcttaaaactcaagaatttcaagaggaaaagtatcaagaacttacctcaatacttagccaagcctttactccttccaaaatgattcaagagatgaagaatcaagcaaagaaaatcaaccctagtgcagctccttagggttcgggtagaagaaagaaaaggaagagagaggttttgtaattttttttgtaattttccttttattcatctaataactatgcatatatatgttcttattaaataaaccttatattcagcatttatccaataatacaagaataataacaaacactttaatgaccattttgcccttttcacaattttaaacttaaaataaattcctagggtaattcagtaattttaactaatccataaaactgacattctaaaattctaaattagtctagaatacttccaaaataatccatcccatattgtcgtgacattactaaccacaccgtcaaatttccacagtcgccaggcccgaaaatattttatttcaaaaatggtattgacgatacccacatatcccaaaataatctccgttattaataaattatgctttatttaatcatttaataaattcacactaattactctaagtaagatcataatcttactccattaccaaaataattacatatttaataaaatattcccaattaaatactatattattttttgggatattacactgatgctctccaagctcttcttccgctggtaatttatttgaatttccccaatcaagtttctttttttttagggttttggattccccctctttttttttttctgatttgttaaaaatgaatatttttttaggttgaaggattagaggaattcttcagtcaacccagatctgatgatgcccaggttgatgaagattttgttcttttgtcaccagatcccaaaacttcttgcagaatctctacaagaacccaaaaaccaatatcaccagaacctgaaaccgtgcagccaaggactgaaactcgacggggaattgttgctactcctgtaactaggagtattgtagtttgatttttgggttggggtttgatttttctccagaaggtgataatggtggtggtttgatttcaggaaaaaaaaaggaagaagaagaactagaagaagaagaagaagaagaaagatgaagaagaaaaaaaaaagaaaatatatttttttttaaattatttttctattttttaaacattctaaactattttttaatatataaattgttaatattaggtggaccaataaaaattttccatgtttacacttgtgtacaccgtgacggtccactttggtacttaaaagaccaaaatagacggaaagactacagagcaaaatgatggttgagttcaggaagtatagccataattttttgagtaagggattaaaccgtaacaaacataaaagtatagggagtttggccgcaaattacccttgcaattgcatggaggccctgttctagtagggttggactccaccagtactctgtctttggcttatttggacatgccacgtcagggtgataaaattgttgggatttatgacctaaataaaatctatttcagtatcttatatgtaatcaataaaagattagaattcatttatgtttacaagtactattcaagtgtatggtttaatatacaatttttattaaatccaaaacatatagttannnnnnnntacagtgatgtcaacacagtggaaggtaattgtgattacatgcttcaaaagttcatgtcccgtgattcttcagtgcactggatttacacttatgtgatagtcatcaataaagtttacttacaccttggataagtgttatgttctatccaagatattggaaaagtatgttagtatcgaatgtatggagtataaattggactgggaccgatattgatcatggtaagaatattataatcttactgttatatctttctaagtnnnnnnnnnnnnnnnnnnnnngatcaaaagatcttaatcttgatatagttagcttcaatctcaagagtgtt

SEQ ID NO: 121314 - DNA, 513 bp, Cannabis sativa
ttttttttttgaggaaaggagatttgaatctaaaatttgtgaaaataagtatgaaactattaaattatgcataccacaaaattagaaggatgttaattatattttttttttttaatttttatatctgaaaatatttctcaaggtattttattttattattatttttagctatggttataattacaatattatttttataaattgatgaaatttttgtataatttaccgtgttaaaaatattttaaagtattttaaacatacatattaaattaaaatatgaaaaaatttatttttaacatgataaattatttaaattaagttataattttaaaattataacaaatactactattttttttaaaaaaaaaaaaattaatactccatatacgaatttcggatctcattcgatctctttgactttgtttcactttttctaagatgttttcatgataattgaaagtaataatggtatatatatatatattaggtgattgttacgtgccaagccacgta

SEQ ID NO: 121315 - DNA, 2813 bp, Cannabis sativa
  modified_base (275)..(277): a, c, t, g, unknown or other
cttagttgatcttaggtcaattgatctcaatcttgagatgattaagttctagcttaattgtactatacaggctctttgacttgtttgttacttgcttacctataggactagtccatacttatatcttaggaattcggtagtgcaattgagtgggagtgttaatcatagatatagaatctatagcttctataactatttagaagtgaaacgatagtttctttttaacttggctaaacacgataaatgatagagtgctcatttcagtaattatattnnnttactgaaatatcatttacaagtacctaagtgttaaagataaaatacatttaagggtaaaacggtaaatttattcctactcaatgtaaactatctatattggatcattgattatttatattgtaacaaagggtaattcataacatatttatatttgtatatagagcgttgtatgtaatcaagagtacaattttaaatctataatgaagtcgggagaaattaataagctacgaaatttacttggtaaatatcaaatctacttattaggagcttggtttcataagctcacggtcattgcattgtctaggataatataatcttgtagactcaattaattgatttatttattcaactataatttgaaaattgattatgtcaaatttcaaaattttttactacgtttgactaaattgagaagataagagaaatataggtctatttgtttaattatgacaaatttgtgttaaattaataaattgttatatttaaagttttaatttataattattgaaaattaaataagaatttaaatatacataaggttttaattattatttaattaattaagattattattataattatattatatataattattcaaaacataattttgaaaattttgtaatttacagttttgacttgtatatatatacactaggtggatgttacgtgtagagccacgtaaatgttaattttatttaagttttagtgttttttttaaattttggtaactaattttgaattattatttaaataatttgttttataaatgtaaacttggtaagtgaaccatagttgtgtatataaacttatgatatgtacattattattaataataaatagtatgttaatctcaatatattcacactcacataataattattcttaggaggcgtttggtataaggggttcaaaataatctgattaagggaaatattatgaaggagaatatgattacctataaacttattactgtgtttagttatattcatgggaatatctaattagatctgttaattagattatagtatttagttgagcacataaatcttatatatcataatagaaaagttaaataaaataaaatgaaataagtaattattatatctcttctatattaattaaatataaaataaaataaatattcataaaaatttatataattaattaataaatttaatgtcattttatttgagattaaattaaatgaatatcattcacatatatttttttatataatattttttacatttatttatgtaaattattatagtaattgaataagtatagataaaagttatatttaaataaattttaagaaaaagctaaaatgaaaacaaaatttcatgcatttattaataaataagaaaataatctaaaatatttaagttttaaaattacattttttgtgtttattaataataagtaattttattaaaaaaaaaaaaaagaagctaaaataaaatccactctaacattaggagtagatcaaactcactctaacatccctgagaggaaattaagtttaaattcttcttctaaagtgaagaagtaatcgatgcggggttgatttgaaattagaagtttttcgattttaagtcgttgcgaattgtgagtccatcaacttttttgatctcttcatatagatttattctcctagcagcaccatcagcttcatgttgaaaacaatcagcaagttttctaatagaatcacttgcagacgcttgcatagtactaaattcttgcactgacttagaaagtagttcaaccgatggatctccactatttgattttctcttagcctttcgagctgtttgacttgatggtatattgctattcatgcttgcattagcattcatctcatcaagtgtattaaagggatcatagtcatcattccaaccattatttatctcttctgcaatttcatcaagtgtttcagagaatcttattgtaccatctccagtagcacgattttttccatacactatagccagttcattataatacgaaaatagcttgtttaataatccttttgtagttggatgactctacaaaattatataacattaaactaaaaaaaaaaataatgaataattaattaaacaattaatgaaataaattttttctatagtaactaaccttaacccaatcatcaaacacaattttatcagctaccacacatttgagctcctcactccaaccaaaaccactagcagaaggtcccaacatatgagaaattgtcgtatattgtctcttcaatatcttgagacgagagttaatgtgtggctgtgctttaattcaagcatttggaattctgtcattcatcatttttttttttcaagttgttgcagatatccaggcttgaatgtaccattattagccttccattttccgatgttacacatatctatcaagcattccaccaactttagatcttctatggaagtccattgatgtttttttccaccaattggcgtcgattgagaagtggcttccatgatatctcctacaagttaataaatcattatcaagaa

SEQ ID NO: 121316 - DNA, 1074 bp, Cannabis sativa
tttctttattgatatttaaaagataaagattacattaaaatggagttttatttagggcataaaacccaacagtcggtgtattctcttggtagtggatataactccctcttggctctcttgtcctgaaggtcatccttatacatgaatccccactttttgtgtgacccctcagctcgagtctttccaggttgcttgtctttcccaactccaaaattttcatgtccattctccaaaaagatatacatattggcccactcatagaagtgatcaaggtaatccagctatctcttaagcatgttgttccacagcttgcttctaggtctgactcaaacgatgatggccattttgtgctcatccttagagagtctccccactttagccgcttctgcgttgaagtgctggatgtagcttgttaagctttcagtttctccttgtttgatatctgccagagttgtccttgggacgacataatctttagaagcacggtgttgggacaagaagtcattggtgaactgtttctacgaagttatatatctgggagccaaccctcttatacaacttgtaggttacgcctcagagtgtcatcgcgaagcattggcacctcgctctactcgtgactcttttcattttcataatcttgttgaaagcgtccaagtgatacttcaaattagtgatcccttcatagggcgatatgttttgctctttgaaattaggtggtaactgttaagattggatttcttttgaaaaaggagattcatcatcgaagtcttcttcatcctaacttccctcctctgaggcaactgaggctatccttctgcggagatcttccattttcttgtaaagttgtttcctcttcttattcaacttgtctcaaaggtcctgcgccgtgcatcttgggccttctttgtggtggtgcgtcattgatgacgacactatctttctgacagtactttttgattgagtttttcccttaggtcctctagggccacccttgaaccggctctcttttgttggagtgttgggttttatgccctaaataaaactcatctcaatataatcagattaacttattaa

SEQ ID NO: 121317 - DNA, 1161 bp, Cannabis sativa
aataaagtttaatttctgcgcttatttttctagtaatcccgattaggggattagggtttcataagattattgggtagcgtgcctaattatttagagcgttacataaagagataggccttcatgtgtatttggacaattttcacaaagtaagattgtctttgggtccaatggattaataacatttatatgaagaaatcaagatttttttgttgttttctcctggtttggacacaagctagtactttagaaaacttatcttgttgagaaatgttgttgacaaacatgagttgttggatgttggtagcttaagaaagtttaaggcgaaaaaattctacttgccccttattttaaaagagaaggtgaattaccacaaggtagtttggcataagttaaaggtcccgaagcatcgttttgttttgtggtagacggttaatgaacatctcttgactcgtgatctccttaccaagtttattaatgtggagtctttattatgtcttgtttgtgagttaacttcagagtctcatattcatctctttttttaaatgtgctttttctagaaatgtgatttgtgaggtaacaaactagttgggccaaattgactagcagaaaaatcttgatgagtggctaaacagagcagttgagcctttgaattgggcaaaaacccacgtaaccttgatattctaactaccaataaatcttgttccattaattttaagatactaaatcgtatctaagtgacattattgaccaaaatctcgatttccactattactgggcataaatcgtgaaaatactaaaattcatatatgacatgcacaacacatctggaatctaataaaatcttcataatcgagaaattataattctaatgcatatttctgacaaaagaagttattttctgctagtgcacaaataatcataaattattaattaaatcaataatattctattaattttcatgtttaattatgtggtcattacattaataatcttagtcatgaggcttgttcttttaacacctattaatccagctagtaaaagatagggtctaagctttaaagggaaatttacaccctgtactgatatttctcattttatttcttttttactgttacacggcaattattatatttttactgtgtatactgttttttttttttt

SEQ ID NO: 121318 - DNA, 1673 bp, Cannabis sativa
  modified_base (50)..(55): a, c, t, g, unknown or other
ataagtatagtttagtagtacttaatccaatttcctgtggttcgacctcnnnnnngtgagatactacttgattgcgtacacttccgtaacaaacataaaattcgtaacaaaagtacagattggatcgattattttaaattagttacttttcagtaaattttttaaatattaaattattatttaatttgtttttaaattattttatatttaatatttattaaaaaatattttttttcacataattgacaaaaaaatacaaattattgttattttatgtctcgaacaacaaatttcaataaacaaaataaaaaacaaataaagaaaaaaaattatatgtaaaaaaaatgtttaattttattaaaattgtatgtaaaaaaaataaattatatataaaaatagaatatacatttaatctattaaattttaaaatatatttacattatatgtgttagatttttaaattacctttttacaataaaatattagttacatatataatttttttttaaaatttacaaaagtaaatgtgaattaaaaatttgatcagttacttttacatgtcaatcaacatttaagccccacaatgtaagattttgaatatattggattgactatttattaataccctaccaaaagcaaaattgctatagtcactcccaaagccctctagatttatgaatgttttcacaacacaccaaaataagatcatttgctatgagtaatacccatgatttctgctagggagataatcacaacacacattcaaatttcaaagaggtcacaatcaagcattggaagataagcttgtaaaactataagggctccacaaattcccaacacatcttctattaagtttgcaatctctttttagttttcaagtatgagctgcattttgtgtttgaaccaccagaggtaagaaacaaatttaagtaatcattttttttgataaaaaatttgcaatacaaaaaaataaagagcggttgtcatattacaatcaaaaaacaccacaaaaaatatttgatctaattggttttccctcaatagacagaaacatcaaaatctgcaatgagttgccgctgctagtattttgtaaaattgcaagtaactaagtaaaggatcaagcctcaaaatgtcgagtaatgttcatggtatagtgtaacgacccttcgcagatctctctcttttcgaatcatcctgcaaaaacaagaagtggtgaggaatagagaaagaaaagtgcagcctgaaatcagaaattaccaatatattaaactttacatggaagctgtaagtgattttgtcagttgtgtctagtatctccttccacttctttccaatgctcatctataaaacaacaaagaataaacaatattaatcaaccataaactgaatttgagcaatagcaaatagatacaaagacatgaaaaaagttcattgactttgacaatgaagaaaaaatgatcggtttccatacaagcaaagaattctgcaaacaaatttgaagaaagaacatatttaacaagtaaattaaaatgcaagtttgtaaggatggtgtgaagttcccatttcttttataaatcttactaatgatgcatgcaaatttacttggtgaaagatcaagcattgggcagagcatgtatcgaatgttttaatctagaaatcatcgtaattatatg

SEQ ID NO: 121319 - DNA, 1414 bp, Cannabis sativa
tttttttttaaagatttttttttttttttttccattcataatggtttttctttttacgtggaactttttcttttattttatttctagttttgctaactaatattaaaaatataatacctatttaattagccaatattttaaagattaatattttattttattttatttatttttcattaattgattattttattatttttttcaagaaaatatatataacaaataaacattagttaaagttactttctttaattgacagtaatatattaatctttttgttttttaaaacttatctacatgaaattgtcccatcccaactaagtatatatatatatgtatatatcatcatcatgatgttactcatggtaagaagataaattttatttgatcttttaatgaaaaagttatgtttgatttatattcaaattgcaaaagaattatatataatatatgtgtataaaagacaaaataatataatatgggggaagatgcaaaatgacataacaatagaggggttaaagtgcaataatattttacttaaagaaaactgcagtttctaggtaagtgacatgtgtttattttagttaagaactcaaacataagtcaatagcaaaagtcaaaacccaaccacacgtcaagaatgaggactgttgaccaaaacctgaattaataaaactagtatacttgaaagtgaaacctttatagctttgtcgccttagaccaaagaaaagatcaaagagaaaaaaactcagaaatgttaatgtgtaccttaatgtgccaagtattatgcattgttgttattattataattaatagtcatatatatattttttaatttaataaattatgtataaaattattaaccacatataatatgttacatcagttatatataaatatttatatgactaaatattatgttaaattatgtattttataaaaataattggttagattttttattttgttaaatgataatatgaatattttattttttaaaatagtaaaaataagatctgaactcaattttcgataatttttttttttaatataactaatttgaagacaattcttaatactaacaaatacaaaaaatattattagttttgtcataacatctctagatcgcgcgaattattattaagttttattttgacgaaaaatcagttcaaagttctatttgttctattttgaaaagtacataatttattttgtcatttaataaaatagatgatctaattggtaacttttacaaaatgcagagtctaaaataatatttattatttataaagttgattggtaattaatattatatagatatatttatgtgagtcttaactattcccattgaatgaaaatcttctgttaaaaattggtgtctcatattatatatgttaaatcaatctaaatttga

SEQ ID NO: 121320 - DNA, 720 bp, Cannabis sativa
tttttgcacatattttgtaattaattaaaataatgtatacaaaattgtaaaaatgtcttaaaaattattatttacaaagtagtatttcaaaatattatctaaattatattttatcacaacatttcttcataaaattaataataactatgtaaggcatacttttttacactaacaatataaaatatcttaaacttaaataatcataattaaactattttattttaaatcaattattataacatttgtactataattaaactattttattttaaatcaattattataatgaccacgcgaggcgcagtcacgtaacctaatttatcataaagtaattaatattgaatcactagaacaaagatgacttagcttagctatataatatatttattttatataaaatgtgattatgtaattgaatttttagtttaatggtatttttaattttttttatgttaattttaacaaaatatttgattatttattaattttctattattattatatatatttaaaaaataataattatatagatattttatttaaaaagtattagctgtctagggttaacatatatatgccttattttagtagttttttgattttttttttctaaaaaatcacgtatcatttaattaagtagaatttacgtggagtatgggttttttaaaccttttatgataaatatggcataattaactatggacactttatatggctttt

SEQ ID NO: 121321 - DNA, 1488 bp, Cannabis sativa
  modified_base (1181)..(1184): a, c, t, g, unknown or other
tacatatgcattaatctgattttgacataaaactaaaggcactataaattgatttatgtcattgtatcatttttaagacgtacattatcttgtcttataaaagtcaaacaaaccctaataatgtttaccactcgataagtggtggactccagaacttttttcatcaatcgatcatgatatcatacaacaatcgtaatatcattgtgcacatctcacatactaatatatatatatatataacaatacattaagcaaattacttggtaacaataaaatatatttatgtatacatttgaataagtggatgaagatttcattaaaccaagtcatttaacaatacattaagcaaattacttggtagttggtaccgtagcattcaaataattataactaacatttaattatgaaattcgagctaattgataaataacacgattaataaatcgtttaacaaaacataaacaaatattatgcaaactagaaataagctgcctacaatttgaaatacaaaaaccgaacttagcaactctaatgagcttcgaatggcttaaactgtgaacaaactatctgtctcgatcattacatcttggggcttcgaggtcttgatccaactcaagacttctttgacaccaatagcctcggcaagagctggagcaacaacccccacttgacttgcaaattgagccacaatcacagttccagcagcatcacaagccacccaaccatacccaaatttgtttagattgtcgaatgtggtgaatcctcaccctcaaaacaggttgttacaacagtaacaatgtccaagaaacacaattcaaaactaaaaccaatcacaaaactaaaaacttaaactaattgaaaatagacaaagaaaacttaacttgataatgaatgaatggtggttctttattgaataggaatagttagtagtacataatagaatgagcccaagattacaactcaacacagtagagtattataaagaaatgtctcacattgagggaaatcacttcaagagtgatactttctttacatccctccacacacactcaatatgatcttgaactctctctctaaactaaatctaaagtatgagctttggagattagagatcagaactctcaactcaaaactcctttgtgaatagaggaacacctatttatagttgttggtggggtccnnnntaagttggtattaaagccaactgttataactagcaacaactttcttcagattcatctgatgagcaaatagatggacatactgagttgataggttaagtgagtttaatcccaacaattccacttgattagactcacttaaacactgatccaaaagaaatgagtgaggacattaaatgtcctgaatgctcaacaaatttagacagtgcttaaacttatctctagttacacttttagataaaatatctgcagggttatcatgtgtgcttatcgttttcacttgcaccttcttggatgacacaatatc

SEQ ID NO: 121322 - DNA, 2056 bp, Cannabis sativa
catattttaggatgggagtgccctactcctttggagatagcctatttttactcagtcaaggcagttcctgcaaggaagcgagctgcagtaggcttttactatctcgacacctacacgaatgattgcaggatcatagttaggctgccgaataagacagagtttaaaaaagagttcttctggacgacgggcctctctccaatatatacaaccgcctttcgcattatacgtaagttctctttctcagaaacttaaccttgaactatattaatttgtatttttgagtttgcttattaaacttttgtctgtttacagtggttcctcgaagaccagttcctactcctaagatagccgagcgtcacaagatcttactaaatcttccgttcagtttgagattgaaagacttcttatgcaacgagattaatctaaggaccgttggccttctttcctcggatgaatttacttacgactacaaagtacccaagtatgcttcatggcaaaaggtcccagtcccaaccgacgaagagagcgtggactaggtgcctcacgtgcatcatctcgacagaaccgccccttgggaagaaggagcatcccgaggtaatcaatgtgggtggtcacccacagtgcttatggccgaatgtaacaccttagtgtctttccaagatagtcgatacaatttttacacttggaatccctttctcatagatcgcataacacatagattcgatagttggtacccagaattccacgttcaaattagctatactagttcatactatgggattgccgagccgtatgggactatgttggatagatcaggtcctatagattcaagctaggatttagatccactaaacccttaggatatatttatgatcacaaaatctagggagtttagtgaatattttagtcctccgtggtcatcttcttaggattacggtaaccttatcaagtgggagtttattccccattttcacttatttattttgtttaagtgctaatgtacttctctcgcctcgtagatatggatcaggatttcgagaacatgttaaagagttctcccccagaagagagttgcccaagttggtgaggcctcgagttctacgaaagaacctaaaaggaccaaaaccactgccaacaagaagaaatcatcaggccagcttaccatcgagcttgccaagtctccatagaataaggtctctgcggcaaaaaatgccaatgaacaacccactggattactgcaccaggtgaagttctctagctctcatccagagatggttcttctcgagccctcctgtccattacccctcgaggtcgaaactgaagggcctgcaactttgcttgttgcattctactaatgggtggcataactccttgacccacgggtctaacaactgggagcttctcacgaggcagcgctgaggatcttgcaaaaatgagttacgaactcttgcatcaggttagtttccttttcttcttgttctcacttttcctcatttatcacctttactaactatgattttcctctttcttccaggcctctcttctctcctttgctacccatcatcggtcatcttagtgggatgaaatgctagagacttagctttgctagaccaaggagcatatggacactttatccaaaaagtggaatgactctgatggcgaggtctctcgtgcaaaggaagaggctgaaaagcagcatctggccgaccaaaagaaaattaaggagcttgaggattccctcaagtccctccaggctgaccatgacaaaaaacttaaagagatggaggctgaaaccaaggaaaaggtcaacaatatcgccaggagaaccatttatcagtcctggttagcgaatcctcatatggacttcagctttttgggtgaaggagccaacgctatgcttgccttatgcaagaaaacagggagagaagaactgggcgaggatgaagaggtcgaagtggaacaagatgatccatccaagtctcctacaatgtaggcttggtttttaatttgcatttttcgttttttttttttgtttatttaggaaaatggccatatg

SEQ ID NO: 121323 - DNA, 1814 bp, Cannabis sativa
aatgtgtttggtgcaaactgaattgtgacaaatgttgatagcacttgtaacaatataaagtttgatggcaaatagcaacatccatatctataagtaattgactgaaccaaacaatatctttgatagtcgatgatataacacgatattctgcttcagtaaaatattgaaataccacaatattagagtaaacaagcaactctaaaaaagtagatggaaataacaaatttttgaaggtaaaatacacagaacaactgcccaataagcactagtaggagaagacacaaactgactaacaatatgaacattatatgcaaatgcaatgtttggaagagtattattgatgtagatcaaattccatcaatagtgcgatatcacgtgagatcttccaaaagtatgctaaaaaatgttggtaatggttgtcagcaacgaaatgagataagagaggaggtttattgggttttaactcttttttacctattttttgttttaatttgagctcttattagattccattgaatctcgtggtctaaaaatagtgcaaaaaataaggtcaaaaaagatatatatattgaacacattccatatataaaagtaaaatacgaccatgcttgaggtgctagttgagaacatatagagttttctttaagcttgcaacttctccattgttatgaggaacactagacgaataaaccatgtaaactttttcgttgaatgatcacttaagaatatttgtaacatccatatcaattatatgccattgatgaatagaagcaactccaataagagtatgaattgaatattttttgaagagtgcactgtccacctcctatttagatatctttttaactttcgtgttcaaaatttacacatgccaaagtaatttttttcacttttatatattgttgacctcgcttttagctacgttgagtcaattaaagcaataaaataaatgataattattaaataaaattaatcaataaaaacacatagatttatagagtttcggccctgtgatagtggtaatagcctactccccttttacttgtattacttgtgagaaaaaaaaaaaaagcaattgagtttcttgatgtccctcgaaagcttacaattttacagcataagagctctcttgaagaatgaaatttggatccctaaataatagaataactccattatttatagggaagaaatacatcaattaggtttcccaaataaataaaaaataagaagggaaactcagaatattttctattttacaacaaataaaaattctattaaaataggaattcaattaataaaataaataaagtatctctaaagatatttcagtcacatttaccctagtcggtatatgcaggcttgttgcgaaaattgacgttggtcggaccatgtcatttactttgttcagatgttttagtttactcttcaaataaattgtctttgaggaataattcaccctggacggcatgccgaaaatggtatcgttaggactttgtgccttaaataaaattcattttaatataatcaaatttactaattaataaaagattaaaaatcattttttgttgcatggttcacatgatttttttcatgattataagtttaatgtataaattctatttaatccaaaatatatagctgtttatgattatagtgttgtcaatacagtgaaatataataatgattttactttcaaagtttatgtcttatgatttgtcagtacactggatttatactgacatgataattaacgatagagcttacttacactttggataagtattatgtcatttctagggcattggcaaagtatg

SEQ ID NO: 121324 - DNA, 2311 bp, Cannabis sativa
gaacttggcaaaccattgtcttgaagcttgcttcaagccatacaatgatttttgcaatttgcaaactgcatttagaggtaagtcccccttaggtctatacgcttgaggtggagacatatacacatcttcatggagatcaccgagtagaaaagcactgttgacatctagctggtgtagatgccaacctttgattgttgcaagggacaggaccaacttgacagtaactaattttgttactgaagcaaatgtgtacgtataatcgatcccttcctgtttgttgtaacccttagcaaccaacctagccttaagcctctctacattgccatcagtagtgattttgatcttatacacctatttgtaaccataacatgctgatcagcaggcaaagatacaactatccatgtgtgattcttctccaaagcctctattttaatatccatagcattgtcccattcaggtattccttggactttactgaaagattctagttcaaaatggcttgatagagccagagaagtagctttgaaggcaggagacaacctgtgatacccaagaacctgagataaaggatgagtagtaacaaaagaagcttgagaagaagcagcgatgttgttagtggccaaataacaatgatattcatttaggtaagagggctttgttacttgtctccctgttctagtatgtggagagatatcatgggaatcatgaggagtaaaaacattaaaagaactagacatgacaggttcattaatagattgagaagtacctgcattctgagaattatgtgaccttggtgtgtgagaaaaattagaaaagaaagattcatgtgcagagggaaggccaccaaaatgaacaaaaggaaaaatatgttcataaaaatagacatctctagaattgaaggttatgtttgtgatcaaatcaagcaatctatatgctttcatgccaacaggatatccaagaaaaatgcagggagcagacctaggagcaaacttagatctagattggcttaaagttgaagcatatgctaggcatccaaagacttttaagtgctcataggctagtggtttggaataaagtatatcaaatggtgacttgttctttaggtttggtgtaggtgtaggttgtagtagcaacacaatcttcccaatacactagtagtacataggattgaaatagcaaagctctagcaacattgagtaaatgttggtgttttctctcaagaacaaagttttgttgaggtctttggacacaagagtgataatgtataatcccaaggtcactgaacaattctttaaattgcaattccttggcattatcagacctgacaactttgatggttttattgaactggttttgaaaaagttttatgaactgagggatattaatttgtgcattagatttttgtttgattagattgatccaagtgtacaaggaacaatcatcaacaatggtaataaagtacttgtatccctcagttgtcatggtgttgtatggtccctaaatgtcaacatgaattagaacaaaacaaccttcagtaatgttgtgattatatatgaatggcaattttctttgcttagcataatgataaatggaacaataaaatagagaatcagaattggcataaaactttaaagcattattcaaaggatgagtctttacaaaagagagatgacccaatctataatgccatacaattagaaatgaaaaaaaaaaatagaaacaaattgtttactactgatttgattacagttcaggtaatacaagttgccaactttcctacccatcccaatcaccttagtcttcaaagtgtcctggatgacacagttatcatgagaacataagaaagtgcattcagttgtagcaattagagaattgacagataacaaattacacttgaaagtaggaacataaaggacatttttaagaacaaggcgaggtgtcgaaataattgttccaagataagatatttttgaatgcaaaccatttggtaaaagaatagtttttagtttaggatcagtataagtattttcgaacaaggaaatgtcagggcacacatgatgtgtagctgttgtatctatgatccaactatctttagaaacaaaggaattcttactagaaaagtgggaaacaacaggttgttcatcaaaggtattgggagcactgttgttatttgtctcactagtttactgagcaagtaatgccatgagtttttgacattacacactggacagactagaaacaagatctctctccattggcattgttaggctttctgccctaaataaaatctattttaatataatcagattta

SEQ ID NO: 121325 - DNA, 719 bp, Cannabis sativa
gtcatcaatatagttttgtctaagctatttataaatggacggaagtatcaactgatcaacttgttatagaggaagcaagtgatcaagagttctgtgaaaatgtcaggccaattgtgttctggaatttcagttctatgttaatggtatgctaacaaataacacactttagataaaaaaaataaataaaaagaactacacataagccaaatcactagtttagaacagtgccaaaatgcatggaatactaaattcaacttataaaaagccaattaagcactttcctaaaagaacatgagcaaagaaaaggaagagttaaataataaatataatgtgcaacaatgagtgtacgtatcattttggaagaatcacacttaagctaatgaaaacttgattactatttgtagaagaaaaataaactcacttaaatttggtgaaaggcacggtacacataaagcaggtattatcaatatttacatatacatgtatataactcatcaatactcatcatcttcaacaaaaatccaatattttatttagggcattaatgggcaataaaaacatacctcctaaactcatgttatctatttgagttatttgatacttctaatcttcctagttttgaataacatcttccacaactggaatttcttcaataacaggattctcattaacaataggagcttcatcattaataggcccttcatcaataataggacctt

SEQ ID NO: 121326 - DNA, 2162 bp, Cannabis sativa
taaattctcaataattaccctaagtaagatcataatcttacttcattaccaacataattacatatttaataaaatatgcctatttaaatattatttattttacgggatattacaataatttttcttacagaggatgttttgcactattttttctaacccctttctcagaatatagttgggatatttagagcttcatatagagagcaaaaaggtcactattgtcgtaagtgttgaagcatggcttgcacaagttcctaagtccaatagggcatgtaggcctatatgataggtttcataagttttagctaggtgttaggtaagataagccattaaccttccttgattgatgtgatagttcattatgcagtcatcataaacctcatatattagattgtaatcgttgaataatgggtgaaatgcctctgatttgtctttttagatctgctcacagacgcttcttccatgtcgtatttaaggaacctatataattcgcgactgggacctaatgaccagccctggagggtttgtctagctcccaaagattaaaaaaatacctcgacattaggatgtggttgaagctcctggagggagctcccagacatgaatatcaaattaagttaaattctcttagggtttatcccaagtatttctcaatctttagacccacttgccaccgagctgatttcaggactgccacatatattgtgataaaagaggggcaacatttaccctcatagtcttatttttgaatctttgtaaaatgttacttgcttcttgcctcagggaaggacgtaattagtagtgtgcacgtgtgtgaactatttattatttattatcatttttcctcattttgacaaaaaaaaatcgattcccacctgccctttttagaggagtactcgagcatttcaactgcgcttttttcattcacttttctactaggttgtcgtggccattagattattagaattataataagttgaaccctaattgtcggatgatagtagattagcattcaccctaaagggcctataaaaacttgtgcctttccttactacccactcatcacttttccctctcagactttcttaaccctttagcaaaatttgagactctccaaattttctttcgttcttcctctgccattgtcatccaaactactatcgatgtacagtagtttcgacaccctctgcatcttcttcattctattagtttccacttcttccatttttgtctttcaaaatgttatgtacagtattgttcttcatctttttccttctttcttttttatcgtatatatttgatttcttggatgttaatggtgatttttctcttaagcctgcatttagggttgcattcagtattgtttttttttttttttaaagaaagaaaaagcctttatttttagaccttggtagaaatttttaggtttggggcttacaaaaaatcatgcttcccattcctttccttttccttgttcctttgttgtggtttatatgtttggcacccaatgtatggcaacaggatttgttgatttctactttgcctacatcagcacttgttggaataggttttaccaggatctagatttactaccatgtatgttatttaacaccctaaatatgaatttctaaaacaatgtaaataaacacatgtaaagtttcaaaaattttacagtgggcgcagcagaatattaatggctccttccacttagatctttaacccttgtattctatttgtaacagggtatcaccaagatctgagatcgaatgtccttcccttgaaacttcgattcttcacagccttacacactatgattgagttaccacttgatgtgtgtgggcacttactctatcactcaaggtatgaaaaatatgaagagaggaagagaaggtttggctcgaaaataatagaagtgaaggcttaggaaaatttgactgaaggtgaaatttcatcatcttttagtgtgcgccatcactatctatttataggcaaccacctaggtttaagttagaattaattaggcattaaaatattgaagaaattaaatggaaaataccctacaaatggccgccatggatatgtgggccccactttggaatattgccattttacaacaatatttccttattttcttaaaaatgtcatttttccaattctaacca

SEQ ID NO: 121327 - DNA, 613 bp, Cannabis sativa
aagtaattattttaaatatataaaactccactaaacaaaattattgataacaataacatacattcttaaattgatttatgattatactaagtattaaaataacaataaaacatactctaaattaaagatagtaaggaaaaaaaaactaaattatataaagaaattgttcgaattattctcctattttatacatttaagtaatttcgaggtctaacattaacattattattgttgttatcttcactacttaagtagggtattttaactccattcttctccaattcgatccgaatcattatagctgaaacccataacacaatccatgcgattattacgagcatagaataatattttacatcagttatctctactccaatcctccacaatgcttcacatattattgttaataaaaatactgaacaacaataatacatggtgaaataccgaaaaaatcttaaccaataattatccagacgagtattggaattgttcctttctccaataaatactttggtgatgaaattcctcaacttatcgaaattggatctttggaataaatcaaacataattcctaaattagagatgaaacaaataattagaatatgtgaaaaaa

SEQ ID NO: 121328 - DNA, 921 bp, Cannabis sativa
atttaataaattaaataaacaaatctaagaaaataactcactttctattgatttttatatcttatcaataaacatgccaaattcatcacctcatgaatgtcgtacacatttttggcaaaatatcaattatattcctataatttaatattaaaattaacaaataatgtactttcattaaaagaatatattgtttaactatccatagtttgtatcgattctaaaagagaaacataataatgagaacactaatataacttaatgaacttcttatatcttctcttgcttgttaaataactaactgaataaataaataattaaatagatagatttccataatttcaatttgcttagaaagcaaattgcagtgaaaagcaaactgaattcagattttacaagagtgaaagaaagtggaaatcaagaggtgagttgcgcggagttattatcaaacgtggttccaacgtgttgaataacaaagccatagatctttctcttcaaacgatcgacttttccggagatcacttcatcacttctcgaaaccacacggtccagccactcattcactcttttcaactgtgacaaaaccgtagcaatggagccacagtcgagggacaatcttcttccatcagtactaccctctccgaagacccgaaaaccagcatcaagggcctcctcaacgaaacgtaaaaaccacattttcatctccaatttcagcttatttccaagctcaacagtctcctccatcccatgaccccttgtccacgacccaacaacttcagcattgtttggattggaaaccattaatgagattttgggattattctttggggagggtgtggagaaagaatgtctttttgacaagcttttatgcagtttagatgaagtttcattgtcttcttgagtagttaaaagggagacaatctc

SEQ ID NO: 121329 - DNA, 1568 bp, Cannabis sativa
tttacatatcaaataaagatagattgataaaaattaagagttctttatcttttttctcttaggaattactttattaataaatccactcccacctacaaatggatgactcaaaagcatggtggcggatggtctttccaatggattggcttcaaaacacttgacgagaaaatctttagcatctttagacatagtttcatttattttgttgttccatctcatacttccatctgttagcatatataaaacaatacaacctagtgcccatatatccgaacactgttcttgaatttcatcttctacacattccggagcccaataaacttttgttcctttcacaataccaggagtcctccaatcatcagacatctttttcgaaagtccaaaatccgatattttagccacaaaatcctcatcgtcgtcttcttccttcaccatcaatatattctcaggtttcaaatcgcaatgaacaatacctttcttgtgaacacactcaagtcctctcaaaatagattttgtatactgtctcactttagtctcagacaatatagtaacgtccataaaatcagctaaacatccaccttgagcatactccaagaaaacattgtagagtttagttttgtttccgttgttgtctgttgtgattgttatgtcatctccaaaacatcgaacaatgtaaggactatcatgaaagagttggagtaacttcttctccttcttgagctcatcactacgagaagccaaagtagttttaacggccataataggatgagaaccatttaaacgtgatgatgttattattggaggtggtttgatcatctcaaccaagtaaacagtgccattataaccttttccaagtagttgacttcgtttccatttacccgtattatttatagagtaaatactttgttcttcactataatcattttcatgaacattgctataaaaatcactttctctacgtaatctcttcattgtttcttttaattaatatctttgttttttaatttctgaatatgtaatgaattatgtatcatatattagggcttaggcattatatatagtgacttaataatagtttcaaataaatacgcgtacaaaaagatttttttacatatcttttaaatttaaaatatctcaccgttgctttccttttttttttttttaatgaatacgttaatttggaataataaatttatttgtttaaaattaaaatagcattattaatttaacctgaaattctatatagattaatttataaatctaacgatcaaaaatcactcagtttagatatttttttttaatgaattatctattacttaaatcacatatatatactagactactatttacgcgcatattttaagttatatttcaaacttaaatttgtacacatatatatcttcatatctattttttttttattattataatatctgagtttgatttaactttgaatatatacttttattttaatttagtggaggaaccctgcatgggtttattacaaaatatttacattaggggttttcgatttatttttttaaggttaatgtatatatttttttttt

SEQ ID NO: 121330 - DNA, 918 bp, Cannabis sativa
caatgatataatagacaatattcacgtcttaacaacgcacaatagtactcataataatcatctctccatacaaataacttctcaaaatttttagagaaaataccacgactactagttccaagtcatgagtcggataccctactcatattatttgagttacctagatgcgtaaatcaccactttgccttcttgcatttgtacacaccctagtccacatttggtgtgccacagtagaccataaacttccattctcccatcaaagtgcataacattggtgttgagatcagttttcccatggttggaaactttcctcacatattttagtccaaacaaactttttttgtttccccatgaggtttattaagggtgttgcaatcttggaaaatcctttaaaaaaaattcaatagtaattaactagccataagaaacttttgacgtctgaagcattcttgggtggagtccaatccttgatagcttcattcttagatgggtctactttgatctcttcttttgacactatgtccactaggaattatactttctctaattaagttcacacttcttgaatttattaaacaactaatgctccctcaatctcctaagcatgattctaagatgctctttatgcctttttgtttttttttacattttgagtacaatagaatattttctatggacaccaccataaatttatctcaaaagtccttaaataacttatacatcatatccatgaaagttgttgggtctaacatgagtccgaaagacaaaacctaaaattcgtaatgtccatagtgagttctaaacgttgttttacgagtatccttgcaatgccctaacatttaggcatgctacccaagatgattcagaaaccctaatcctccaaacgggattactaataaaataagcgtggaaattaaa

SEQ ID NO: 121331 - DNA, 1533 bp, Cannabis sativa
ataagctcattgtcaatagcattgaatacatccttttcgagatatactgtcaatctatcattcaactattgatttctcattttgttgcgcatttgttgtgggcaattaaaataattacaagattttttttttttgaaataattaaaagatttttcttttaattaagaagtaaacgaaaaaaaattcagtatggacttaagcccacactagtctttcattgggtccgccaatggtggaaatgcgaagcattatttaatagttcacaaacataagtttttggataatattttaagggaaaagatatctatttatttttataataatttgtgccaattttaataataataataataataaggataatagcttcaagtatgatagatttatcttttcaaataatactcaagaaatatcttaaaaaatatataaaatttacaactaaaatgaaattccttgaacttatgaaattttcaattattataaaaagcttgccctagttaatattatagacaactacatttttattattaactattatagaaacctcttaaaatgtttgattttcatacaattataaagaagagcaaaaaggaaaaagaaagtacactggatatataaatataatatagctccatttgaccacatagctatggaaatgaacttaattttctttaaaaacaaaacaaaaactatcattgcatcactaattaaatttgaattaaattgccttaaagttttgtgctggtttcaaatgattttctaaatggtaaatacaattggtacatatagatactttaaagtcactttaatgaaatgaaatttacaaaaaaaaaaaaacattttgggcctaagtgaatagttcattaattaagtactaattaattataagcttgattttccgtagctttgattatcttattattctatgagagtaaaaccaaggagcattgatatttagactttcatgcccaaaaaataggtcaagattcttgaatttaataatattgtaaaggaacatatgaaattattaataagagataatacatgcctgtgtatgcatactacaaatatttcattgaattaattagttagacttagtcgtaatttcatttagaccttgttaaagtttttcatggtttcaaaacatggctgaaaaggggtgttttatgatttggaactttaaattaatgtcatttatttgtttatacaactattaaatttctatgttactcattacaaatattatatgtgatcataggctaataactgtaggttattggcttggccacattgttaatttcattattgacgtttgtttgagtatcatttttaatttattctctccctctttgaaaatctcatcaatatttagtattaatacactcaaagtatcatatttgaccaagaaaaaaaaaatagacattcatgactacaacacatttagggctcgtttggtacgccatattgtattgcattgtgttggattgtgttgtattgtattgtattgtatattattcaatacaatattatatt

SEQ ID NO: 121332 - DNA, 1599 bp, Cannabis sativa
  modified_base (1538)..(1568): a, c, t, g, unknown or other
ctctactgtgcaggaaagggtagatctgtctctgatcagccttgagtgctagagttgggcgatgtgtgtacatgttcgggccacactagaccaagcgggttggggtctactagtgatgtacttttgaaactctgattttgtcgcctaggtcaactagtaaaagactagcaatattttgtaaaatattttttgggatcccgaaacatgtaatttttgattgtaaagttaagtttattataattattattttcaatctgttctcaattaaagtttaaattacctgtgtttatctttctagtaatcccgtttaggggattaaggtttcttaatcaccttgggtaacgtgcttaattgttagggcgttacaatggaagttttgttaatgttttcttcaagtttgccttctaagcgattggactaactgaagcagatttaactctatgcccagttcagttgcaaggctttaatagcgacaccctaatgcccatgggtaaaatctaattactgatcaccctcaagggggataacgaggcgagttcattcaaacattcaaactttgtggtagttgactatcctacaacttataatgccatacttagtcgacggactctagtggactttggtgtagtgacttccattagccacttgtccctaaagttcccatgtgagaatgagtgtatcaacaccattaaaggagatcagcagagcacaagaaactactataatgtatcgacccaagttgtatacatgattagggaagaagcgcctgaggcactcaaactaaacgacccaattgatacgaatgttgttccaaagggatatgaagatgagttaggtccaagagtcggacttgaaaagaatttggagctaatggaagagatagaagaagtgagcatcaacgaagataatcccacaagaactctcaaggtgggaaagaacctccctccagccgtaagagaggatgtaaatattagcattagcgaaaatcaagatgtgttggcctggagtaactccaacaagactaggatcaggatcaatttaaatacaattttcaaggctttgaatatccatggggatgcaatttcagtccgtcagaaaaggagacctttagatcctgttagagcagatgcggtgaaagcagaagtcaacaagttacatgcaatgacttcctctaggagtcattgtatcgagcttggcttgcaaaccctgttttagtcccaaaacccaatggcatgtggaagatgtgcataggctttacaaacctaaaaaaggcctacccaaaagattgtaaccttctcgcgtgaatcaatcaaatagtagatgccacagctgggtacaagtttctcacgtttattgattcctactttgggtataatcagatcaaaatccatacatctgacgaggaacacacaagttttcaaactaacaagggcacacaagtttaaaactacagaagctacatatcaacgaattgtaaactgcatgttcaaaggacatttggaagaaacatggaggtgtatgtgttggaaattattttnnnnnnnnnnnnnnnnnnnnnnnnnnnnnnnttattaacatcctaaataagaactttctaaa

SEQ ID NO: 121333 - DNA, 1412 bp, Cannabis sativa
aattatgcattggagcataatagtaaaagttaatataaaaatattaaaactaatttttgtgtcaaatatagctcaacttttacatctcctattagataaagagggttcatctaataggttacttttttacaaatttggaagaagagaatacaatataatttattatgtggtaccaatgagaagatgaagataagatatgtgttgttggattaattccccatataagttaactgtaacagttattaaagttaaaaaaaaaaacagttagttaaaatcctaactaacctatccgcatacaatcccacatcaaggcagcgttagttatttctaactaaccttttcttagctaccacatatataaatagaagaacaaaaaatcagagagacttacagcttaaaaacttcttcctagaaatccaatccagagaaaggaagaaaattccagacctagacagagagagtttctctcgtgtgtaaacagaaagagaaagagtagaattagagaagaagagagaagaagaggatcgattagatcctgagaggaagaacaataagataaattgagagtttttgagagatttgtacatacctgatttggagaatgagctaccagacgatacatgtgtcttggagctcagaaacttgatgtaatcatcgatcttgatagtggattgtggttgatttttctgtgaggcagctcaccaaggacgtagccccaatttcaggggtgaaccttgtaaaaatctttgtgtttgcaatcgctctctcaccctaatctctttactttcttattgtttgttgctgcacatgtgtttctgaaaccagttcatgatcagaactggtttccctctttaattcttttcttcttcactcttgtattgattttgccctaattttctgcttgtccttcgaagctctgttcagacaaaaagaaaagattagtaaagtcaattataagagaaacaaagttaaagaatacgtgtcatttgtgtgtgaaccaaattcaaataaaaaaggtcaaaattgaccttgcgtaataacttgtgtgtgtgtgagttgtgtaggttaaatctgtaaatttcctacatgtgtgaataatatgacgctaaaatgaactttttttttaaaaaatgtttctcgatttataatttcgtttatttgggtttgagatgattccatccttataaggaagagaaatgttaaacttaacacatttttttagtgttatattgctattagtataattaaagatcgagtttcatataacttaagaaaataatttttaaaaaatatcccgtaatacatcataagttgttgcacacgacatatgtctaataacaatactgattgttaggttatttttagtattaattttagattaagtttagtatatttttaattgagttttaatc

SEQ ID NO: 121334 - DNA, 1347 bp, Cannabis sativa
cgaacaaaaatacacccaagtatacctagaatggtcatccacaatggtaatgaaatacttgtgtcccccaatggtaagagtattatatggttcccatatatcaatatgctcaatattaaaatattctttggcaatgttatgattagaaacaaaagtaactttctttgttttgcctagtgacaaatagaacgatgcaagttaggacaagattggttctgaaattttaacactttattcaatgaatgtagtttaatacaagagggatgccccaatctataatgccaaactgtatcattattgattttggaattagaatctaaagaaaagacaagaaggttgttattctcattaggtggcttcaagtaaaagtgtttccattctcttttagccatcccaatcaaatgggtcttcgaaatgtcctgaatcacacagtgatcacaatgaaaagtgaaaatgcattcagcagattcaagtaaagaaggaataaaaagcatattgaaatttaaatctagtacatataggacatttcttagaatgagatttttggagattataacagttccaagacagacaaatctaactgaattcccattaggaagattgacaaaagaaatgggcttatctgtataggtattattgaataaagatagattataacacacatggtgagtagtaccagcgtcaatcacccaagaaaaaggcagatgggagggaattttacaagatatttgtgacacagatgactggccggtttggactgaggtgtgttgttcaccaactttttgagacagaatgctcatgagcctttggcattgggcaaaagtagcaatgagatcttgctccacaagtttaccatttccattgccatttctatttctattgccacttgcctctccattttcttgtgcattagtaagattagcaataggtgtcttgcctggttctggtgcattcctgttgagaaatctcccatataatttgtgtccaggaggataaccatgtaacctataacacttagtcattatatgaccagtaatctcgaagtgatgacacaatattttaggtttgtgtggttgaacacttcctgcaaattgtctaggatttcagttcaaagatgaagcaacaatattttcaatttcaacattatttgatgtgattgctcactgcctttcctcttgaaaaaataaagcaaaggtcttgttgatgctaggaaaaggatcttgcatcaagatctgtgatcgtgcactactgtaggattcattaatccaatgagaaactcaagtacacgatcttcatcttgacactcttaaataatttttatagcaccacaactagaaacaggttgtg

SEQ ID NO: 121335 - DNA, 1171 bp, Cannabis sativa
agatcctggtaaaataatttctaaaagataaatgatttgcctcatcaagtttcttatgattagttcggtggatgcctcgctatatatttttcgagggtactttgagtaacttcacttattcctttaaaataaacgaatcttgtccttagatctgtgcattctgaggtaggttggtgtctcttcaacatagttattaatagttttgtatccttgtctcgcttaaaactatacagtcagcaagttatgaatatactctattaattttatatttaatgagttatttctttttgcattaaatgatacaacattatgtatacaaagtggttcatattccactaattgacacgtgtcatcctctaaagtgtagccaaattttgggtataacaaaaagcatcttttgatttctcaaatcaaaccctattaattaaattatatttaattatttaaataaaatatctataatcaaattcagtggaatctctcaaccacttgagaaaatatctcaactactttgaaatatctttaactattttttatattctaatatttatctaattaaattaattaatccaaaaaaacaaaaccaatagggacaccctacactagggtgtgcgcctaccatgtctgatttaggacaaggattgtatcttttattgagaaaacttttgtctcaacaaatattttcttgaaaatttttgtcttaacaacttttggttttctctctatttaattaatttgccataattatctatttattacaaagataaataattactatttttccaattcaaaataagtttttttgaacaacattatactactcttcatcgcttcccttgacaatgtttcaaggtggtgtgattagtccatattcgtctgataaatatgatcaatctatgtattaatattcttacattgattctttaaattattgattagtgcgattttaattgttttggttattttaaagactaatcataaatttgacgtcttttggagagattttggcatattttggtagaaaatagtggaagtcggcgagctcagtttgacaaaactgaacgtaaatgagatttttgacaaccttggaagcagaacttgttggattttgtgccctaaataaaatccttttcaatataatcagatttagttattaataaagatcagaaat

SEQ ID NO: 121336 - DNA, 3293 bp, Cannabis sativa
actagagacttaatccgcgcttcgcgcggtgttagataatatttgttattctttgtatgttgtaattttttttttactgaattagtgatatgatataaaacataatattatattgtgaaaattattagatttttttatgttttttatatttaaatgtgtataattttagtgataaattcaacggttttaatattattctttattctttttaaattaaaagatatcgttttgaattaaatatttaattttaaaacatgttcatcttttttttttttcaatattttgtacaattttttaggataatcttttagcatttcacatgaatattgaattatttatataattatatattacgttatatttttcaaatagaataaaaataactattaattatcctaattattttttaacttaaaaactttaactccaaaaattgtcataataaaacgtatgtagcataatatcaaatattattattgtttcggttgtttttaatattcttataatcatcattattgttgtcattatcgtttaattgtttttctttaaacacaaaacttatataattaaaatattaattaattaaaaatatatatttaacacactattaaataatcaagatgttatagttgtgattggctttatactattttgtttttttttttcttttgataattagtgaatgtcttcttacaattggttaaaataggcataattggttgttttgtgaaaaattacttcattaaaacttttgaaacttgtaaagaatcttctctcttgtaggatttccccaataaaacttttgaaacccatacaatagtcatgtaataataattctattacaacaactcaactattttgagtaaatgaactaattaaccttgcctaaaatcattgtcgaccaattttaaagacatcctaaaattaattttaagatagttcacaatctttaaagtctttaaattttgacataatgaaaactacacaaaaaaaaaattgaaagaagctcatgaataataacatatgtcacaaaaagaaaaccaaaataaataaataaataaataataatattctttattacaaacaaaataaaaatagatagacatacattgcctccaccatatttgacccaaagattgtgacactcattatgacatatataaataagatcaagtgtcttttgacactttataagtgagattatcgattgctcatgttcttactacttttctaaattttggagctttcatatattgatatgcctacataataaaaatataggatacatataaatgcaaagaaaataataaaaaattattattactatatttattattttgcaagaaggacatcactttcttaaaaattaagaaaaatagttttgaattagagtttgagaattccataacaaaacatcaaattacaaaaaaaaaatcttcctttctaggaatttatgggttagaaatgagagaagaaactcaataataaaaaaaaatgaaagcttaaacaaaaatataagctaaaagtggttttatttttaagaaattcaattcaaagatatatgctactgaagggtcacacagatactaacacaatacatcattaataatataacggtcacttcaaaatactttacaatttaaaactataaaatttattactctttatatttgctctaaatacataaaatgtttacctgtgttgaaatgttataacataaattttaatagtttaaggtatacattgttctttttacatcaaagataaatggaatgattaatatatgcattttttcatataactaatgtaaacatgttttttttaaggaatacaaatagtttttataagaatgctaatagtttttattttaaaaaagaatatttacatagttttattgttataaacatatttttttagttattttttttttggacaaaatatgaaagtctaaaaaaaacattaaaaaatagaatggaaaaaattgagaatatcatgtaaataaatttttgccaagggtaattgttatatttataggaaaatgttaggtggggatgtccctatcgtgtaagtagggatgctttttggtaatcgaataacaaagttaatttgcgataataattgaagaataaaattgtgtacaggcgtcttaccattaaaaaaattatattcactctaattattatcctatttttgtaagttgttgtattagatcactaatatatcatataaagttttgccatccaaattctcttaagaatacaaaaatttatgtaaaaaataaaaattatttttataaaaatcaaaagatgaatctattctatcatctatttaattttcaatttcaattaattagaaattttactattaaaatagtaactaaaaaataagaaagtactacaaacaatgaaatattatattggcctttttattatagattaaaattaaattgtaatgaaatatataaatttaatttaatagaataaacaaataataaaattgttttatttttttctactctttaaatattgaatgaccataattatataacaatgacaatgacatacttaaaatgcattaaaaatgttaaaattttgagaacataaaaatacttaccaataaataaaaaaaaaaaaaaaagagcatacttctcgtaaggtaaaattttgagagcatgctttcatcattcttcgagcctcacacatcatgttcaacttttggttatattttgaatttttttactccaactcacatcaatatataatatataattaaatttttttaaaaaaagagtaaatttagaaaattgagagaagagaaattgaaaaaaatgacatataaactgccacatgactctcctttatatatattgatattgtgattaagaactaaaaaaaaaaaaaagaagtagaataaacatgtgtatacaaatatgtatatagagtgaacttaacattttagtatctgtgtttcaaaaaaacattttagtatctgaaatacttagtttatattttgaatattattgaatcatatatcaacataaaaacacttaccacaacatcaaattctttgattataaatgatccaaaatgttgactaattcttgagtactgcaaatataacataataaataaaaaaatttagagatcaatgccataataaaagaagaaaatttaaacatatgataattaagcttaagagaaagaaaagtaaaaaatagaaataaaaaattagtacaaagaacaaacgatggctatgatgaaaagtaaaaaggaatcatatatatatatatatat

SEQ ID NO: 121337 - DNA, 933 bp, Cannabis sativa
agtggttaattgcttaattttgtgataaaagttttaatttaccgaaattagtttaaatttccaattcacccaccctattggaaacatatcttgggctaacaaaaatcttttaaaactttttgggaggggaaaaaaagaagaaagagagtaggtaagccaagggaaaaagaagaataaagaaatggtaaatactattttggacctcgtgttttgtaaagttatcaattggaacctctgttttgttaaatgacaaaatagatcatgtatttttgaaaatagcacaaataggaccctgaattgatttttttgtcaaaataaaacttaataataattcgatctagacgtgttatgacaagactagttacattttctgtatgtgtttgtattaagatttgtcttcaagttggttatactaaaaaaaattattaaaaattaagctcagaatcttatttttacagttttaaaaaatataaggttaattttgtcatttaataaaatagagagtccaatcaataacttttaaaaaatacaaagtataaaataatatttaccctaaataaattaatttggtatacacactctatattaattcattaatgagccctaatttagactatttaataatctaatcacatttttgtaatatttttgaatttttcactttctcatgtaatttgattttatttatttatatcataaaaaattaatttttaaaatatttttttttatatataatataatttctacataatcaaacccatctaaaaagtctaaaaataaaaaataccatatggccaaatttgagcctatgtattcttagttttatgggctattttcaaaaatatgggaaaaattattaagattatgataaatatggcataaaaagtaaatgccactaaatatgacataatctaaccaatcaaactaaaaata

SEQ ID NO: 121338 - DNA, 1585 bp, Cannabis sativa
tctctctctctctctctcgaattcgacccaaacccaccaccaagaaccgtcgccgccaccaccaccaccgcctattttttcgtctgactccgtcgcatcgaccacaaaaccaccacgaatcttcgccacgaccaccaaccgtcgccaccaccatcaggctgctcagtaagggatcccctcagtaaaaggtaagtttttttatgaaaaaattaaatttttcatatatttggatgctaatttttgcatgtttttgagattagttgaattttttgtggatttgtgctctttctggatttaaattgtagttttagatatgtttgagttgtgtgtgtgttttacagtgctatcgatgcgatatcgaccaaaaacaaatgggatctgagtgtttgagttaactgtttatttttaatttgtttggtgtttattgataggatgtcgatatgatatcgacgaagttaaaatggatagtttcttcgaggctgactgtggttttatcaatataatgttgatatgatatcgatagtatgttgatattatatcaaagaaaagaaaattaaactgagttttatcattttcatatcgatatgatatcgatgggatgtcgatttgatatcgatgaaattaaaatgggtagttagtttgagacttactagggttttgtcgatatcatttcgatatgatatcgataggatgttgatatgatatcgacaaaatatgataatgatctgcttttattctttgattgaatgtcgatgcaatattggcatattgtcgatattttgtcaaatttttgtatgtttttttttattatttaaggaataataattttgtcgataggttttcgatattttttcgattacatggctaatttttttcccttttccagatgcctccgaagcttatagttccattcccggagcattttacaggtcgtgtgacctacagaggcagtgttttttttagtaagtttatcaaactagaatttgataaacacggtttggctgatagggcaaaggcaagacctttcagtcaattttggcaggctggtgctctatcattttctttagtactattctaccaactgatgctgcataaaatgattgtgaatgctgagaaggatgacgaaatgcagttttacattgcacggaacgagatgaaatttggtgtggtcgagtttgtgctgattacaggcctcaacttcacaaaagggccaacagacgatgagaaagaagtcatgtcagggtctgaccggttgataaatatctatttcaaccggttagataatgtgaagatagaactatttcagaataagttcctagcctacgaggtcttgaaagacgcatacaaggtagggttgtgcttgtttgtggagactgtcttactgggctgagagggaaatgcatgtattacaactgacatactaaaatatgttgaagatctcgacttttcttcaagattccaagggggaactactcatttgccagactgatgcacaccctccaaaaagacatgttgaaacagaaggcaaattatgagaagaagctgaagatggatgttcagcatgaatgcaatgttgggttttatg

SEQ ID NO: 121339 - DNA, 711 bp, Cannabis sativa
  modified_base (26)..(54): a, c, t, g, unknown or other
aagttcttatttaggatgttaataannnnnnnnnnnnnnnnnnnnnnnnnnnnngtaaaataaattccaacagtacttgccagataaactacattgtataaggctaggtattagcgaggtttcatcttaagtatatttacttggaaaaatgctgagtcttaaattgtacatccgactataatagactcaccattatatctcatataggatttctaagggaaccacatataagattacaattgtatatgcctacaaggtcgtcaccaaacccttgtcgaggtcaaacgagaacaaaaacttagtcgctcgcttggaacattagccttggccgcctaggattcccaagcttagagagggccagccagggttccatgaccttacaaagggctggctagggacccttagcccaggcatcggccgaccagcttttggggtaccccctatggctagccagctcccatgagaaagactcatggctgaccaggtcttgaacaagacccctatggtcggcttgggtgtgtttcagatctaagcatgtgttttttaagaactcaaatacgttcttcatgttctttgtgttcttcgtgactcaaagagtcaagaatcacaacgaaggtcaaaattagatttttttttgttagaaaattacacattatacatcctaagactatcatgcggatcaaaataccaaaaagattacaatctaacgtg

SEQ ID NO: 121340 - DNA, 808 bp, Cannabis sativa
aataaagtaaaagaaaaatcttactggggcataattggtaatactttttacacctccagctccaccaggagaggctcgatcatactcttcttcaacatacaagttcaaagctgcaattccctccttttaaatcacaatataatgatgtatattaatatatatatattttaagaaaaaaaaaaagacttaattcacattctgaaaaatgtaatagtaaccttgaaatagttgcgaacaggggaagcataaatgaggaaagtgtattctggtgatggagccaagcccaatataggaccacttccaattagcataggcctaatatataaggacccttttccaggaggaggaatctatacattttgatgatgagaattaattaataataataatatattttaacaacatatataattatgtgtaataattaattaagtagtcgtacgtacccaacgtttgttggcaagaacagtttgtttgagtgcatggagaaattgattggtggaaggtgcgggcatacagagtctgtgtgcaccttccctcatgcgaatggcattttggtctggacggaatagaaggactcttccatctgaccttctttgagcttttgttccttcatacactccctgtacgtgtataattaattctctcttcttttattaattatatattactttcaaaattcttaacatcatcattctttttaggaataattacatgaggtacaattttttgtaaaatatttatatttttacgttcaaagaatatttttttacatttttacggttttccaaaaaataacacgaaaaca

SEQ ID NO: 121341 - DNA, 1249 bp, Cannabis sativa
taaaaaaaaaaaaaaaagtccccaagtatacaaagtccatggaatgatataatattccattacagaatttcaacttctggaaatgcctcgagcgaccatccacttaggccaaaaaagctcattcattatgtacaccgggccaacgtccatcccaatcttaataaaaaagtactaatcaagttttttttttctcttgcctcaagcttttcacttaatatataatcaagaaacaaaagtcacctaaacatccaaccacaccgctccatccccttgttctcctctaaggctggccacatccactatgtaggcgaaactcatatatatcttcggctaatcagattcagaagtcgaattcccctgttgcctgccattggcacaatttcagtaagagagatggcgacaaacacctcatgaaactataccataagattgttcagcacatcctaaccttattaaagagaaggtctttattgtttatgtgcataatgccatccttcaaagtgcatttccacctgctcttggtgcgcgtaacctacccaatcagattagatacacaagattttacattactagattgaatagccgaacaaaagaaataaaaaaaaaaatcaaaatatcagaatagctgacttcaacaacacagtgaagagagagagagttaccttgtcgaactgggccaaaactaaatgttgtgtatttagctcctctccttggtccacatcatccaaatcatcatcatcattttcgttcaatggaggttcatcatcatcatcctctccaacatcttctggagcaggaatagcaggagtgctggctggaatgtctgaaggaaagagtgaaatagagagagatcaattaaaaaaaaataataataaattccacaacaaaatgtcaccaccataaagaaatatgccatcaacttggagttaacaaaaatgatttttctttatatcccaatacttaccattgggtgcaggtgtgtttgctatgttgtagtcctcattatagactccttgataattgtatatctgtaaggtataggtacaaacaggagtttacaacaataaatgggggaaagaagagagtaaagggaacagcattttaatggtactttacaaatttcttagtacataagcacagtgacgcaactttactaagaatgcatgcacatatatgaacaatactttcctcgcccccccaataatgtagggctaggcggggatcctagttacaaaaaaaaaaaaaaaaa

SEQ ID NO: 121342 - DNA, 968 bp, Cannabis sativa
  modified_base (60)..(70): a, c, t, g, unknown or other
gtgcttatttcattgttttagaaattcatattagcatgttaatgaaacatacttggtagnnnnnnnnnnncctagtaaaataattccaacagctccttggttgaggctcgacacatgttcaagggggctgttatgcgactgagatagtggaggcaatgggcatcaaggaggcacttagctgggttaaaagtaatcattggcaactagttgtgattgaatcagatggcttactctcaattcaagctattcactgtgatcaagtgatgagttcctcttttggtttaattattcatgattgtcgcattttactttcttccatgaataatgttaggtttattttttgtaagactcaacaaatcaaactgttcattttgttgttagaaattctcgatactactttgattgtagcattttcgagcataatattcttgatgaatttagtgctattttgtactcggaatgttaagtttaattaagttgatatttcaaaaaaaaaaaaaaaaatcatcaaatactattttaatcaaatggaaaacttccattatctaaaacgaaggtagtaaaatctaaaacatcttgcaaaaaaaaaaaatgcaccaactcatttacaataaattaatcttctcattaatcaaactttaagctaatatggatgaatatgaaaattgatacaaatcatcgtcaagacaatttagcttgtgatgctttagcaaaatgggctagagaaaataatcagtgtaatggctacattttaagggagggatcccctattgtgattcccaactttttattgcaatgaacttctcttagttctttcgaaaaaaaaaaaataaaaacattttgaactgaccatagcgaaaaaatttggtggaacatttctaaataccgacataatttgagattgatgcagtaggtgttagataaattaacaattaacccaagatctatttgtatataacatagaacac

SEQ ID NO: 121343 - DNA, 1442 bp, Cannabis sativa
gctttcaaccttacaaaaccagatagctcaacactgggatggaaggtttaaggctgttatctcggaacatcattctgatttattcctgatcacctttggctgcattggggacaagattcgggctttagagaaggaaccgtggcatttccaaggtcaccatattgttctgcttcaaccctctgcattgaattcaatcaccccacaacaaatgattttctcacctttttgggttcaggcctatcgtctccctttccttagtaaaactcaatttcttgctaaggctttagggaatcttattggagaattcatagaagtttatcaggattcttgtttcgaaggatggggactattccttcgttttagagttcgaatggatattactaagccactgctgcgagggaaaatgatctctcttcccaatattaaagatgaattttgggtggaattccgttatgaacgtcttcctaattattgtatggagtgtggacgaattggtcatgtttttaacaagtgttttgttcaccttgaaaatatggacaatgggattgaatctgaactggcttatagaccgactcttaagggtgctcctttgcctacctcaagttatgatcgatacagatcagatttttctaaaggaagtgcttggcctctcttgacacgcctggcacgatccacccttactgctactctcccacagttaaacaataggcctctctttcacccgaatccactcttacaaggagagtcctctaacacaaatcagggtaaccaaactcctcctttctcctctgttattactcaaacagccactccggttgcatcaaataccaatcccccagtacctgtggttgcgtctgcaaatgtgtctgctgcagcaattcataaatctcctgttactgcagcaaattctacaagtctttctcttggcactccaccagtttccaatggtacttctgtggttcatctcaaagatgatttcactcctgacattggtactttcactacaaatcatacctttgccacataccctccaattcttacttttcctcgcgaagcaaagtgcgaggatatcactatggatttctcttcaaaaagggctggcaaggctattgctacaaccattatctcacatcagccttcttcttcttttgatgacatggatgattttattgatcaggagaatactaatcccaacaagacttttaagaggcagtttgacagtctttctctatggaaaactctaaaaagatgtcgtgccactaatgtccaaagtgcttcctcctccttagttgaagcatctgctaacccgcaagtttcaggctctggtgctgattttgctggtttggaggattattcagcggtgattgctcagcaatcccgcccttcatcatgaatatcgtaagttggaatgcacggggcctggggaatccgagtgcattccg

SEQ ID NO: 121344 - DNA, 1576 bp, Cannabis sativa
cactctttccctacacgacgctcttccgatctaaaaaaaaaaaattaaataataaatatagatagaaataataaactgtcaacaaaatagattttgaaaattaagtgctacacttcctcttagaaattttgttgctctatttaataattacgtaccggtaacaatcatgatgttgaaaattggtggtggcgcatggcaatacgaaacggaagctcctccaaacttttagcctttttatttatgtggtcccacaaacttaaacatgaaaaatatcatcagtctcactccaccactcaccacctatccaacattagagactacgtggctgattttcatttgctcagcaaataagaaaaaacttaattccttcattcccacccactctcacccccacggcgagtgtgtatttctttaatcattcttctgtacaattacaaaactacaaattaattgatcgaggcgcgtgaaaccactatcctcactatttacgaataatatcccatttctcttccttcctaattcagaactcttattacaaattgacaatcatatatttttcttattataatattaataaattatcctcaataactgtgggctttcgctttataagggtgtacctcccctacattctcattcatacactctcaatttttccagccatattttatagagaagaaggctaagagatgggttcgtatcgatcttcttgttcggtgaccatagccatggtcgtactcctcctcttcacgatctttgccctgtcgtccgccctggatatgtcgatcgtctccaacaacgatggatatggtgagaagtcgacgggaaggactgacggtgagctcagagctatgtacgaggcgtggctagtcaagcacggcaaggcctacaacggcttgggggagaaggaaaagaggtttggtatcttcacggataatctcaggttcatcgatgagcacaacgctcagaacctcagctttaagctgggtctcaaccggttcgccgacttgaccaacgaggaataccggtcaaagtacctaggtaccaagatcagtggtaagaagaggatcagcgaacgttatgcaccacgaatcggagatgatttgcctgagtccgttgactggaggaagaaaggcgctgtcgtcggtgttaaagaccaaggaagctgcggtgagctcactgtactatttatttgtttcttcttaactttatcattattattatttttaaaaaagctgtggtgcggcatattataatttttttaagttatatgaatctcatatttaattagggtctacactaataataatattagattggcaggaatgtagaatctctatctaagaatatactaaattatattctaattgggagattataactaaatagagttacactaagaaaaaaaaaattaaaaaacaaaaaaatatcaatgtaacaataataacaataaataatttttaatactatatcataattttagaataaatataatttgatacatgtattataatttgaaataaaattatgaattttatataaataaatttacaaactacatgtatatattttatta

SEQ ID NO: 121345 - DNA, 1054 bp, Cannabis sativa
attgatgttgaataaaatagattacatttaaatggagttttatttagggcataaaacccaacagatttaaacctggctaatgagtacatcattctttggttgatcgaggatgcgattaatgcgtgttgctattggaaactagacaggctgcctattgctattaggaactagacatgcaggtggagtactgaaaggttggctcagaggttgccttagttttgttgttgttgcccccatcatcagtttcttagcaactagggtgagatattttaaaatttgtttgttaaaggtatctactagcagcgagatagaccactctcaaggtgtagtaagttatttcttatgcacttggtgttcaagcataagttattttcatcagcataagtgagctgaatcactattaaagagtattgtggaaagactcgccagatcatttgaataagggtgaaatcgtaggttgttgaagaactttgctcaatgatttcaactcaaccttgttaaagtcttaagaaaactccaagggaggaaaaagaaaaaagaagatttcactaaacccttgctaagtacaacgtagcatcccactcccaaaggattttctccaatcaattaggaaatctctgctagatgcagcatcctgcttctagagatttttctataattgatgacacttttcttttctttttgatttttgtgatttgaggaggaacacttgcactaacactaacactttagacttaataaacttggtcattatattctcgtgtgaccttaagtgtttatgtattaaaccataatagtgcaaaattaggcgtgcatatagtttgtatgtgtggttgatcaacttaatgaactcaccagcactcacattagcattttaggattaagaaactctattactagggataacaccaacatttccttaaaccatagaaatactagctcagttgtgcaaatttttttgaatgctcatgtcaacatactagggtgtatatgccttatgagtgatcaaaaaatttaattttaaaaaaaagtaatatctgaccttaaatttaaa

SEQ ID NO: 121346 - DNA, 1707 bp, Cannabis sativa
ttctatggactccggtacgcttccgctattccttaatcctattgtttaattctcatgaattaactagggctatatacagatttacagtatttctaacaatgaatgcatgtgttttacagttttagttttactgatcacactatacttgcaacgaaaaacacaaagaccattgtttgcaacactgatcacttaaggtatggtaagattggatcacttactagagagggacagccaagatttgcaaacatacttgtaacgtaccatagattttgggtctaatcttgagttgaagttatattttcaatgttttcatatggtaatttcgaattacataacaccatcgccatttggatatcaaatcaaatcaaatcaaaacaaagagttgggaaacaaattaatttcgttatttatacattttttatttcttttttcgattgtcattataacttttcctaatttaaaaaaataatgatatagtctttttttcctaaaagaattatcagcagccccactaactaaacatttatacggtgtgtttcatatggtatatatatatggtatgttttaggtaagggagatgatatttatacctccaaaaattataattataccccactttatttactaagagggtattatttaatacatcccattcctccaacaaatattaaacaaatattaagaagataatttatgaagagtttaatatattatgtgcacattgtacttttttttcttctcattttgtatttttttttcaaataaatttatataattattaataataataaatagagaaagattcacatatcattttcttaaacaggacaactatattaggttgtttcacaccgtgtttcgcaatcaaatcaggggtgctccaattcaacattcgagagaatctagtccctttacattgcccatacttcttctccacttcctgtaagacctcaaacacccaatattacagggctggtgcatatccgtacacattatacttcgcttctggttaagcaatctttttctccttcttggatttcttcttcatttgatctttcttacttgagatcttatccatatagtttttgtctaagttgctgcatatttttagctgtggaagacaacaacttctgataagaaaggaggaactaaaaatactcaaagaatttgtttacattttctactaacttcaacatatttgtcaagatacacacaccctcaaactgtggcatcaaaatgccttcaataaatgcacacaactgcagcttgtacacatcttttacaacattacacgcctcaaaagctagccaaaggattttaaaggtcaccctttttgcattattgaaatggtctcgcagtgtccgatcagaatcgcattgtggttcaattcttttgtcgaggggccaccactcatctttagtcctgtgatcaaaccgaactcagactgcccaaatcttgcttttattttacccacgtaagatcacacttcatcgttttagacatcactcatttttcttttacctcaataacaattgatgaacaatcaccccaaaaaatttctattgaccaaaagtcaatcattcacttattttgatgataaacaaagatttgattattgcttgttactaatcttttcttgatcattttgcaagcaagttcacaaagtatcaatatttgctcggtaaagtcaaacataatcaaagaagt

SEQ ID NO: 121347 - DNA, 2284 bp, Cannabis sativa
  modified_base (45)..(69): a, c, t, g, unknown or other
taaatcatgtgaacaatgctacataaaatgttatttctgatcttnnnnnnnnnnnnnnnnnnnnnnnnntgaaatgggttttatttaaggcacaaaacccaagacaatgtgcattgtcctgacaaagacataagacaagtcaaatgaaaatagatgttatgttagtgtatgatagagataaaaatacttgtgatttttgaaaaaatagttagaatttttgagagaaacaagcacgattcaattacaaacacatattctttaagaaaatcaatcaacaagtaagagtttgatccattttttttttaaaataaaccgtgtaatatttttgctgcaaagtttcaaacatatgtgtgtgataacgtatgcaagggaacattgtccatttgacaagaaagttttttttaaatgtaaaaattataacctatgaagacgatgtcacactatacccatggtagcccttttttatggtagcgtatcttcttcataattgcgaattactaagtaccaacttactcaaaagatggcttttacacactgatgtaggtagctctattcttgcataggagcttgaaataatgctacacaaaggatgttcaaacattaaccattgattgattgactcgaatatgcctaggagaaaatgattatttttctctcaagaaaaaaaattctaaaatcacaaaacacaagtcaatttatctttcaaaacacaattttctaaaatcacaattctattttcaataattaccaagtgaaattattaaacaatttaaatgatgcagaactgtagtaaaattgtttgaacaaaatttatctctgttcaatcagtcacaaaattcgacagaacagaaatatactgcagaaagtaaaatgcagaaaattaaaatgacacacaacattttatacgtggtatcaaaaactcttttgaatttctcttagcccacgggaccacacccagaggaagaaatttattagatgaatttcaagtgtttataaaccaaattgacttatacaaataaaaactccctctttgaatttgtcgcaactgttgtaatcaattcttctaatcaaatttttgaagtgtcgagaccttgaactctcttcaattcgtagtacttggacacttcatctcgaagagtgtctcacgtgcaatcttcctctcaaagagtgtttaacttgcaatcttcctcccgaagaatgacgcacttgcaatttcctcatgaagagtgactaacttgcaatcttccttccaaagagtgactaactcgcaatcttcctcccgaagagtgactcacatgcactttttcatcttgaaaaggtgactcacgaacaagacttctcccaaaccttgattaacaatatccaaggtgttcaacctacacaattttagtaagaaacaatacatagtagcacaataataaaatactaagaacttgttggactcaagttcttcacacaacaaagaaaatactctctaactttgaaaagtaatttagaattgatacaccaagagagctaactaataccagcaacttaagggtgtattttatacactttacaaactctctaggtcttggtcaagcaaccacgaaacgatcaggtcattaaataaaaatcttcccaaaaaggaaagccaaaatctatttaaacacacagtcaatctgttcaaacaggtacagtgaacttggatagtttttttagcaaaatttccataaataaataagacaactttgactacatttatacccatagttatgcacggtttcttggtcaagaaatcagattaaaaggaataaaatatgaataagaatttccttaaaaagtaaagaataagatcaaatattatataaaaggaaaactttttaattcacacaaagtcaaaaagaaataggatttgattttgaaagccttttcacacaagaaaaagaaactatattttcgaatttaatgaataaatatatagaaacaatttcaaaaataccataagtattatttttgtctattttatcaaatatgccaataaagaattttacaaaattgttcagaactttttaaaaatttaagaatagctataaataactacaacgtatataatcataaaaaaatagattaaacttttttgaatgctaaaatatataagagtacatcgaaatgagtattttaggatgtatactacagaattacccattattatatatagggttgagatgcaaaatgaccttaaatttgaaaactaagttagtaaatgtccctttttaaaaaaattaaaaaaatgactaaatat

SEQ ID NO: 121348 - DNA, 887 bp, Cannabis sativa
gtttattttcatcgttttagaaattcatattaggatgttaaaaatacacttgttagtaaatttagatcctggtaaaatatactctaacaaggtttggggtttagatttgagagttttgtttatatgtatgtgtctgttttgttagatctaactttgatttcatttttttttctgtgtgattttggaggtggtggtgtcgtgttcgtggtggttgtggttgtgaggctggaggaggtggtggtgccgtcgtgatgctggtgggtggttgtgctttagaaatgaagaagaagaaagcaaaggaaaaaaagatatgactagatgaacaagaaaggaaaaacaaaagaaacaaaaagaaaaaagaaagattttttattttaattttttttaaaaaaaaaaactaaaaagaaaaaaattgatttttttcatttacaattttttaattttaaattaattttattttaattttttaaataatttttaatatggatcaataaaattgtgacatctatacactatgtccacatagatgtacatgtggacagtccaacatgacacttaacacttaaaatagatagaaatattaaattgctaatagaatacgagtattgagagttttaccgtcaaaatttgaatttaaaaagttaaatgcaaacaaaatgaaagtattagagattttgcgcaatttacccttttgttttttcttacaatatgtatagtaattagtaaccttgatctcttccgcacaacattttatatatataaccctattaagtggagagcttatgcttaaaacttttttttgctaaactaaataaaaaatactgatgaggggttcaagagcagtcgtctgagagtggttcggttcggctcaacgacatcctccgttt

SEQ ID NO: 121349 - DNA, 1872 bp, Cannabis sativa
taaaataaatgtgaaactgtatttttgttgttttagtaataagcatacctcggaagctagacattgtacgtgagcaacatacttgcaatcttcacaaatgtatgcacaaaatcttggatctctttcggtttcgcaaatatcacaataacattcataacatccatcattgtcaatagcccaatcaacaagaacaagagggtgtgtgtgatatttgtattgaacaattctaggtaacataccacattgtaaatggactttgaaaccgcaatccacacaacaaaacccacataatttggtactttttttggagcactgagttcttacaataagaatcatagccatcacaatagtcgaaattagtaccatgtattctctcaacgaaataaagagaatgctcgtggtacttaaagttaatgggcttaaacatggctacgacacaacttacacaaaaatgaatgttacactgacgacatttgaaagagaagataatagatgaattttcacataatttgcatttactacatcgatggctagaaatatgaaagtataaagtgtggtttggataagaagaatgaccttggatttgttcgggcaaatttgcacatgttttgtgcaagaagcacacacagtatttgcaaccgtaagcttcattggagcatgtacggctacaagcaatgcatttgattcgaggattttcacctcgaatcgaaataagtggcataggatgttgatgtgtaaaatgttgttttatacgaccatgatgatcagaatcctcaaaatcatgatcatcattgctgagcataggaggcatcttaacacattttacatccatgaagaaattacatttcttacatgtgaaataaggttgattattgtgttgcttgtgacaggaattgcatatgaagaaattttttgtggtagataatttaagtgggtggggaggatggaagtaatgattgatttgataacattttttgtggacaaaataatcgcaagaattgcatttatagaaagaaggttcgaaaatatcttcatcacatatatcacagcaaaatttctcattggtttcttgttgtaataagaccaaatgatgtgagtgtgagttgcccattgtcctcagtcgattgaattagtccctacataaatgagcaaaagaaaattgacatgtaaaattaagcattgtaatatagatatatatttgaaagacaaaggaaacaatgaaaacttaccaaatatttgcaccaagatatgatatacaactgaaacacaattcaaaaaaatagaaattaaagcaatgtagcaataatggtagtttgtttacatttgaaaggaaatcaaatgatcatgatgaagagataaaagataaatgaaaatattatttatcttttgattgtgatgagaatatatatgaaagtaaaagtattcatatgacatgtatataattgaccagaaatgtgactattcctacttttgagattttatattttttattaatattatttttcaaaagtataaagagtaaagaccaatatatatcttcttaaatgaagttataactttttaacagcacaaaagatattaccttagtgataacacaatatattgatttttagtaagaaaacaaaatttactcgtattataagaatacaaatttagttataaaaatacatttagtaatagttttagagaccatttttttagcaataacataattaataatatatttagttattatttttttttttaaatttcaatcgattataaattttagaaatttttacactaaaaatctaaaatgataaatttattacattaatacctatacacggctaaaccaacttttttacacatcttttatattttattactatt

SEQ ID NO: 121350 - DNA, 2040 bp, Cannabis sativa
  modified_base (702)..(704): a, c, t, g, unknown or other
ttaaccataaacatgaaaactacatgtaaacacaaatgacttctaatctttcattgataccaaatcagattagattgaaatgggttttatttagggcataaaaccccaacacagtctttctccattgcgggcagactttcctcagatgacctactactctacaatgaaaaaaagatctggctctacattggcccaaatggcgctttttatatcttggactcttaggataaggtcgccatttcttgttctaaccttgaccactagacataagagaaacctgttgttctctcagatctcgaatctgctccccttgctgcctaattgtctcttgcatggcaacaaccatttgttcccagtcctgagggggtggaggattttctttcttactatcaatcctgagcccagacagctcactaactggactatttgattgcctggctgcataatttatcccacatttaatccatatcttccaaacacttaaaacttaaacaaatatcaatatcaatatgcatataccatacacatattcttattatggataatcagtaagttacttcttcccatcaaacactataattatctaagcaggtaaggcaatagcaaataacataaacacttatgatgccatgattcgacatatcttcacagcaaatgtacatatttgacaagtcttcacgacctttaaaaccatggctgctnnnataccaagttgtaacgccctattccatagggacacaacgtgtgtgatttcatatactagattaatactaatatatcaattaattattaaaagttgtgagaatattaaaaacttgactaaaatgaaagactaaaaacgaacattataacaacaataaaaaggtgttccggggatccctgttataaaaatatttacctaaaagactatagacagtatcaattcaaaatacaacagttacaaccagtccaaaataactccgggtaactcggcacataggctgatcgggtcaatatttacattggtgaagaaggcaatcacctcgtggcagctctaacttttccttgcccttagctgcaccacatagcacccgtgagtcacaaggactcaacaagaaaagcaataataataatcatataatttattattcgaatattatcatttgtaaataattagaatcaaaccattatgcattgttcatatgatgaaatccaaatcactactggcatctgccaggaataagcatcagtttacagatatttagtaatacaaaacaattataccaataataggaatcatattaatttaaaaatataaattacatatatgttacttcataaagtaaccattttcattacatcacatcgcctaatcaggcaagttgatactatgatctgataatcctgtattgcattgcttaatcaggcaagcccctgtcatagcctagcaccatatatcgcataactgcatcgcctaaccaggtgagcccatgccaaaaacttgcacccatatataatataattgcatcacctaatcaggtgagcccgtgccacaacctgcaccaatatatcacatcgcctaattagactagcccgtacctacgcttggtacttatcatgtgtcattgagacctgtatctacacgtcgttaggagaaaaccctacaacggtttcattctatgccataacctggcaattatcatatcactgacgccgtatctatacgtcactaggaggaaaccctacaacgatttcattctatgccataacttgtcaattttcataacactgatgttgtatctacacgttgccaggaggaaaccctacaatggtttcattttatgccctaacctggaaatttcatatcactgacgcccgtatctacacgtcgccaggagtatcgcatcacctaataatgtgagtctgtacctatgcttggtacttatatgtcactgatgcccatacctatgcccagtatgtcgccaggagtatacctaatcagttgagtctgtttaatcatgaaattatttatagctatttaaataatttatgatactgtta

SEQ ID NO: 121351 - DNA, 1655 bp, Cannabis sativa
  modified_base (562)..(563): a, c, t, g, unknown or other
atgaatttataaatcaaataaatatataaatgatcacatgaaccaaatgacatagtaaataagtaattaaaataaatatgtttctttattgataattgaatagaaaagattacattaaaatagagttttatttaaggcataaagcccaacacgtaccttccaaactcatatcgatttcatgtcgtatcataaggtccaactcgtatttaccatattagtcttgaatatctctcattttgagacgttttcgtttattgctcaatttagtcaggttaatattacactgttggatcctaatgaaaactcatattatattattttaggatagaatggaaccattcttggagtgggatataaacatatttgggtgcactcttaatgggtattactcatgaatgggtaatattagaaaatttgagtttttatgattaatttttctatttaattagaaaattttctcatttttacattatatggactgggattggtccatcagatgaaaaaaataatgaatttttttttttcggcaaaccaaaatctaatggtttaatatttttaaaannaatatttatagttaaatttatttattacccattaaaaaatattccatatatatatacttatatatattatgttgcacgtttatttgaaaatatcgataaccaatttcgtaattacataattcattttttatattaattttatattcttttattatatttagatatattaataaattttagaaaatagtatttattaaattttacttattgattatttattttttatttttgaagaactataatttacaactacttattcacaagtttatttaatatttgagagtgttttttttccaaagatcaaatttctcttattctcattatgctatttgaaatttgtttttttttttattaatctactaataaatatgttgtttgattttgtttatttgatttgtcagtaatagaaataaaataaatgagttaaccaaatttgtaatacaattatttttgtgaattataatagaattaacttaaaatatttctataatttaaattttataataaatatcatttaaaaatatctaatataatttatacatacggaatataagtttgaacttaaataaatgatccactttatttactattctattattttattttatttatactaatttatagttaattaattatttaattaaaattaggctaattagaatttttactccctaaattttgacatataccaaatcacgcacctgaatttttttgaccgttaaaatttgggtttcttcatatatagccttattaaggtcaaactttacatttttattactataagagaaaataaactaaattagaaaaactaaagttttttttttttaaaaaaaatacgggagttttcttccccaaagaactttttcttcttgacaggtcaaaataaagtgagttgctctccattgtaggcaacacttcaccaaacaatcaagagatggagatctgaaattaacaaccaccagagatgtaaattttttttgtgatctccatgaatgccgactaagaactttgggttgatctccattaacgccgggatcactgtggggagatctccatgcaggggcggagctaggattaaattcttgggggggg

SEQ ID NO: 121352 - DNA, 1028 bp, Cannabis sativa
tattaaaagaaactttcttgtttcctttttatatttttaggttatattatgttattttattgtataaaatacggttattttttttttttttttaatgtaactgcattaagataaacgatgggttcaagttactaatcgagagacactacgaagagttggaaccataaccattccaaactatctcccgttcaattcttagtaccatcctaacaagattgtgggcgaaacattcatatccctaggcattaaggttagagatacaccaaaaaataatgacaagaaggcttctattgtttttaattacatccgacaagaaagatttattcactacgacaaaaagtatattttccgtaagtttttagttgacattaaatgttttgttgttggttcccccaatcgacgtgtatactgtagatgcaaaaaatgcctatatttgtattggttaccaatcgacgtttcaaattatttctgtcggttttcaacactcgcaaataattataaaaaataattttacacttatatcgtctctttataacagacacactaaatatacacacaaaaaaattcagatttgagcccatacgaactaaatttatatgcacaatcaaaaaaaaaaaaatacaaatcaaaacctagacctcaaatattatacaatataaatactaatattacacaatatatattacttgaaaattattagatatatattgtgtaatgaacatatcaaatgtttgtagagaagctgccaccaactatcatcgctcagactgcgagccaccaaccacctacaaaaattgagaggcggtgagagagtgctagcaacgaagataggagagagagagagagagaaggagaaagagaccgagaatcagtgagaaaccatacctaagctggtgtgagcgacgatggtcgtggtcgtctcggggtagaggtcgtgatttgctaccaacttaccgacaaatatcgtggtcgaggcagctgtgatgaaggtatgtgcgcaagagagaagtgtgtgtgtgtgtgtgtgt

SEQ ID NO: 121353 - DNA, 2216 bp, Cannabis sativa
ctctctctctctctctcaagtatcatacttcatccgtgccacctggacactaagtcatatattcttaagtccttcactagaactcatcagttcttgatctgtactaccttgttctcactattgtaacattcaaagggagtcatagctagaattcataaggttttcacctatgatctgcatagaattatctctagaatcaatacaactaaaagaagagtaggtcattacccaccaaaaaagggggccaaacctctataaatctctatgccatcgctattatttattgttcttatttacatgtggtgattgtctatcataaataaggctccacttctagttgaccaaattttaagtcaatagtgtgtatgtgtgtgttatactaatcttacctcaactctaaaatcaattgtgctagccaacctaagtgaaaactattcctcgatgattagtgaccctaagtcacaatcacataaaattggtaagtgtctcgctaaaaccctttcaggcacttaaaataaaaactagatgtttcccgattgataaacagcatggacataccctagatattgataaaacatgaaaattagagtaccctaaagtcactccaatcgagtaactaaatccctaaatcaccatttccaagggtcttgcctagggaaatgattcaccatttctacagactttatcttcaagtcctgaggtcattaccacgtggcctcaccttctcgcctttttccttctcgtacttggcatctaaatgccttctgcaatccaccgtggaccagctatcgtcaaaatattgtccctctatctcactgtcctagtttactgaatagctagggcatttttccttcccttgagccttggtacttttataccgctcccttttggcattacaaggcctttcttggctaaaggacgtcagagcctggaggtttcagttgccttctgtgcctaacaaggcttgttgtcttaatttgcatttttttgaggaggtgcaggagcatgcaggttcttagggtcacttacctttgccttccccttgtcctgtgtaggagcagaggttctagctttggtagggttttccctagtgtttcttttgatttattccaatgaggggtcatcattagaatcttcctcatccagatctccaaacttggctcgaaggtgaaccatcattttctccatcttatgggaaaacttctcttgatgggctaacttttgtctgatctcgagaaccttgttagacactcaagttacttgggtgtttttctcattatagtacccgtctttgtagtactcatctttgatgtaaccatcatcgtcttcttcctcttcattattctcagcattcctgtcatcatcgacgtgatcatgttggttgggtgggtcatcctctcgatcgtttgtgttggacgtatctctgcctctcgcatcgctcggttgggcatgcttggtgagaggggtttaaattcctctatttccatctcgaggccaccttgaagattcttcttaggaagcatgttttgtgtgaaaatcgtggcagcagcagtagtttacgtctttcttcaactcttaatgaatgcaccaaaatatttactgagatttttagaaactaaatatttaggagctaaagaaaaaattaatttcaaaaataaagagatgaaggtttttcatgtagtttagctattaataacccttagtccatgagtgagtctattagcctctagggcgagtttgttgtgttaacaaccctaagttcttactcttaagtttttcttgaagaagaagaagacccaaaataatattggttaatgttttagctatgtaaattatgatcctctatttgtatgagaattaaggggtatttataggctaagtggcaggtattgacaacccacgacccgcctaaggtttctactaaaatcccactactggggtaaattacatgcaacattagagttaattgttgggtcctatgggaaacattatgcccgtgcatgaatcagctggacaatggggatcattttgtaccatatggacacgtgtcatccaaaggttcaacctttaaaagtagaggccacttgttgcccaaagcttgctcctttacaagtaggattctgtaatatctgcttggcaaagaggtggtgtaagtacgtgttggaaatattttactaggatctagatttactaccaattatgtttgattaacatcc

SEQ ID NO: 121354 - DNA, 1133 bp, Cannabis sativa
gaggttgacagttcagaacccacttgctttgaagaagctatgagaagtaaagatgttgtagcatggctgcaggccatccaagaagagatgcggtctcttaggaagaaaagaacctggattgctgtgaagaaatcagaattctacaagctgataggatgtaaatgacttttcaagcataaagaaggttcatgattacaagataaggttagttgcgaaggggttcactcagaaagaaggcatcgattacaatgagattttctctccagtggtgaagcaagcttcaatcagatccatgatggcaaaggaagcaagcatggacctagagattgaacagatggatgtaagaacaactttcttgcatggtcagttagaagagaaaatctatatgcaatagcccgagggctttgacaatgggaacccagatgaggtatctacttaagaagtctctttatggcctaaagcagaaacctaggcaatggaacttaagatttgacacttatatgctaactattggatacactaaaagcaagtatgactcatgtgtgtatttcaataatcaaacctatttgctactctatgttgatgatatactgatctttagcaaagaaaagtcagagattgacaagttgaaaaggaaacttagtgtttattggtcaatggaaatttgctcaaaattgtcattttaagccgctgcattttaactttgtttgtggtggcagcaatgattcggggactaaacctgttgagggaatgatcaagattaatgtggatgatgcaacgtttgaagctgaaaatgcatttgggactggtttcattgctcacgactcaaatggggttgtcatcttggcttctttagcctactcgactggttcttcaattgctcccgtcgctgaaatgatgagcatttaaagaggctttgagttgggtaaatgcctctaatctgttgaacatcgttattgagactgattaccttattgctgttcaagctttgcataactcgatggatatgccttttatctttggtcttattgtgcaagagtgcaaatttttactatcttctttcaataatgttactatttatcatgttaaacgatcgactaataagaccgtgggtcgaactcttctttggtgtc

SEQ ID NO: 121355 - DNA, 1979 bp, Cannabis sativa
taattttgaattattatacatcagctttaaaaatcaaaaataatattaattaaataatagttacttaaattaattttaagagaaataatatgacaataaaattatgtattcttttttaaattattaaaaaaaattatatcattaatttagaaaattaatatttatattaaattagttgttaaattattatatactataaataactttatattattttataaatattgttattttactattgtaattatttattaaatataaatatgataaattattttataatatatttaagatatatatttgattacatatatatgatatattattttattttattttataatttaatcattttattattcttttttatttttttgtttggaattatttatttttatttactattattattatatttttattttaatttaattttttttaaataaataaataaataaaataatccaatctattcttaatcttaatataaaattgctttgagcataatccaatcttattaaatcaaatttaatctaattcaattctttcttgtccaatctcaaattccaaacggaatctaagtttattgcaaccacacctctcctcatcaatatatagttattttttttacaagtcaatgtataatcaatattattgtttcttttgtggaaaaatatatatgtaatgatttttcattttataattattgaatattgcgccaaattctagaaaatctctgccacaacgtaaataaagtagtgtgaatcttacccaacctatatatatatatatatatatatcgctttttatccaaaacttacttaaatatcaacatggcaattacaatttcaatgtctcaacactatacatgggtttatatgagatattaagcaggtaattaatcaaaggaggtgtgataatttaagtatgaaactagaattaattaaaggaaaaaaaaaaacaagtgaatgcataaaataatgtgtaggactattacctaacctatatggccatatatataaatgtatacgttgatgatcacaggagttgaagaggtcaagacagcgaaattattaggctaaaagttatgaacttgggctgtaaatgtggaaagattttgcaaatggaaaagtcacaactttactcactgaatttgttagcaaaccattggagaggctttaatttgtggaagacattgatttgagcttgtgtattggacgctcctacaaacatgggcaaagtaaaggtaggacacgtcattgccgagttggcatataaataatatataatacaggtaaaaagtgtaggctaccaacaattttatatataatttaatttgtatatgttgcggccttttccggcaaaaggtttcccttataacattatttgagacttaagtaattagggtggagagtggagagagtgtataacggatgatgctgaaatggtctcagctagcattaccaacatccaacactactgtactctttatttaattaattaaatttatggatgagaatcgacttcaattgcaaattaagtttcatattatgcataagtaaaggctacgatcgacgactactagtccttttttaaaggtctaatctttgagatcatgtatataaatatataaacattggaggaaaaattcatttaaaacggtatttatataacactaattaaaattaacgtatcaccttataatatattttttttaaatggatctgtcattattttattattttattattgattagcgataatttataaaatttattacatttaattatataaaattttattattaattacacgatattgacacgtaagcatttctctagtcaatggtaatagtagttaggtatatttaccataaatataaatatacattattaacactactacaaattacactatttacgtcggtcaacgctactattcatagcgttgaccgacgtgaatagtacccaataattaaa

SEQ ID NO: 121356 - DNA, 2314 bp, Cannabis sativa
tccatcaagaaaagtagttttaaaatccatttgttgcagctcttaatcaaaatgttcaacctaagccataataattctcaatgaatctttggtggaaacatccgagaaagtttcatcaataccgtctctttgagtaaagtcttttacgactaaatatgttttatacctcttaatttgtcccttaatcctttttagttcataaaatccacttacagtctattagtttaaaaccatcaagcaatagcactaactcccatacatcatttttctccatggactcaatctcgtcatcatatcttttattcatttgaagaatgtagtttattaagtgtttcactataagtgaaaggatccacaaaatgaccaatatcatattctccttctctaagatcactaaaattatcatgacaccttgttgatttcttttgtatccttgcaatcttcttagaggtggtgcttctagagtagcttttatttgtttatcattattttcaacaacatcttctacaacttgaattttattgataacaggaccctcatcaacaacaataccttcttcaataataggtccatcatcaataataggtcgttcatcaataataggatcctcgtcatctttgataccagaagcaataaattcatcagcaatgggagcaatatcaactagagtaggaataagactgttattattatcatctcttgaaaaagacacacaaataaaaattcccttaggtgtttgtcatgtttcaagagatgttgaaggaatgtttcagcaacatcaaattctagaaatttagcagcctgagattcaagtattcttgtacaacgagtaggacagtaaaaatgatagccttttgagtgcataagataactcgtgaaataagagcgaactattctcagatctaactttatcaaactaggatcataaattcttacttcaactcaagaccccatacatgaagatgattcaaactaagctttctcctagtccacaactcaaaaggagttttaggatcagatttacttaaaacacaattcaaaatataagtagcagtcatgagtgcttctggtagatttaatatactcatcatgcttctaattatgtccatgagagtactatttctcattttagcaacgccattttgctaaggtgaaccaagcataatgtattaagcaactatataattttcttgtaagtactcaacaaaaagccccatgagttgtccacattctgaataacaaccatactatccttctccacaatttgaatgaacaactaggatgactcatcctaattgtttctgaagaatatttgtaaagattttgcgtttatcaagagcgttcgatttttctttgatcatgtaggtgaggcaatctcgagaaaaattatctatgaaagttataaaatacttgtttctgcataacatagtagaataaggtccactgatgttagtgtggataatctttaataatgataaactacggtaggcagtcttctttcttgttatagtcaatttttcacgagtacaatcaacaaaaatatcccaactaaaatcattaagaggaggaagaatttcaattctaattatttgattaacccttactttagaaatattaccttatattttgtgtcataattataacgatgttaccttaatataagttctcttacccacattattcacaacattgaaagaagaagttaagcaagtcaatgacaatttgaatagaccatcagagtaaaaaaagtttccaattattcaaagtcaaacataatgtcaacattatgactggcaaaacaaaaagagtatcattatttaagcaaaagtgaaatcgaaactaaattgttgttaaaagataggaacataaaaaatatttttcaagacaaccttaactccaaattgtaattcaacaaaaaatgtgccaacttaaataatgtcaactccaacataagtgcacacttttagttttgacttcttctcagttggcttcctgagatcctctagcccctggttgtacttgcttctttattaatttttcttatccacttttaggcttgagttgataaacgaagtgacaagattcctcagctacacactgagaaattaggtcggtgacattctattttttattataagtgttgtaggttgtctcgataaggctaaaagaggtagaaagtgtacgaagagcacgatgcataatgtaatagtcaggaagaggaatattatgatctttcaacttggactgaaccttcaccattttatgaataaaatcttacactccttttgattcatcatacttaatggttgtcatt

SEQ ID NO: 121357 - DNA, 3111 bp, Cannabis sativa
tgtgtgtgtgtaaacacgcacacgaaggagtacacaatcgacccacaacccactacccacaaccttagtcccttctctccacgaccaccatgaccacagacccaaggacccacgaacccaattaccactgtgtcaccattggtaatattgtcaaagaaataaattgcatgattaatattttctatgtgtgagtagatgttagatttagggttaaaaatttccagatctgagttttaggcaaaaaaattggtttttttgtcaggcatgatggtggtctaatggtggttcgatagtggtttgatgccttcctgttgttaaaacgagtaaaggttgaagacgaaggtccgatggtggcctgatggtagcccgatgatatggtctgatagttgtctaatggtggcccaatgccttcctgacgagcttaataaatggaacttaacatctataaatgtagatatggtatgatggtggtccgatggtggtccaatggtcacttgatgctacttttttttatgtacaaaaacataaaaaaaaaaaatataggtagcatcgggccactatcagaccaccatcggacaccatcaatatagatgggaatagggagtatgaatggtgaagttagaagagaataaaagagagaagggtataatgggtatgaatataaattgtgcctattttttttaattttcgtaaacttgtgtttaaaaatttaatatacactaaatgtatgcatataaattcaattttttttttatagatatattgtgtaaaatatataagtatgtgatgtgtatgtacgcatgtgtaaaattatatatgtgtaatattgattagtttttatttattttaatttaatttttttgaaattagtgtttggcttaccgccccgcatcactactacttgccaccgagcttgtgtggttgttgcatttgaaaggtcagtattttttttctatattagaaatttcatagtaatactctatgtttttatttaatatatttatgcatgttatagtagagcttgatatcttaaatattcatccgtagtgaagtaggttctgtgattaaatgtattgcggtcgaatgcatgggtggattaattttttttgtgcatatactgttctggaatgtttatttataattttttttaggtttttaaaattttgggtttataatttttgagtcattatgctgttgaaatttcagtagaagtaatagaatagggaaaaagttaagttacaatttaataacacaaaaagttttattttcaaaataataatttgtttaatttatgtttcgtatatgatatttttaattataaatcttaatggtttaaatgtaataaaattaattataaataaataatcaattaattatgggtaaaataaaataataaatgagataaaaaaatatatattaattttaatataaattatgtaattaaacatttatttaaaataatattataaattaaagaaaattaattgtaatttaaatattaataaaataaaataaaataaattttactttatttataatatttaatatttaataaagtgatattataaatttaataataagtaacctttaatataaataacaaatgaaataaaattgtactttaatatcaatatgtaattttatattaaataaaataatattataaattttagaaaataagtaatgctcaatctaaattataaatgaaataatttaaaattaaattacaaattcaatatgtaatttaaaataatattataaaactaattataatttaaatattaataaaataaaataaaataaaattatactttatttataatatttaataaagtgatattataaatttaataataaccaacttttaatttaaataacaaatgaatcatagtacgtaatatgtcatttaaattagcataagatattaaaaatcagcataaaatattgtaaaatagcataaactgaaattttatattaccttgaactctttggttataaaccaaagataggatagaataatggtatttgtattttcacaaagtgataatttttttatttaattttttacacatgcacgaaataccttagacccgtttggggaggctgagtcagtaaggactcttaaatacgcttctctaaattattcaggactttttggtctgcatggatagtttggactttttggtctccttacatgttcttgtaagttggcaaacttactataagtttgtctacttatgagaactatgcggaggtgctgttgaaatttttactaataaaataattttaagagcgtagattgtactatatatgtatattacaaacctgaatgggataggttctttacccttttagtaatggagtgagaaggtagattaggacacttgtacattttctcgtttgtttttaaaattttttttgttaatttctttatagtggaagatgcctaccgaccgaagttggatgaaggcgcaccgacgctcagcagagtttcgaactagcgttgacgagtttgttgcggttgcaatgaaccacgtgatttgtatcggattagctcgatgcccttgcatgcggtgtttgaatgtgaattttcacacacgtgaaactataagggttcatttatttctcaatgggatctaacctttgtacaacctctggtatttccacggggagactttttctcaccccgctattgaacttcctaaaaacgacgaagaggaaatggcagatgtgttggcagacatgttaagtggggatcctgagtttgaccaatctgccaccactactgattctttcaatgaacccccatcaatgaaaacaacaagtttgatggcttgtttaaggagatggagtctgagttatatcctggttgcaaaaaattggccctcaatgtgcttgataaagtttatgcactgcaaggttttgaataggtggagtaaccactcattcgatatgttattgtctatcttgattaaaatattttcggaggggaaaaaattactgaagttgcactatgagtcgaagatgcgattgcgcaatctaggtttgggttacgactcaatagatgtgtgcaagtataattgtgctattttttggaaggagaatgagaag

SEQ ID NO: 121358 - DNA, 2314 bp, Cannabis sativa
  modified_base (941)..(944): a, c, t, g, unknown or other
  modified_base (1657)..(1671): a, c, t, g, unknown or other
gtaattaagtacgaatgaaatagaatacattgaaattgagggaaaataaatcatattcaaaaccataaaataacgtcaacaatctccatctaaatcctaattaaatgtttagctactcatgtcacacatattaacttaagaaaagagagaaaaatagagaagaaaaaaatattaaaaaccctctgaagaatgcctccagtattgaagtcggtctctaaaattcgtactcctttttctatctttcacttccttctaaattgcctaccaaaatcaactgaagttcactccatatatagccattaatggactaaaaagatagaaaaatcgcacatgctaaaaattctattcaactttgaattaggcaaccacaataagtccacgttgagaaaagaaatctttttctgcttcggaataggggcgggccgcggcatgctccttcatgggccgcggcccgtgtgtaatcttcacacgatgatgcctgttgttcacgatatgggtcgcgacatgcccattcttgggccgcggcccctgtgcaatttccccacgttttcaaggcgtgcaatcttttttctatgcagaatcccaatttttgcacagtgattttaaagcgatcttctatcttttttttttttttttcattttcctttgatatctttcaaatcttcttctattttaaatttgcaaaaataaaagatgataagcgtaaaattgctccaaatacgagtaaaattaaattaaaaatacattaaaattaatctaaaaataatactaaaaacaacctaacatcactacacaaaaaattaaaaaattttacaattttactttttacttttacttttaatcacaataaaatttgtgactaaaagaaaaaaacttgtgacaaaatataaattaacattcttatgttgtgactaaaaggtctgtggctaaaggtattagtnnnnaaaatcacaatttattgtgactagatgtgctcttagttacaatacgtgttataatcacaatttataaaccctatatcaggcccatcggtccaggtcaaacattcaaaaaagtcagaccatcggacctaatatcgggtccctatcgggcccatcggacctctccaaatataaacagaaaaaaaaattaaaaaaaaaaattaagtgggcatcgggcaccatcgggcccatcgggccaatcctaaattataaataggaaagaataatttgaaaaaaattaaagtgggcatcggggcatgcatggggcccctatcgggcccatcagactaggtttgacttttttaaaaagtcaacgatcgggtcctcatcgcgccttcatcttcaagctcaaaacaacccagacaacccaatgcatcagacctgcatcgggccagcttgaaaaaatcgatttcttacccaaattcatcacaaaacctagatcgacatgttctaaccctagatctaatcatatcagaccctaaatctatcaacaaataacattttaaccctaatcaataagaaaaaaaaatcaacaaatgaaagggagaaaaaattaccttgctcgcgtgctcagtggatgggctcggtccgtggggtggtgggttcggtctgtggggtggcgggttccctcttggggtggtgggttcggttgggttcatcgttcgagtggggaaatnnnnnnnnnnnnnnngtgcgattggtgcgatttcaaccgattgagagaaaggggaggaagagagagagagtcactttagaaatgagggggtaaaattggattttaggaaaagtcatcccattttacaaattatgtatagttttaaattaggggaccaattttagaatttattaagcattaaatttcaaatttccctacatatattgtattaggaatatgagttttaattatattgtgagatcaaataaataattagcactaaatatgaactcttttaagtatacctatagggcacctataaatgtcaaacaactaataacgataaagagttgtgtgccggttatgggcactacaaatttgtagcaatgtaacattaacgcacccgcaacattcatagatttgatgcacctatgaacttgatgatatttttgtatactcccgaaataaataaaaaatatatttatattaaatactcccaaaagtaattaaaatacttattaattgaaatctaatatataaatttactttttcttttatctattgttgaatagtttttttttaaaaaaaaaaaatctattttattcctttattaataaaactagtaaagagaataaaaagatagaaagaattggtcagaaaaaaaaaaaaaaaagagaaa

SEQ ID NO: 121359 - DNA, 863 bp, Cannabis sativa
aataatttatttattatttataaaagaaattaaggcaaatgaagtaacacgaataagtacaaaaaatagtttttgtgggagctagtagtagggccattagaatggcttgccattagctggatggaaagctaagctgtaatggcactttcgattaggatcaagcgctatacgactagaaatctcgttcgtgatcaccccaaaccccagttcttttttactttttccatttaattaattatacccttttcgatcgactatatatatgatataatcctgaagctcttttctgcatcacattcttataatttactttcatttcacactcctcctcctcctcctagtactagaacttgtttgttctagtagtactatacttatactactcaaccataattttgagtcgtttgatctagttattaggccatataataattaaaaggcgccagccatgatgagaaatagtagttttagtaatatagcttctattttgttgactacttctctggttcttgttcttgttacttataatgtgtctgcacgaccagccactttccttgaggacttcagagtcacttggtctgattcccatatcaggcaaatcgaaggagggagggccattcaactcctgcttgaccgaaattcaggtaacatttttcttcttctttcaagtggggtctacatttttgatctatctatctatatatgtacatataaataatgtgtaattgctatattcaggatgtgggtttgcttccaagaagcaatacttgtttgggcgtgtgagcatgaagatcaagcttgttccaggagactctgcaggaaccgttactgctttctatgtacgttatatatatatatatata

SEQ ID NO: 121360 - DNA, 1635 bp, Cannabis sativa
tcttggtaaaataatatccaacagagacttgcccggaaaagtctccacgatcgccatgaaggtctttgcttggaattgtcgtggtctcgggagcagcacgacagttcgtcaattggcggccctcacccgccaacataaacccgaattgttactgctatccgaagctcgccttacaattgataagttcaaaagtgtttgcacaaaactcaagtatgaaaaccacttctatgtcgcacctgtagggagatcagggggcgtgggtttgtgctgggaaaaggaagtgaaatgtgtgattgaatactcctctaagtatgttatctctgctacaattgaattggaacgtaaaggccttaaatggactctgcttgggatctatggaccgccacatagagaggacaaagaagccttttgcattcaagttggcgatattgtcaataattcctctagaccagccctcctcattcgagacatgaatggaaatctcacggattcggagtgtttccactacgctaaacagggcaactcatccaaatatgcctttgacttccgtcgaatggtccaacgggtggggctaattgacttgggctttcaaggcccctgcttcacatgggccaaggacagaaacaaatctaacaacggtggatcatctaagagagcaaggctagaccggggtctggttaactccgactggcgcatcctactcccaaacttaattgtcaagcacctctcctccactggctcggaccacaggcctctccttcttgacacttctgggggagttcgttgcaagagtcagacattcaaatacgaaaaaatgtaggctagagatccaagatgtttttcgattgtaaaggaagcttgggcacagagattacaccaccatcccatgatcgatttccatagaaaggccaaaaagacgggtcgaatgcttaaattatggaaccaaagataatttctgaatgttaaaagacaagtggaggaggccactaatcatttacatgacgttgaaaccaatagacctgatgaccacttagccatccattcggctaaaggtgaactcgcagaggctttactaagggaggagatacattggaagcaaaaatcgagggttcaatggctgcaggaaggggacaagtgcaccaagttcttcatggcttcagctattgtgcgcagaagaaggaattatattcaatgcatcaagaaggcccttgaggaaaactggatcgaagaccctaaagagatcactcactgctttcttgctaagtttgaagaacttttttcaaaaaattgtacaaccgatgcactccaagaaattctgctaccaactcttgataatcatgatgccgagagcctccaatccattcctacacatgaagaaataaccactgccctctttgagatgggaaaagacaaagcaccgggaccggacgggctccccaccagcttctactcccatcattgcgacacggtgcaaacagaccttctggccatggtgacacacttcttcaggacatgtgagctgcccaaggtaattaatgacacatccattgtcctagttccaaaaatggaggccctggttcttgtagcgtccccgcttcaagcctccattgagcccttacacccacggactaatgg

SEQ ID NO: 121361 - DNA, 1665 bp, Cannabis sativa
catgaaagttctgggagcaagaacacttattggcagcccataattagagtgggctagtgccatgatagaattcagagagtatccgagtgtagcttggaactgaacgcttggcatgctactcatttgtggagcaataggagttgtgatccctgggaaatgcactccaggtgcgtatctagggcctctagttgggtagtgtcctcaaaaagcagttatttgtgcctcttctagattaacgtacttttgagcccttttctagaaatcctataagctggctacaccgtcctgctatagctaattccaaataggagttcccgtccatatttcagcttgcaataaagctaactgatgttgtcatctaccttcttggttttggaagcctcctttttgaacctcttgatgaagttcttcaaggttcccattggtagctatttgatattggtcagggcactaacttcaaggttttcattctagccgtaacaaacttccttttaaagttaatctataaattattccaacaatccacaaatccaggttcaaacttcctgaaccatttttctgtgaatcccgccaatgtcaatgggaaacacaaacatttggcatcgttggtaatcctcttgaccatcataactctatgaaatctggacaaatgatcacttgggcatatgtcgctcgtgtataaagtcatttttggcattttgaatttcttttggagcttagattctaatatatgtctcgtgtaatgctccaaatccttgcaatctaactccaagtcatcacccttctacctctaggagaccctcgctctatctttctagagaattgtaagtttgaccaaaattccttcatttaagacacttgcaaaagctggtgcaactttcttccttagatcaagggatgctctcaaatctccgtgattgacattgagcttctgtcttagatcgatagggggatccctcctggttgaattctttggttttttctggctcttgatgcacgaacacgctcctttgatctcatcaatcctgggggctagtctttcccttgctaaatctacccccatgcaaacttttcccttttgggagatcaaaatgaatagcccatggatccttagccttattatttcttttggcgacaaccatagggttctcctttgtagcaaattttcttagaggatatctaatgggactaggttccctatgcttttgtttctaaccttcttcgggttgagagggctccatctcagtccctttttgtacaaatgggactgtagatgagtccacttggatgcccgcatttttcattgcccttttcatggaaatcaatatttcttgcatcctccttttttgctccttttgttctaccaactcaacctcatagtcgatagccttttttcttagtttgacctgctctgtatagttatcttcatcgtgccttcatattcttcttggttagaatattctggatcattagtgtccccttctccttcatcgttcaccctagatgttgcctcttcttcttcttctggatccttggggtcatctcagtgttgcagacacaaagagcttgtttggctgtgttttcagttttcagtttttgaaattgtgtttttaaaagtgagaatagaaaactattttttgacattttaaaaatttaatggtgttt

SEQ ID NO: 121362 - DNA, 3131 bp, Cannabis sativa
  modified_base (205)..(207): a, c, t, g, unknown or other
taatatatgttcttaccaattattagatattgtaagcaaaagggaaaccttccattaagcatgtagccctataaatagtgatccattctcactggtaaagggatcgagagaattactttggagagatctaagagagcatactcagagatttcactgtaagagctttaagagaggaaacactgtgttctttgttcttgagttaatnnnaatcaaggggagtaggctattactaaactacacgggatcgaacctctttaaaaaacttgtgttctttacttatttgcttatattatacctaagtcatatttctttatcgcttattattagactcattgtcgttggctaaaagcgaggtcagcagagactgctttgtaaaggagagacctttgcatgacacgtggccaaggtcgtgcaaaagtcctcgccagctgctgtacaccacatgatgaagaaggttctcaccagccaatggtcaaatcgtccttttaccgtacagacccttagcagcgtgtggaagacgaaaccctaggtaggtaaaggatatgccatttatcccatgtgtgcctataaatagccttattcttctaaaaggaagagagaagaatttttcacctactgtcaccctgcttaaatccctagcaatactctcttccatggggtatttcatactgtaatgctgtgtaatctcaaaacatttgtccaaagaggctaataatatagactcgtggactaaggattattaatgcctgaaccacgtaaaaatctacttattcgttatttattagttgttatttcttcaatctctcaaaatatttagttttcaaaactcagtaaacatgacccacgaatggtaaaatcataatttttatttatttagctaatagactatattattatatagtatgttcattttgtttgattgcatgtaattttttgacaaattagcacggtatagtcacaatcagatattttgggctcaaaccgggtttggagtctaaaattatttaattatgtggttaagctaaatatttgagatatttttgaaattatgaaatttgtgtgtgaggtgaaataactaaattgcccatgtatgctatttaagtgatttttattagcctaggggcaaaatggtcatttgactaattttataaaattggaatataaactattacttgactaagtgataaatgagaagctcattttttttttgttttggagcctcaccaccgacccctcttcccttctctcaaacctctcatttttttcacgtgatatttgaatgaaaaagaaaacttgtttttggagtgaaattggaagagaatttcttgtgtggatccttgcttgagcttagggaagtgttaaggtagtttctttaaactctaatctcttgttgaattctgaatttgtgttcttgaatggaatttttgtatgtttatgtgcttgagatgttgatttgtgagggaaaaattatagatgtgtctatagttttgaattgtgtttaatcaatgtttctagtttggatctaccatttctcttgctattagaattggtattttgaggtgagaatatattagaaattatcatgggttcttattagtgttcttcaatggagaattttcgaaataaaatgaaattgaattttgtgtatgatttatgttgggtgtttttagcatgtattttgatgtattaatgcttggaaaatacctcattttaatttgaaagcttgttgtcaagttatggtatttttgtgggagtttggtgcatttttgggtacccaaaaatgagtttttctgggtttttaacccaggagccatgatccggttcttgagtgtcacggcccgctatgtgttcagcaaggcagattgttttaaaatttgttttggccataacttttgactccaaactctattttagatgttctttatatcattggaaagctcgtttcgagctgtattacttcgtccagtattggagtctcaaatgtgaatattatgaaatgtaattttaggattaacctattgtgtaaaacttgaggattgtgactagggatataccaacacttggtcaagatcacctgtggattgagatttctcctcatactatggaaatcaggtaagacagtaaattatgcacatagagtatagcatggtagcgaaattatatattatgtgattaattagatgagagcttgaattatggtcattaccctaagttatatgtgtcgtgaattaggatcattaccctaagtacttatattgtggattagggttattaccctaagtaattatggtattatgaattagggttaacaccctaaatttatatatatatggtgaattaggattattaccctatatatgtattgtcttgagcatgctataatgtattatgtaaatgattagttatgcaagttggggttattaccctaaaacttcatacagtatagtatgtgttgaatatattgtatgcatatatatttcaagagttatttgtataagacataattgagttagacttgataaatatcatcaggataaaccattgtgagagcatgatgtatgaattatgtatatatgagtagagttatgcgagtaagacataatcaggttagactcggtaactataaccgagacaaaccctagtaatgccttaaatataaaatggacctgtgagcgtaacacgtgagtctatgctatatagacattaatagacgtgtgagcgtaacacgtgggtctatgctatatatatattaattatagtgacattattatatatggaataatgtgatataaagtgcggtggcataatatatacgtagtggcgtactgtatgaagtgtagttattattataattaccatattgtattattattctttcttgctgggccttggttgacgggtgctccaatgtgcaagcagtagttacgcgatgtcacttcaaccatgaattcagggtctttgaagatgagttgtacatgttcattccaagctagaccacgagggttaggtctaacatgaaattatgtagaaattccaatttttgccgcttaggtcagcctgtaagaaatgatttttaatattttaaaaataaattttacgggatcccggttatataactttaaatattttgg

SEQ ID NO: 121363 - DNA, 593 bp, Cannabis sativa
tccataaagatgcaagcaaactttgcctttaatgcagcaagaaatggttgctatcgtccttattagggcactagttgaagcaatcaaagtgacaataatcgtggtcgtccctatggtcatggaaatggatctcccctcctttgttaagtgtgcctttgaactagtcacactactaccatttgtcactactgttttgacaaaattaattaagttacaaccaagtatggtaattctaatcctcaaactttattaacagaaactgatattccttatgatccataggctttgacaaccactatgatcccagtactttgtgatgatgaatcttagtatgtggacacgggagcgatcaaccatgtaacttttggtactactcaattggattcagcaactccttacaatggcactaaaaccattactgttgggaatggtaagaaacttcttgtttctcatataggtcaatccaccatcccatcctatgtttataaccagcccatacacttgaattttgttcttcatgtaccctccataaccaagaatcttgttagtgtttctcaactaactactgacaatgatgtctttcttgaatttta

SEQ ID NO: 121364 - DNA, 506 bp, Cannabis sativa
ataataataataaattatatataattattatatttatatggatatatatatagtttttattatattatataacctgatcctgatcatgatatgtatctaagtatatgtgttaatcaatataatagagacacgtgtgtacttaattaatgttcttatgagtactacaattatatacctatatataattatcaaatgaaaatgacaattaactagctacttctttttaattatatattacatgttacgattcacaataataataataagcaaaataactaatgaaaaggggacaagaaaattctggaaaacccaatcaatttgttctaatccaagtttcattatttatttcttaataataattataaattactagaaatgatctcatattttatgtcaattaacacgagacatgttaaaaggtatctctaccaattagacattaattatctgtatttttaatattttgattcaatggataatataaaataaaaattattagttaataa

SEQ ID NO: 121365 - DNA, 1466 bp, Cannabis sativa
  modified_base (1434)..(1440): a, c, t, g, unknown or other
tttttttttttcatttaggttggcacaatagaaaaaatgggttacagatccaattttggatattaattatgtttaatctgtggatttttttttgtatagatttaagatatgtggataatgtgtgtttaatctgtcaaatttatttgcgtataaatctacagagattttggtgatatttagttttactaaatttgtatcttttttttactcttgtgactgtccaaaactgacaggaaaatggtttttcctgaatgtttctactttagccattagttataaaagatcgagaaagttcgttctcgaattttttccactgacacctattctactcagttttacattggtggcatagatgtcagttttaagatctaatattaacacttttacctaactatcataattagtctggaaatattcttcttttttaatagtgtttctttatgtttttgaagtgatctgcttacaaggttgcttattgtattacgcgagattcttattttttctaggtcatacaggaaaatcttttattcccaagttagttgtcattcttatgagtgatttttagttttattaaaaatgatatatatatatttaaaaaagtattgtatcttacaaaatttaatataattttttataaaatatcattaattattcgtaaagtatcatttcatatctaataaacaatacttttcatagaaaatatgtactaaaaaaatatcaagcttcttcttcttcttttaatgaaagcttgaagatcttttatttcatcaattaaatgaaaccttatgctgcattccctaaaaagataaacaaaaaataaactaaaatgttagaccacgaaaaatagactaataggaaaaataatattttgctatgaattatatttgtttttgtaagatatttatgtaaaagttggatatgagtttggtagttcgaccaagaaaagagaaggagagagagtgtatggttttatttggtaaggtggtcatgtgatagagagagagagaatgctttgattggtgggttggttaggttgtcatgttgggcaatacagagatagatgtggatgagaaaatagatctctctcaagatacaaagataaaagcttttattgatgtttagaataattatgagattgttattagtgcaattaagacccatattgttattatacttttatttttataatattaataattgaaagcattttagatagttatgattgtaataattactgtagaatatttgtattaatggttagaatttgtaaaatgcatgctttatataatttttttttttttggataaatactagtttagatcatgtgttttgtaaagttactatttaaactttttgttttgttaaatgacaaaatagacactatattttccagaatggtacatacaggaccttaaactaattttttgtcaaaannnnnnntaataataatccgatctaaaagtgtt

SEQ ID NO: 121366 - DNA, 1598 bp, Cannabis sativa
ttttttcttatacatctgttcccgcccatgtgaccctattacttttccaatctgatttcttctcctttcatgtcttcatcgacttactcccattgcctcctccaaagcttttatggaaccactgatgagcactttgaattccaccctttccctcactaatgagaaaagctcgatcattgtactgcctgatatcccaaaccactcatgtcctttacaatcgggccacattctcttggctcgtgttcttactgaaaaagcagtgtacaagcctagtttttatgaccaaatgtcgggtcagtggaagggtcagttttcgttacaattactgattacaaaaatgacttattccacattgcttttggctgcgaaagagataagcgtagagtcctgaataaagaaccatggcacttctaaaattatcttattgttcaatttgcgccagatgttctacaaaatatctcaaaggaggatctgatctatactcctttttgggtccaaatttaccggttacctttccttagtaaattctctgttttggctagggctcttggcaagattcaaagaggttcttccactagttatttccgaaatgcaaaatgcttttttgctgaatggattgataactgacaacattttggcggtatttgagttggttcatgcaataaaaaataaagcctcaagtcatcatggcattgtatctttaaagcttgacatgagcaaagattttgacagagttgaatggagattcattgaaaagttatgaggaaaatggggtttactaatcattggatttaactcattatgggttgcattacaacaaatagtttttcttttctcatcaatggggaagtcactggtcatttggtcccaactagaggtttaagacaaggctgccccttgtctccatacctgtttctaatttgttcaaaaggtttatcgaggctactacatcatgaacaaaatattggtcagctccatggcttcaaacttacaaggcaagcaccaccaatctctcacttactctttgctgatgatagtcttcttttttgtcaagcaaatgaaagctcgtgccttgctattaaaagagttctggatatttatcatcgagcttctggccaagtcctcaaccagataaatttgtcatgtctttctcccctaacacatttttggcggctcaagtcttctttcattggcatctttccataccaatccgggattgtcataaaaaatacttgggtccgccatcatattcaagaagagacaagaaggaactctttatcaacatataagaaaatatatggaaacttatgtacacacggagtgaaaagactttctcagctggtggtcgagaagtccttcaaaaagctgtggttggtgcaatccattcctacttatgtatgttatgagttgttttcgacttctagtctacttctgtaagtaatttgaatcaatgatggctaacttttggtggggtatgaacgaaatgttaggaatattttattagaatctagatttactaacaagtatgtggattaacatcttaaatatgaatatctctaaaacaatgaaataaacacataagggttaagaaaatctta

SEQ ID NO: 121367 - DNA, 1736 bp, Cannabis sativa
  modified_base (32)..(51): a, c, t, g, unknown or other
  modified_base (1693)..(1710): a, c, t, g, unknown or other
tttttaatccatataattcagccctaagcccnnnnnnnnnnnnnnnnnnnngaacatgatactctcactcatcctcttgacaacttttcaactaatgtcaacttgactattcaactaacctagatgagagagttccttgcatagtgatttcatctccttcattgttcaaaacccatggtgaatgagttctatgcccccacatagcaagtcaagtacttaatcatagtgagtaagacagttgtaatcaaacctaaaggagagaaagagatccaagttcagatcttgataatgctctgctacacaaaggattcaagtgctagagatcttgaacagaagaagttattatattttgctacaatcaatgtaaggttttcttaaacccttatgtttttatttcattattttagagaatttatatttaggatgttaaatcaacacacttgttaagaaatttagatccttgtaaaatattcccaacagttctccgattgttcacctcccactaccttttacataaatgaactggaacgacttttggggtggtgataaccagattgatgaagaattacttagtctagaaaacttatccttctgatacaactttgaacccgctgattccagttgttattttaaagacctttgatgactttgtggtttgttcttatgcttttatttcacatactttattttttttttcttgtatggcctttaggccttttacttttggacagatgatatgtttgttcttgtatggccttatgaacctttacttttgaataatgtttgtgtatggccttagtgccttttacttttgaacagacgactaacaagacaatctttaatcttcgctttaacttctcttgctaaacatgtagcttaatggatagcttttaatccagacttatgttttttatgtctaatctgaagtatgccatttgcacttactgagctttcaatttttcgcttaacaaagctttacattttgcttaagtttagcggtgcttgtttgatgctgtatagtgagggtgcccctcaagtgattgagtagacttatggtctcttggtcacttgaaactcaaaaaataccatagacctttgcctatgtattttcttggagggacctatttgtatgcatgttgaactaaaagtaaatatcgattttaagaagttatcttgttagcaagttgtttgacacaatttggaaagataaactcttttatccatttattggtcttaaatatgtgttgttgttgtacaatgtacattttttgataataaaagcttatagttagaaagtctgctttcattcgtcattttggctacccctgcacgacataccgaacaagggccaccactaaagagtggtggaaacttagcttttttatactaattcctgtacggtgagctgtacaggaatcactatttgtttaccgagattttcggaaattgattaataggagcttaaggaaatgaaaaatattaaataatagataaatagattttttacgtggttgaggcgttaatgatccttagtccacgagtctgtagtattatccttctttggaaaatgtttgcgtactaaaagtgtttacaatgataatctctatattccttttgtttctctctaagaagaaagttctcaggaatttcatgttgggttttgtgccccaaataaaacccatttcaatataannnnnnnnnnnnnnnnnnaaagatcaaaaataacattttatgtt

SEQ ID NO: 121368 - DNA, 1553 bp, Cannabis sativa
  modified_base (45)..(46): a, c, t, g, unknown or other
  modified_base (169)..(180): a, c, t, g, unknown or other
  modified_base (304)..(308): a, c, t, g, unknown or other
  modified_base (602)..(615): a, c, t, g, unknown or other
gtccctactcaatgtagatcatcatatatagaggatcattgattnntaggattataacaaatggataatctcaaagcgtatctatatcgtggaacatatagaatgttctatacaattgaaagtgcaattctaaatttatagtgttgcaaggaggaattaataagttagnnnnnnnnnnnngtaaattctagatctacttatcggaagctcggttatataggcccatggtccccatactagttgaaacaaactacttgtaaaactcagttaattgatttgaaataatcaattataattctaaaannnnnctatgtctagtttatgatttttcactaagatacaggggcggaggtatattagactttatagaagccatgacccccataggatttatatatggtatgtatttttatttttttttttggtaagaaatatgtctttcaattaaatctatgtaatttaattttgttttagtgtatagtggtcctttgacaaagtcaataaaaatataaatgttagtttttttttttaatttagtttccttttatgagagtacactattagtattattatatacaatttactattattattattattannnnnnnnnnnnnnattattattattattattagatctacttattttctatcatcttttacgacatttattatttaataatactaccccacattttcagaatttttttttttttaaataaaatcaaagaaatgaaaactaaaaggttaaaaggttttcaaaatagataattttgtctttatcattttttttctttattttatattttatattcgttacaccagatactatttttacaaataaaatggtcaattttttttttactatttgtataaacatatgtttatcattaagattaaaaaataacatatattatcaattagtaacagcagttttgcaagaataaattgaagagcatcaatataaatatataaaggagagttttagtagagttaatgtgacactttatatatcatttttttttttcaatctctcttctctcaattttttagatttattcttatttttaaagatttaattatatatttagtctattattattactaccaatggtaactttttattttttttaattaataatcattcattattaatgttgacttttcattttttataactcccactattattattattattataacatatttacttaataactaatctcatagctattatatatacctatacatatgcttctataaaattagagagattctattgttatgtattatttgataatatattcattcatctagctttgggtataggaggtaagcattatatttttgtattatttttctttaaatttctgtataaataaccatcattgataatttgatataatatctatatatctttataaatcttttgttggggaagatgatgtggcatcttctatgaaattccttttaatttctttgcactctcattttttgacctttttgttacctttttcatcattttctgtaatttattatttaatgactatt

SEQ ID NO: 121369 - DNA, 881 bp, Cannabis sativa
atatgacattttaattgagttgtcacatataagtggttggggcatgaatcaagacatatttacataaaatttggctccttattagggagctaatattatatttaaattaattttttaatatataaaaaaatttaataatcatgataacaactaataaatattgtttttcatcaatgctaatagtcatcttaaaatcctagctaacatgaaataatagggacgatttgattcaatatcaaaccacaatatctaaaaatctcctttctttcattttggaaaatatttccttgacttcaaagtctccaatagatatgttaactattcgtaggaggttggcaatatatttgttttacttttgtagcttaatcccaaaatagattgaaacaaacaacactaaaaatctacaaagacttcctagtaaacaccgttattatgtgataacaacaaaatatagactaaatttatataaccatatataacaaataagggcaataatcatcatcattaggataattggactgtaacaaagcaatccgcattacgcgttttgattaattcctttttagtcctagctaattaagcacctaataataaggctatattgcctctcctattaaatccaaaataataacactatattttgttttcttttttccaaatgttctaataataataatccaaatcaaatctcaaattttctctctcttttggtctctaccgattgagagagaaaactttgaaaccaatatgcctcgtcattcatcgtcatcatcgtcttcatctgataatgattctgataaagaagatgaacgacacgtggtccgttccaccgcagcagccccctaaaacccaccaccaccaccaccaccaccacctcaacc

SEQ ID NO: 121370 - DNA, 1320 bp, Cannabis sativa
taagttagagttttgctgttaattcattaatgacatggagtattattgggtggacagcaaaatggacagaaatcctagacagaggatccgcttcccattcctaatagtactgatattaagggcgacaaaaaagcatagctcttaaaaaattcaatttttttaatcaatatataattgtgatcattttatgattgttggtttgttttttttatgaaagttcttataaatgaattcattcacgaagaaaagaaatagtggtgataagaataatataaaattaatatagaaaacaaaaatttaaataaaaagaatttaattacaacctcgtgttgaagtaacaatataattaactatattttctagtccttttacttaatggttagcatttagacataactttataataaattcacaataaataaatatataaattaaaagtaaactaaaaagaagaaaaaaagatcatagaagttatctaaaagtggggcatgtttgacaaaaaaaaaaagaatattactcgaaaggtcccattgttttaggtcactcttagccttagggtgaccatactgcaaacacactacacatgccatttattggttttcttttctttcttctatttcaatcatttttatttatttattttcaatattgaaaaggacttttttgcccaactagcttccaaaaagtgactctgcttcccttaaaagaaaatagtattaagaaaaggctttggctagataccaacttttttagctatagcttgcatgttattgtagtttaatgaaaattatctatagctcgtaatattaaagataaatgacaaattttgtttgtgcccaaatcaatactttgttttgttatattttatctttccttaaaataagaataaataaattattaatatcgttatattttgagtatcccttattctctaccactaatctcttttataataataatgattttaaattaataattcataatttttacaatagcataattttatatatataacctgtagcaaatacgaaaattttgtgtcttgctaaaccatgatttatgcactatttattaagcttttacttaaaaaaaaaaaactccataacaaaagatatgaaaagtgaatagtactaaaatgtattaaaactttataatatatatgtgatgtgtatataaagtacgctaatgtatatggtttatctttagagaaatttaaatgatgtactaacttttattattttttttactgtatttttttataagtttcatattgcagtatattgtgttaaattttttctgttgttctactgatgtttttta

SEQ ID NO: 121371 - DNA, 1095 bp, Cannabis sativa
gaggggaacaccccataaacttgaaaagaaacttcatccaaaatgtttcacactaggtgtcatctcacctattgcttccttccaagaaggaaagaaacataaggtcgtatccctaaactatgttgataaattaaaggcagacaaattatggaggacgtggatgtcaaatttaagaaaaaagttcgtggcaaatctactagacctaaaagtgctcttgagaaagctacaacaaataaaaaaaataattcaagagaatacatctcctgaaaaaggtacattcatattttattgtaagtgttatgaaatttatttggtagcttttttatttatttattttctaattgcattattgattacaatttatattgttaggttccttccaataatataaatgctcaatatggtgataatatttcttttcctgaataaaatttgtcaagctcattgttctatatgccaccaatatcatcaaacttaagtcgggtatatttttttttaattttttgttcaaagttaaatattattatataattgttatgtttttttttttaattttaaatgtgtgattatataaattcaaagttcatctagagatcaaaataatcgaacaagtatgattgaacttatgcaacaagtatatatatatattatatattgcttaattttctataattgaatataatcttaattaataataagatttttttgtaggtttattcgtagccagtaaatcatcatgatctgtttggagattttaaataataattagaaaataaaaaagtactatgtcaaacattactcttacgagtgcaaaaactttcttttttcaatgatattatgacaatattataaaaggatatatattttaattttgtggtttacttttggacatgttttgcgtgctcctctttttctttaaggataattttatatggtgctagaactttttattttaatattttctgctcactaatcatttacaaaatattctgtgtaaagatgtagagtgagaaatataattatgtgaaatgtgtgtgaaattattttttgatgtgaattgtgttatattatttataataatataatatatagatt

SEQ ID NO: 121372 - DNA, 696 bp, Cannabis sativa
ggttctcagttttctacagaggagtttcacgatccctattaagatctggagattgaacaaggttcagcaggcattgcgtcgaaaattctgggaatagacactcacctaaatcggtgagttgggcggaggaagtggagaaaatggattttcaatccaatgctaaggatgtttggagcaaattcaagtctaatcaagtattgactccttctactcgattaaaatatatagaatcattgaaaattggggaacaaattattgctaggttggatttggaagaattggaattaaaagcttcaatttggaagaatgctatatatagtgttgggttctaatccccccctttaggttgtttaaagggtttattaagagggtttggagtaatctgggtactgataagatagtggtgacgatgcattttggatttacattggtaaattttaaagatgaagctacaagagatttgattttggagactggtgttttgataagaaattagtggttctacatggcaaccatagatttagactcggttcgtatggtgaaatctattccagactggattaggttgaatggtctaggatttcagtattgggggaagaaaaatcttagtgctcttgtgagtgcaatgggtaagcctacatgttaggttttatgccctaaataaaactctttacaatctgatcagttatcaatata

SEQ ID NO: 121373 - DNA, 1283 bp, Cannabis sativa
ccatcacatttatggaagaagacgaccagatggtgcattttgctcatcattacccgttggtgatcgagactcccattgccaacaaaattgttgccaggactctagtagacaatggaagttcaataaaccttttactcaaagacgccttccttgctataggtctcatagatgaagacctctccttgagtggttcttagctcaccaggttcaatgggactacactcatccccatatggaaagtgaggcttcctatagccttatgcccagacaccccacaaagcatgttcaaatatttcacttttgttgtagccttggtggtttttggagccatcacctcgatcagacacctatgcctcaaatttcctactcatccagtaagaataggaaatgctcgcaaaaataaaagagaggtgagaaaatgttataatgtggccacccaacaagccatttttattgtttaggaaaccaaaaacataagcttactgaaaggtcaagacgagttggaccttcacatatgattcaagaccgttttggaacctatggagaaattgaagaagtaagaatttgtgatcaagatccaaataaagttattcgcataagaaaagctatgggtcccaacgaaagaaacaaaattgtaagcaccatcaaataaattagctaatgtatttgcatggtttcatggagacatgactggaattagactggatgtaatcactcatgtcctaaaatgttaacagggatatgcctccaatacaacaaaaaaggcatcctctcgatcataaaagttagaagccttagagaaggaggtggataaaatgctatcgaacaccttcattagagacatgtactatccaaaatggttagctaacccagttcttgtgctcaaactgaatgtgaaatggtgaataagcattgactttaatgatctaaacaaggcttgtccaaaagactgctttccaaaacgcaaaattgatcaaatggtggatgccaccttcaggtttgaactactatccattatggatgtgtaatctaggtataacaagatcaagatgcatgtggcagagacaaagagttcactagctagggtatatagctacctagtcatgccctctgggatgaaaaatgagagagccatatataagcacatggtaaactggatgttcaaaaatttatgaggacatatatggaggtatatgtagatgacatgctatttaagtccaaatctggcaaaaatccctcaaatgatctcaaagagtgttttgaagtggtgaaaaaatatggca

SEQ ID NO: 121374 - DNA, 785 bp, Cannabis sativa
aataaagatatgactgttgttgttacgactgagatgtagggcattgcacatggctcgaactcgttaaacctagtgttattcttttctgttttattgcttaattcattaaatcttgagatctcttggtatattatttcttgattgtgttgtgtatttattggttaggtaaactgaatcgcaagtcattgattgtttctgtttcgcacaatacgtgtcgtgccaattatttgcagcatcgtaccgtatcgtgttcatgtctatatttttttatattaggtcatacttgtatctcttaagttcgtattaattttgtgccctgtcaaaaaatccaacttatatttacagcactctgacgtgctcataaattttgtttattcatacgaactcctactccaaacaattaatattttgtcctacaacattacaaaatagtagaaacgtggccattatttatacatgtccataacatatatggaaaagcttatagaatatgaaaaaaataaaacctatccacatgaatttgcatgatgaatatataataacattttgaattgtgacactaaattttagtgtagaatctttcacttttagtataataactttaacaattcatattaaatatccactaaataaatatattttacttaaaaaatatcttatagttttaatattcttcaaaattaaaattctcaactgattaatctgactattaaatcattactttacttaatttttatttttatttatgttgttcattttaaatttatagtttagttatgttgttt

SEQ ID NO: 121375 - DNA, 554 bp, Cannabis sativa
  modified_base (506)..(522): a, c, t, g, unknown or other
ttttcttatatacaactgacatttgcaaaaacacagtttgtcagtttcttacgtatttttttaaatgcactaattcttgttttaaagtaagaaattcaacacatttctcatgtcttctaaaaagccatcaaccattttaaaattctgcctcctttaattggtctaagaccatgtcatgtgaggtcttattgaagtacttggatgaaatatgcaatgcaagacctttgagtctttggcgctaccccaactccaaatgcataacttcaaggtggcccgcactgtgcccattatctctcatcttttgttcgctgacgataactttctcttttgtcaggcctccattcattcctgcaatatcatcaaagatgttcttgctctttatgagaaagctacggggcaacaagtgaactttcagaaatcgtctctctatttctccccgaatgtagctctaagggatcaaacccttatctcggagttcatgtagatgttggaaatattttaccagnnnnnnnnnnnnnnnnnaagtatgtttgattaatatcctaatatgaatt

SEQ ID NO: 121376 - DNA, 2194 bp, Cannabis sativa
  modified_base (937)..(945): a, c, t, g, unknown or other
  modified_base (1123)..(1126): a, c, t, g, unknown or other
  modified_base (2127)..(2129): a, c, t, g, unknown or other
atagtaagattacatggtgcactattagtatatagtttctgaaagaaaatctgaagtttacttctaaattttggcagagtttacagtgaggtacgggtactaaactgaaattcagtacaactttccatcctcagactgatagactgtccaaaaggacaattcagacaccagaagatatgttacgagcctgtgttatggatttggagggctcctggagtaagtatctactgtttataaagttctcgtactataatagttatcaaagtataatagggatggctccctttgaattgttatatggcagaaagtgtagatctcccattcactgggatgagaaaggagggaagaaatacttaggtcaagaatcagtacaatggactaataaagcaatcgagaagattaaagaaggaatgcttgcctctcagagcaggtaaaagagtaatgcagatccaaaacgtagaaatgtagagtttcaagtaggggatcacgtgttcttgcgagtgtctccaatgaaggggatcaagaatttttggaaaagaggcaagttatgccctagatttataggacctttcaagattctcgagaaagttggacaagtggcatatcgtttagctttgcctcctgctctttcagcatttcacaacgtattccatgtctctatgctaaggaagtacgattcagaccctgctcatgtaataaggtatgaaaatcttaagctgcaacctaacttgtcatatgaagaacaaccatttcaaatccttgacagaaaggataagatccttctgaataagaccgtaactttggtcaaagtactctggagaaatagcaaggtggaggaagcctcctgggagttagaatccgacatgagagctcaataagcacagttattccggttagatttcgaggacgaaatccttttaaggggggataattgtannnnnnnnntagctttaatttggaaattaacagattattagtgtttaattatgaaacttgtttattagtttagaattatttatttatgatgatttatttgaattcagaaagcattttatatgtcatatataaaatttcataactttgcattttttgtaccaggaaacattggaacgcggtgtttggnnnntagaatcacatcctagtatttttagtatagcgggacagtttagttagacattgggaatttgaagaatagtcgagattttagaattgaccaaaatatccctaagtgaccttttatgacttttagtgtgggaaggggaaaatggtccttttgccaatttgtgttttgtctatatgtgcatttaaatctagttaataatctgattttataaagtttaattgactgagtatacttgttaataaaccacatttcagttattcattttaccagaaaaataaaatttgacaaaaattacatttctctccctctttcaactctctctcttttcgaacccatagatcggctcagcttgtaaagtttgttcatcaatccttgtcaatttctagtaggttttaagtgaatccatggtaagatgagcttttaagcaactccctctctagttttcttaagtttcaagtttggatttcgcatgaatttttagtagttgagctctgtagttgttgtgattctttggaatagttttctgaagttaaataatgcttaaacatctttttttggctggttttagtggttgtagtgttgtttgagcaagctttgagttttagaacacaagcttgaccctataagggtaatttttgattctgagcttaggtatttgttttgttgcttgaaatatgtcatttagcgtataatatgcaggtctggaaggtttgccaaggattggaatcggtttcgttaggtttcagaatgttttaggttttttggggtaaatcggcttaacagttttataggacctgtaaaaccagttaccttgatttactgttgggttcctcgaaaaattcgtgttagtttcagagctttggttggtcaatttcctattagtttaggattgccatgttaagctacagaagataggtttttggtttaaaacctaagtccccggttgtgatttagggtgtcacttatatttgttatgatcaatgtgatttaggagcctgtaattnnncgagcagttgttccactcaggttgccggcacacctgaattgagaattaaggtaagattagtataa

SEQ ID NO: 121377 - DNA, 2249 bp, Cannabis sativa
gtcttgttccagggtcctagtctgacagttcttattcaggttccagttttgggtctcaagtctaggtctgggtttgggtcctagtacgagtttgagtcctagtctgagtcccagatgaagacatcgactacggttctattccaagcattatttcccggatcccaattaaagatttagaacctgtcatgggtctcggtctggttttggttcaggtttgggtcttggtctgggtttgggtccgaggctaggtcccatatccagacaccgactacagtttcgatccaagcctcggatctagatccgaatctcgatctcaggtccctgtctggttccattttgagtgccaggtcacgagctgggtcatatgttcatgtctggtctgcgtttgggtcccggtctaggtttgggtttgagtcctagtctcagttcaggttttgatctcagtctatgtctttatcttggttttggtttgggtttatgtcctttccgatcctagtcctagtccagttccagttccagtttcaattctaagttcaagtttgggttcaagtacgtgtcggggttcgagtttgggtttgggtccatatttcagtctaggtctggatcaggctcttggtgtgggttcgtgtcctgggtctgggtccaagtccatgtctgagtcccaagttttgatcgagatatgagtttgggttcagttctgggtcttagtcctgggttccgatctcggtctgggttcgagttcgggtctaagtctaggtctaggttagggtttgattctaggtctaagtctcagttcgggtccctggctcgagtttgattttgggttcgggtgcgggttcgagattggtcctggtccgtgtccaggttcctatcctggtttgggtccggggcaggttttgagttcgggtctgggtctgacttcggattccaaggtccatgtcacgttctggttcgggttcgattctcggattatgatctttgtttggtttccgtggcctaggtcccttggctaggtgcccccttctaagtccggttcctgggtcctggtctgggtctacgttcgggtttcagtccgagtcttagtttgagtccaagtcccggtccgggttcaagtccagctctcggtcccaatcttggtctgggttcgggtttgggtccctatcggcgtatggatcctagtctgggtctcggcaagggtttaggaccaggttaggtctaggtctcggtctaggttcgggtcccaagtctcaggtcccaatcctaattaaggtctcggtctagaatctgttctgagtttaggttatggtttgggttcagttctagtctcatgtctgtgtttgggttcagttttggtctcatgttttggtcctagtcacagttccagttttgattttgggtccgggtttgcttctaggttagggtctcggtccaagttggggtcggggtcaaagtcttagtctaagtccaggttcgagtttttcagatccctagattggtccaggtctgagtttgggcaccaagttttggtctgggtctgcgtttgggtctgagtccaggtctcgtgtttcaatcccgatctaggtgtaggttggtattcgattctgggtttgggtttgtgtcaatgtccaggtctgaatcccagtctcggtcagggacctggcttgggtccaagatcgagtctcgagtttgggttctagttcgggttcgagtctcagtcttagtctgggtccaggaccgagtttgagactgggtcggagatagagtttcggggcttcatcatggtctagttttgggtctcggtctaggtccaggtcctggtcacgttcctggtcctgttccaaggtcctggtcaggtattggtccagcttcagctccttgttcgagtcccaaatcaagacaccgattatgggtcttgtccaagccccggttcctagatcccatgacaagatctggagccaaataacgggtcctagttttgttttggttcatgtcttaggtcccggtctgggtctcggtctaggtgtgggactgagacaagggtgcagttttgggtctcgatcctaatttttggtcccgagtcctgttccatgttcgggtctgagtttaggtcttggttcgagtcctaagtcccggttcggttttggattcaggtttgggacccaatcccaaggtgggtctgggtccgagtctgggtcctggtctggttatagttttgggtctaggtctgggtttaggtcctggtctaggtt

SEQ ID NO: 121378 - DNA, 1717 bp, Cannabis sativa
gcgactcaagaaggagatgggatcgttgtcctgcatcaaaacactaccaattctgacattagacgcatcattctccaccacaaattgtttatcaaaatcaggtaaagccaacactggcatctctgtcattgccttcttgacatgagaaaaagttattgaagcttcgattgtccaaacaaaattgtctttctttagaagtttagtgaagggggctactatggacgcatagtgagcaacaaacacctttattgttagagagtcttcgactgtggccattccaagattcctgaatttttttttcggatcagcctgcaacccttgagccgacacaatatgtcctaagtactcaatttgctacttaaaaaactgacacttactgcccttagcatagtatttcttctctcgatgtagctgaagcaccacccgtaagtgttcaacatcctccttgatactacggctgaacaccaagatgtcgtcaaaaaatacgaggacacgtcttcggagcaatggcttgaaaaggttattcatagctgcctgaaaagttgatggtgcattagtgagtccaaatagcatcacagtgaactcataatgtccctcgtgtgtgtgaaaagcagtcttgtggcagtcacgtgggtccattcgaatttggtgatattcggcatgaaggtccaactttgaaaaattttagctcctcccaattcatccaatagctcatcaattgtgggtataggaaatctatcctttactgtaatgtcattcaaaactctatagtccacacaaaagcgccatgtaccatctttcttttcgactaagatcactggggaagataaggtgctggtactagtcttgacgaaccgtattgatgacatctctcgaaccagttgttcgatgatatccttttgataataggggtacctataaaggcgtacattcattggtgctgatcctggttgcaaaaaaattctatgatccatacttctgaatggtggaaactgagtaggatccataaaaacatcttgaaattcaagcaaaagacctctcccctcattaggtaacttggcatctagttgaaaaatttgtgtacctggctcatcattctttgttacagcagtaataggatacatttcttgaacatccccttcccagagcaaggcatgaaactgagaaaaaggcaattgatgtgttgccgcatcgaaagtcccttcaagctcaattgatcatcgtttctatcctcaaaaagttgcgctttagccatagcattagctaaatcaattggcttagactagagaagttctcttttaatttccaacttaagaccccatacaaaaaaattcaggaataaatggtaaggcacacctgttattcgtgtcatcatatcttcaaattcaacacgaaattgagccactcgacctgtttgagtcaacttagagattctccctagtgaatcatcatagacggaagtcctgaatcgtgactgtaaggcattgatgaaagaaccctaatctacaaatgaaccactcttttccatccattggaaccatttagatgcaaccccttccaagtgaaaaggaaccactgtcaacctcagatgataatcaacttgatgaaggtcaaaaaatttattaatcttatagatccattcttcaacgttcaaaccatcaaatcttgctaccttaactctaagatttttgatgaggaagttaacatgatgcgaatc

SEQ ID NO: 121379 - DNA, 659 bp, Cannabis sativa
tcttctattttaaatctgcacaaataaaagataacaagcgtaaaaatactccaaacatgattaaaactcaattaaaaatatactatacttaatctaaaattaatactaaaaataacctaacaggtttccttcaatctgcatatgaccattcactattcatcaaatcaaatccaactagctttcttgcacttcttgtctatgtcgacgacatagtaattgcaagcaccaatgataatgaagtgaccaaattcaaggcattccttaattcaaaattttagcttaaggatcttggacatttaagattctttcttggcctcgagattgctcggtccaaggcaggaatttctgtttctcaacgccttttttttgcttcaacttcttaatgaaataggtcttctcggctccaaggctgtttccacaccaatggatgctaatttgtctctcagtaaagatgttggtccccctgttaatgatgctacttcatatcgcagtcttattggaaaacttttgttcttaaccattataagacctgacattagctatgctgtcaatagacttagtcagtacctcagcgaccctcgccaacctcacctcaaagcagcctatcgcattattcaatacctcaaatgtaacgccctaatgctaaggcacgctacagt

SEQ ID NO: 121380 - DNA, 1557 bp, Cannabis sativa
atcaacagaggaggcagagttgactaaaagtagtgatggaaaggtatgaattaatagaaaaagggttggaataaatttgcacaacacaattaattaatgctattattctttaagtaaactctgacttcgatgttatggtatttgattatccttttactcctaataatcatttttaggatcataatgttgatattgatgattctaatgaagattcagactctcggcccaacaagataaggaagactagtccttatggtaattctgaaggtatatattcaccatcatcatcatcataattgaatgcaaatatggttactaattatgcaattgttgtttttaggtgcaaataagacaagtttaactccttgtgtgaaaattgaaccttcttctactagcaataattatgatgataaagcaaataaagaagtaattgaaccttcaggtaacaagtctattatgattcaagacaagaataatgtcaagcgttcccctagaaaagttagcttatatacattttgtttatatagttaatgcagaaaagtttgcaaaactggtatgtgaagaaaatactaatgacaatcaaggcactaataataatcagaggtcttcatcttctggacttagtctagcttctgaagcagccagcaaattcatctcagacaatccttacctccaagtgaatttgagatcatctcatgtgcatggaagaagaatggtatgtaaaaaatgtggcccattcatatacattattatcatgacatctttgtatcaaaattgtcttctttttaaataatttcatctcatgaagaatgaattatgtttgaatatcaattcttcgttgtgcagtatattccaagggcttttggaaacctttatttcgagaaaaaggcacaaactgtaactctttgggttggtgagaaaaattggcatgtgaacttaactgttaataagggatcagttggattagagtataggttttctagtggatgggctgcatttgcaagagggaattgtcttcagccaagtgatttgtgcatatttgagctgatacagaggaatcaacctcagatgaaagttaccatatttagacaaaatggtttgtctctgtaataaactgttgaaataataatataatgactaaaatgcttgcttttacaatggtgtttgtgaatttgcgattgtcttaggccatgcctaattgatttctcaacttcactttttcatgtatggtaaataataactatgaaaagaactatgtaatgttttggtgtaacacatataacacaaataaaaaaacctatgtagaccaatttggaacttaagactaaattaatggctaacaaaattgttctaaaagattctctcagaagtaatcaaatatgttaaagtatatgtcatgcttcaaaattctataagagctgtgtgtgaggaaattgagaggttaattgcaaaatatttgtgagtcttttcaatgtaagacgcatgatttagtacatatcaaatttgaggggcatgatttggtagatatcaaagtttaggaagcatgatttagtacat

SEQ ID NO: 121381 - DNA, 2532 bp, Cannabis sativa
atcatgtaagttgggctaatgtgagtgatactagtggcaaatggaaagattgggatccccctattactcaaggttgttaagagacttttggaggtggtcatgaaaatccactgtagattccatcagatttggagcaaaaatttcgttgaaatggaagctaggattcaacgagaataggaggaaattaagagattgagacaacaaaggtcctgtatcgtacctttatctcgaagtccaatttcttttattccgatattctcagtagaacagagagtggctagtaactgaatggaactatccgatgggaattatgtgatgcaagggcattcaattattctaacaaacttagacgagatgaatacttctccagctacgtacgcttttgagtatgttcatgagccccgagggactcaggttgttggtggagccactatttctcctacctctggttatggtagggtggtagtgactcaaccactgaccagaagagaaagacaccatctgcacctagtggctcaaacctgaacaagttgtttcgagggaaccagggtcaaggcaactattagggtggttctgagacccgatatacttacccagaatgtcccaattgtaagaagcaccatttaggtgcgtgtagagggcggggatgtttccagtgtcattttcctgggcattataagagagattacccgcaacttaagaaagaggaacagaagacaattgcaaaactcactccagcaagggtgtttattttacctcaggcttatgctgaagctagcccctcaatggttacaagtcagctctcggttatcaactcttatttctctatgttatttaattctaaaaatagacattcttatgtggcggctaagatttttatcaaaattggatagaccgtatgaaagttttttaaagggtttggaacactactgcctggcggagaattatttatctctaaaaggtaggctaggtctatgccaatcagaattgaggatagggagttaagtgctgatttgatagaatcgggtttaggaaattttgatattatacttggaatggatttcttgtctaaagtactcagttagtgtttattgttaatggatgatggtgatattccaacccgagggcgaggaaccatttgtatttgtgggatcagttcagagattctggattccagtaatctctatattgaaagcaagagaattattacaagatggatgtctaagatttatagcagtggtattggacaccatatggcctgaaacaagtcgaccagaagacatcagggtggtttaggaatttctagatttttttatctgatgaacttttgggtttaccattgcaaagagagataaattttgttatttatttagcacctagagcagaattagtttctaaggcccatacaaaatggctccggcagagcttaaagaattgaagattcaatttcaggggatgcttgacctagggttttcccaacctagtgtgtcaccctggggatcccgtattatttgttaagaagaaagacagattcgtacgcatgtgtattgactaccgagaactaaataaactgactatcaggaataagtatccttatctagaatctatgatcttttgatcaactttaggggaagatgttcttatcaaagattgatctccgatcgggcaatcatcagttgagaatccgagaggaagacattccaaagactgctttccgcagaaggtatgggcactatgaattctctgttatgtcctttggactaaccaatgctcgctcttgcagcttttagggatctgttgaatattcaaggatttcctcgatatcagtgttattgtttttatcgacgacatccttgtgtactctcaatctgaagaggagcaagagtagcttcagatggttctacagcggctacgagaatgtaaactatatgtcaaatttaggaaatgtgagttctggctatctcaggtgtcttttctcggacacattgtcagtaaagatggaatcaaggttgatccagggaaaattgaatctgtcagggaacgaccaagaccgaagacaaatacagaagttagcagtttcctgggtctggctagttattaccgtcagtttgttgagggattttctgacatctcaaaacccttaaccgaaatcatcaaaaagattcagcagtttctatggacagatatgtgtgaagcaagtcactactacaaaatagttttttttgacgtttttaaacagtcgtttaaagtattcccgtcgatttctataaccgtcacctatacgaccctcataaaaccgtcgccaatttggactttccgacggtttaaaaccgtcgcttataacagggtatagacgacgattttaaaccgtgctttatactataggcgacagttttaaaccatcgagattgtaaaaaaaagagaaaaaataccaatttttttaccattaatggcaaaaaaatctgtattttcccctatttttttttcttgcattagctttataattttacctaaattaaaataaaacaacta

SEQ ID NO: 121382 - DNA, 1602 bp, Cannabis sativa
  modified_base (574)..(578): a, c, t, g, unknown or other
gaggtaggtgacgactgttgttcaatcaaataatagagtagtccagtacctcccggaggtgccttatcacggttccgacccccgggagtatgtggagccttcatatctcctccgggaggtgtcttctcgttggcactcctaatccaaaaagacttagtcgatttacctaagagccatgcctcttagatcaacgtgttgttgtcatgttggtccacgtattttgggcaaaattaaggacaacagtcactataagtaaaaaaatttgtagtgtacactaaaatatatatgtattcattactaaaataaataagtatatgtatttaaatttatgtgtatgtgtctatgtgaataagaataattttttggatgttttttattataaaacaaatcaaatacactaactcaatatattactaaaaaagattaagaaattaaaagtttgtgtctttttttttaattactaaaaaattaaaatatattatatatatataattataatttttaaaaaatatataattaagcggattggattggatcggttattttttgagatcaaacaacatccaatccgcannnnngcggattttagatttttcaatccaatccaatttgcgcaagtgcggatatctgcattttgcgaattggattggattgaatcgtgtagattggaggatcgaatacttagtgaacacccttaatttataaatcatagttttataattttgaatttatgattttttttcttgccattttctatgacaaccattctcttcttaggggaggctaagcacaccatctagcttctataatcacactcatctacaaagtattcatttgtctcaaaattatgttggtggctcaccaaaattttctaccaaagaaaacagtagaattttatttatgactctgttgacttaacatttcgttcaaggtatttacttgtaattatttacttctaaggtttgttctagaattttaactgaatcacaagttgagacatgtgaactaatggatcttgggattggattatgtccattcactacaaaaaaaaaataaaaaaattacttttaatcacaacaaaatttttgactaaaagtaaaattgtgattaattataaattattattcttatgctatgactaaaaggtccgtgactaaatgtatcagtcacaaaaattctaatttattgtgactaaatgtattttcagtcacaatactttttgtaactaaaactaaattagtgataccttataattaaatattatgttttagtcacaaataatattttgttgtgattaaaagtcacattaatcactaaaaaattatcactaaaagtagcaattttttatagtgattattcatatttagtattataccttaatatagtgatcattatttaactttatattttactgatgcgcagacgtagtggtgatataacacatgaaatttatattttgtagaaaaatgtttcatgtttggagattttgcatctaattcaatttcttttaaaattttatattttttttaaaaaaaaaataatactcatgttttctattaatagattgagtaatttaagttaaacatctttttgcattagcca

SEQ ID NO: 121383 - DNA, 1871 bp, Cannabis sativa
tatacacttttagagttactcaatgtgtgtcactaaaacccaattttctagtagtgatttgtcaagacaaaagttatcaggacaaaagataccaatcttatcctaaagacataggtaggtgcctagcattgtccctatccctatgaaaattgtctttttgggttaattaattcaattaggtcaatatctaatttgaaaagtagttttatatatttcaaggtttttgagatattctctcaagtagttgagagaccccctcataaatatcagtaactgaattctgttatagatatttatttaattagataattaaatagatttaactgctataaatagaatcctgatttgaaaaattagatatacactttacacagtaaatttcaaaatctatagagagaaaaagcaaattgattttctctcagttgttcttgctcatgtgttgagaactcaacatcaaacaaaggttatacactttatcctaatagctcacaatatttattttgtgaggtggatcgatttagaatacactagtgtgagtctaaattgcaatttcctcatcatctagattaaggaatataacttacgagaagttttgatgataccctgataggcttcaagggtatactctaaatttattatttttatggttttgatttaatgtacacaaatgtagagattctttggctatgatataatgataatcagataatgcgaaatttctcctttgcgtacctaatttagtaccataaaactaacagcctgtgtatacatatacattaaaggtaatgtagtggtattcttggttgttcatgttgatgacattcagcttattaaaaataatatagaaaggttatcagacgtaaacaagtggtttgctgaataatttcaaatgaagaatttgggagaaggaaattatgttctcaatattaaaatctatataaatagaaagtggagaacattagcactttcttcaagcaacttatatagataaggtgcttgaaagattctcaagggagaatttcaagaaaggacagttaccgtccagacatggaatttctctatgcaaggatcaatgtctaaagactccttaggatgatgtcatttatgctgtgtagatattctaacttattttttagataagctgtttgagaaataatccatacttcacgacatgctgaggaggtatcacccatccatttcttaaaatattccacgtgtcgcctagatgaacgccacgtcaccttgtgcgaagacacaactcaaattttagtttttctatgctttctctctttaagctaagaatctttgctgacttaagcctcaaagagtttctacaggtagacccccggggcttttacctcccgtcaatccagacagagatcatcagagaaggaagcagagaaagtactagctaaatattttgagagaaccgcaggctgcagtgactggagaatatttgccttccaattttggtaagtattcatccacaaattttttacttcaaataagtacttcaatttagctacaatttctcagttaaaaaataattaatttggtcgatattattaaattgataaattgaaagtctttattatatattattattaggatcaggagatatataattatattaaaagaaagatattattgtttatatgtcaaatatattttaaattgttgatcaagagaaagataagatctttataataaagtcaatttggcaatctataacatgggagcttccagcaaacaccaagcatggacattttttttttttttttgtttttttgaagaaaagcgtacgtgcgatagatgaaaaaaacagttagacctcacggtcattacagagtatagtttcgggcaaggaggaa

SEQ ID NO: 121384 - DNA, 2467 bp, Cannabis sativa
catatttaggatgttaaacaatatgcttgttagtaaatctaagatcctggtaaaatatttccaacagcaataacccaagtaagttcagaggtagcatttgccatagctcgatattctgcttcagcagaggatagagaaacaatttgttgtttttttgatttccatgacacaagagagctgcctaggaagagacaataacctgaaactgagtgcattgtgtcttgacaagttccccaatcagcatccgaaaaaaaaggatatttggacattggaagtggatagactagtctcagcatgagctgatatggttggagttgtggtagataaaaaaaataaaccttgttcaagagttgtttttaagtattgtaggatgcgatgtgcagcatgaagatggggaacccgggggctggttaaaaattgactcaagtgattgacagcaaatgagatgtcaggtcttgttatggtcaagtatattagtttgccactgaggcttctaaaaacagtgggatcgggtaggagattcccttttgagttgcttaacttgaggttagtctccatgggagtggaggtaggtttggctcctatgtaacccttgtctttgagaagttgtattgtaaagggtctttgagagaccgaaataccttgttttgttcgaccaacttcaagaccaaggaagaactgaatggttccaaggtctttgagtttgaatttatcatgaagatatgtcttaaaatgagatatggcaagatcattgttacttgcaacaataatgtcatccacatatatgaggatggctaagaaaatgtttgtggttctcttgatgaatagagaattgttagaaagagattgagtgaaaccatctgaaatgagggtttgactgagtttactaaaccatttcctagaggcttgtttgaggccataaatgttttttttttagtttgcacatagtgttggggggtgctttgtaacctggaggaattttcatatagacttcttcatggagatctccatgaagaaatgtattattaatgtccaattggtggacattccagttgtacatggcagcaagggtcaaaaaaatctttagtgtgttgaacttggccacaggagcataagtttgagagtaattaatgccatgccattgagtgaagccttttgttactaggcgggctttaaatctttcaacagccccactttcattgtattttactttgtagacccatttgcacccaatggccttatgaccaggtggtaacttggtgacaatccaagtgttatttttgtcaagagcatccgtttctttgtccatggcaaggacccagtgtcaaaactgagatgcttcgacatagctttgtggttcaatttcagagtaagctgcaagtacagctgctcagaattgaggatgtaatttgatatatgaaagaaagggctcaattgggtgagctgtgcaagaggcatgacagatgtaatctgtcaaatgctttggttttgtgatagttctgccaattcttgtagatgtggtagatgatgagtgaggaactagatggggttttttgggtataggtgctgctggcagtagttcagtagaaccaaattgattttctagtttagaaatcgctggtgtgggggttctgtttgaagtattttctggttctgtagtagatttagttgttgaatgagtgccaggaacaggtgaattctgtgatattgttgctggtatgcaggcagttggtgtagagtttaagatgcctggagcaacaatagttgttgggctatttgggcttcttgatgcagcatgattatgtgcaccagagtttggtgctggtgtagaaccaggtacaatgtgaggcatgttcatagattggtgaacacgatttagctgttgtactagtttaattgtagggagtacaatatcaggaaataatttgttgatctcatgaggagatgttgttaaagacaatggaaaaattgtttcatagaaaacaacatcccgtgagatgtaaattttctttgtttcaatatcaagaagtatgtaggctttcatgccttggggataaccaatgaaaacagaagctctacttcttgatgtaaatttatgtcgtttagaggtaagggtggagccataggcaagacacccaaaacttcttaaatggtcatatttgggtttagtaccatgtagtacttgatatgatgtcatacctttgaataattttgagggagttctatttatgagataagtagtcgtttgaactaggtaaggccaataaactaatggtagattggattggaaacctagagcacgagcaacatttaatatgtgttgatgcttcctttcaacaactgaattttgttgtggtctttccacgcatgagtggtagttgattatgcctttagaagcaaagaaagattgtaaattcagttccttggcattgtccgatcggatggccttaatattttttgaaaactg

SEQ ID NO: 121385 - DNA, 2607 bp, Cannabis sativa
  modified_base (2554)..(2558): a, c, t, g, unknown or other
atatattaaaccacaaacatgaaaacaacatgcaaacataaatgacttctaatttcttattgataacaaatcagattagattgtaatgggttttatttagggcataaaatcccaacaggtaaggccattgttgtacttctagaagttactgagtgttgtaccacatgcactccgtaccccttggtactcatgttggtaataatgtaactactctaataccttacattgtactaaaacccttaaaactatctcatttcagtgttagtagtgtaacaaataataacaagaattcattcacatatatgtactttatgctatcttacctcatttctgtgcttaggtgtgtcggtcagcatgagcggaacaacaactcgacgttttacagggtcctatattacaacattcataattctgatgagagacacacacaaaaacacttcccggggacttaaaatcaaaactaggaatatccctatcgatgaaatacatgacaataccctaaacatcacaaaaacgagaaaactagggttttcaaagttgttccaaccggtagactggttcctgaaccaaaattccagtttgatggggtttcctggggaccaaccggttgaccggttctacaggttcccctgaactggtcgaccggttcagtgcaaggacacccaaaaatgaccccaaggccacaattcaaacccaaactttctaaaaacttccaggatacatgtatgcactataatgaacaaaattcaagcaatagaattcatcatttaactcagaaaaccaaaacaccattagagctcaaagcttgagctcccaaactccaacttcacccaaacaccacaactatcaaccaacttagctctaaacaacctaaataatcacaacctaaccccagaatctaaaatcaaaccatcccaatacctacaacaacctaagtaccaaaattcatgcatcaaaacctactttgagctaaaaaaaaaaatcaaggagaagtaagctagagtataatacctttgattaaagctctaaatcctactagaactcactgaattgagttgaacaaaatcaaaatccttggctggttcaaggtggttcgagagagagatgtgggaaaaggggtagtttttaagtttttctatatttacatgatcaatactattcttttctcaaattaaataattaaatcagattaaaaatgcctatataagacaaaagttctaccattaaaagactaatatacccctaacataaaaaaaaaaaccttaatggcatctaaaggcaatttggtcatttctaaatcttgacaatttcccatcattttcaatgcctaacaatgataccccgccatcactaaaattttaaaccatataaagtgactctctaatgatccaatcccgcgttccactgctaccaacacaaatattgaaaaatgagaaattcacataaataacataattaatacatattgaacttaaataaatattcacaatatataaatcataaataataattcaatctcataattaaatcctaattatttaataatttaatatattaaacttaggcagtcattacatctaggatctctgaatcacgactaccacgctatgaatgtaagttttctatattattttattatattatataatttagggttgaaaggtgtgattttatttatatgtttattgatttaggaataaattgtatgtttaatgtttgttatctgggagttgatgttagatttatggttaaaaatagtcagatttgagttttgggcaaaaaactaggtttttgctatgtctgatagtggcccgatgctttcctgttattataatgagtgaaggttgaagacgaagattcgatggtggttgatagtggcccgatgccacttataaatgtaggatatggttcgatagtagtctgattgtggtctgataccttcttgacgagcttaatgaatggagcttaacatctatttcaacttgaagctttcgttaatgctgactgaggctcctgccctgacacaagacattccataacaggcttttgcatctttttaggccagtcactcatctcttggaaatcaaagaaacagtccactgtttcaaagtcctctacagaagctgaataccgatccattgccaacaccacctgtgaaatactttggctccacaacattttatctgattttggcatctcacaaactcagccaacagttctttattgtgacaatcaagttgcgacacacatatctgaaaatgttgtctaccatgaacgtacaaaacatgttgacatcgactaccacattgttcgtgaacaagtcaacaaaaatcgaatcaaactctcctacgttccatctcgacacaatattgcagatattatgacaaaggctctctttcctactcagtttcacactttgttgtccaagatgagtgtcactaatttatacactccatcttaagagggagtcttagacacagctggatatagacggttagtttgttaatttctcttgtcagttacagttagttatatgttatagtgagatttctcnnnnntagaaactcgagaccagacccctccttgaaggacacgtgtatccagact

SEQ ID NO: 121386 - DNA, 904 bp, Cannabis sativa
gtggttttagagagtgatttgcctcaattgaactatatgagagcagtcattaaagagacttttagactacaccctcctgcaccagtgttagtccctagagaatctctagagcatgtcaccatagagggatatgatattccagccaagacaaggatcattgtcaatgcttgggcaattggaagagacccagaaacttgggaagatccagaaatatttaaaccagaaagatttttgaatagcagcattgatttcagaggccaagattatgagctcataccttttggagctgggagaagagtatgccctgctataacatttgggattgcttctattgagattgctcttgctcagcttctccatagttttcattgggaacttcctcctggtgttactcctaaagatttagatatgactgaagtttttggtatcacaatgcataggaaagttggcttagaagtccttgccaagcctcgtttttcttgaaaattgcttatggtaacaataaaggattttctatatggttgggtgaactgtattattatagatgggttatattttcttaacttgttctgaagtgagatcactcgtagcattcaataaagttaagattcatattattatttattattaatatgaaatcaagaatttatgttgtttattagttttttctaccgaaaacatatatttgtaacccccgagtgtaacccgaacatgtgtcctatacttagaaagggccctgtgtagtgctaaaatgggctgagatgcaaaataactctaatttagaaaggctaattaggattgttaccccttgaactttaacatgtaccaaatcatgtcccctgaacttttaaggttgttgaaaatgccccctgaactattgacattgttggatttaaggactttt

SEQ ID NO: 121387 - DNA, 551 bp, Cannabis sativa
ctcccaagtcccaacacaaagcagcagcttgagaacaaattaaagaggtaaaaatcttattgctagcgttcatctagaggcgttgctagcgttcatctagcgtttcagaagaaaaaattgataagtaaaataattttcgtcgtgaaatacttgaaaaataatctctcattataactttaacaaccttatattcaacaacaaggttattataatcataacctaatactactaatgcaaatctacaattaacattgcaaatctacaagtaaagtactgaagcgatgaagatgacgacgacgagttgttaagtcttttttgacggtgatagtatatgctttagaagtcgaaataagtaagaaccagtgtttgcatacataagtacactttactatatttttaaaattaggaagtgggaataatatttccaatagtgctaactctcccactgagctccacagtcagtctctgctactttctctttattcgcggtatagttctaccgacgctattctctcattgtttgcgactatggctactgcctttcacgaata

SEQ ID NO: 121388 - DNA, 834 bp, Cannabis sativa
  modified_base (46)..(50): a, c, t, g, unknown or other
aattcatattaggatgttaattaaacatacttggtagtaaatctannnnntggtaaaatatttccaacatgtttatgcatacttttaaattagtggataagccttttatttctaagtatcttggacttgcccaatgcttttctcgtgctaagtaccaatcttttgtgtttcttaaagacaaaattttgtctgtaattcagtcctggcatcacaaatggttttctaaggctggtaaagaaattttggtcaaggttgttcttcaagctattccttcttatgctatggcttgcttccgtattcctaccaaaatttgcaaggaacttgaatcgattgtttccaagttttggtggagctcttcccctaatcgtccttcaattcattggaagaattggtctatgatttgtcagtctaaatttgtgggaggtatgggttataggtcattggttcatttcaaccaagccatgttagcgaaacaggcttggagaatttttcataatcataattccttacttagtcttactcttaaggctaggtattttccacacacttcttttcttcatgctgtccacggtcatagtccttctttctcttggagaagtatcatgtggggtagagatctttttaagagaggactcctttgaaaggttgggaatgggcaaactattaatacacttgaagatcgttgcctgcctaattttgctcttacaagctctgatttgatagccactctcccttccccttcattgtccttttttatttctccttcaggtgcttgtaatttgaataagctgggatgttactgttggattttgtgccctaaataaaacccattac

SEQ ID NO: 121389 - DNA, 1587 bp, Cannabis sativa
tgaataatatttgtaattaaatttatatgactacaaaaatgtatacatggtccaatttttgggtaccttacctcatataatataattccttaattgctaaaaaaaaagttaaatcaagattcattattttttttaatgtaaattagaattttattaatttactaaatcagccaaaagacaaaactgtaattctgtaggaacatcttttccactgaaaattcgatctggaaaagaatataacactctagcaaaattgtacgcagtcatgaatgtctttattaaaataatgcacattaggtttttattaaatataatttctgtatttttatatataataaatgtctttaaattaaacttaaaaaggaagaaaagcatgcataagtacttataataacacactctcttgatattcttaaatatataatgtaatgatttcattacatttttagctctacatctaaaataaataaataaatattaaattcattaaaaataccatgatgaatgataacccaaataattaaaatctgtaattaagaaaataataataataataataataaatgcactccaaacttaagttttaaagctttttcttttttttttaaaaaaaaaataataagtttaaaattaattaagtgttaaaattaaaaaggtagagtttaattaaattggttgttgtcccatgagactgatgatcagagggatttgacagagtctttttagtgcagttccacttgaagtcattcatcataaaaatcaaattcaaaagttttatgccaataaatatacctaacctcaattattattattattattatttttgttttaaatatatatatattttgtaagatagatttgtaattttttaattttttttatataatttacatttacattattaaaaaaaaattcaaataatatatttctcacgtttataaaaaaaaaaaattatgctacatacagcagaattttatttacttatgtttttatatggtaaattatttatgagaatttttttaaaaatttataaaaaataaaatcataattacctgaaagccgaaaatatatatataaaaaaaaataataataaaaaaaagaaattgtagcaatcaataaattcatgtaaaaaaagattttttttgttttttgaaaatttatattataaaaggttggtgtccatataaataaaaaatatcaaattaatgatataaatttattggacggtttgggagctgtgatgggtaggacagtactgttttcaatggcatttaatgaaacatttttctccttaaaattaaaaaaaccaacttggcttccaacgctattgaaagttatgtttaaattaaattaaataaataaataaatatagaagagtttttaatggttacatgaaatatgtaatcgcgatggttatatttatttttgaggaaattacactctatatattttttatattgtcttcttttatttttaccatctttttttaaagtcttatcatttttacttctttttaaaaataatgtaccaattttgcccaggtcactttaagatattatccatgtgactctcttatgtcagggtatt

SEQ ID NO: 121390 - DNA, 1917 bp, Cannabis sativa
  modified_base (81)..(91): a, c, t, g, unknown or other
gtattttatgtaaataaaattaaaaaaatcgtaaaaatgtttaaaattccgcaaaaccgtatttttgttgtttttttgttnnnnnnnnnnntttgtgaaattaacccttttttatttgggtccgtaaaatgagtgggtcctaggcgcgggcctaagccgcctatgcctaggggccttgaatacctatgtatgctatttaaataaaaaaaaaatcaataattttgatcttatgttattatgtattttaaaatcatacatatttaaaatttgaaattaaatatgatcaaacatcttcaattatatgagttcccaatttaaatttattgataaaattttattaaacaaatttaacttttgaaaaatataaagtactaaacttacttttcttttaaatatagagtgccaaatgaatatattgcttgataaaatttgttgtccaattatttttgtaatgtcttactagattaggcacgttatcgtaattttaatttattgtgcactcctttactaatcaaaagatttattgaaaaacttaaataattaaaacatttataattatacattaatttgaaaattaaatattttacataatccaggatcccgttaaaaagttacaatcgttttataaaatattataactacaaaagttgtcgcccatcgactattaaaataaacctgttgtctcaaagatcgaacactccaagtctaaccacctcgatacgtacaattttcgtgctcatgctcgctgctgttcaaccatagctttgtcttttacctacacatataaataatatctgtgagttgactcacttagtaagaaaagtataatcataatataaacataaatgagattataaccagtcgcccatacacctaatcataaccatatcccgcatccaatgtgtactaagtttggaacgttcgtacgataatacgattaaccataatattagcctatactagatactctaatcgtaccgatgtgatatcgtcaatacgtactctgccgaacatatatttgtcgacatattcagtgcaactctatatattacactaatatcgctcttactgatatgttatctattaggcaatcttaaaatatgcacgctaaacatgtaaatacatatgcaactattatactaatctcaccttgattctaaattcaggtgtgccggtcaacttaagtggaactgctactgaacgatttacaggtccctaaatcacatcatacataaaaatgataagtaatacactaaatcacttttcagggacttaaatttaaaactaaaagttttcctatcgataaatagcaaggcaatacactaaatattgagaaaatactaaaaatgagattttcgagaaaacactacaaaaaacaacatgctatttttttggatccctaactctggaaaaacggtctaccatttttcactatagaaacacaaataatctcatttctccttgaattctaccccaaatctcataaaatgctccagaacacctatttgggtcataaacaacatataccaactgaaaaatctatcatcaagctactaaacacaaaaacactattagaggtccaagcttgagttcaataactcaactcaagcttaaacataataacaattaacaaaatctgctccaagcaactcagataacaacacattaatcccagaaactcatcccatattagctcaaacatacaaaaaccaaaaacataaaaacttgcatgagaacctagttctttaactacgaacttcaaagaaaattagaagagaagcttaccttgaatggatattagaaaacatggctagaggtccttaatttggtctaaaattgatggaaaaagtcatttgttcttagggtttttttttgtaatatcccggaaaataaataatatttaaatagacatatttt

SEQ ID NO: 121391 - DNA, 535 bp, Cannabis sativa
ataaaaaagccaaaaaaaaaacaatcattttttttggctattaacaaaatatataccatgttttaattacataattttcctaaaataaaatagtatttcttgtcttttttagtttcaaattagagagagattggaaatcaaaactatttggaagtgttatttaatatattatttgacactcaaagtcaataatgatgagaattttaaattgtgatttgttaaaaatatgatgttgtttaagaaaaattatatcaactccttaagacacggatgaacatgggcaagtggggacttgagtctctaataaaataatacttatatttattttaagactatgataaatacacactcattttacatactattaatttacacaattgacaatatataccatgtgatatgcatcttagactaattaatttttttagggtaaaactataacacatggtaatgtgtaatttgagtgtatataattgttgaccgaggttttcggcaactaatgaaatatgaatatgataatgagctgtaagaaagc

SEQ ID NO: 121392 - DNA, 1094 bp, Cannabis sativa
taacgaccttaaaagttcatgaggcatgatttagtacatgtcaaagttcaggtggcaaaaatcctaattagccttattcaaaactagcagtattttgaataataaaataccaaagcgcatttatataattactttcaaatgcatgtattttctatgcaaataattcttgtttttctatatacatatatttaatattatttctttattttatatatatataattatttgttagaaatactgttatttttctcgccacttctttcatcttcttctccctctctttctaaatttttttaaaagttgctcctcaaaggacccaactgtaactaaaactaaagattttgatatttcttttcaaaaaaaaaaaaaagattttgatattttcttttaaataaaaatagaggttgagattcaaaaattctctaatagcgaaatcaaaaacaatgcacaaaaagcttttatatctctctctcttctcagatcatatccacaaaaaaatgttcttttgtattgttctttgactttaccattagagaacttttgagtctcaacctctattttccttttgaaaaaaaatatcaaagctcttagttttttgttacagttttgggtcatttgaggagcaacttttaagaattttagagaaaaagagagagggggagaagaagaggagagaagtgacaaaaagaatgatagtattttttaataaataattatagaaataaataaataagaaaataacattaaatatggacataaaataaagtaatgcatgacacatattaattaaaaaaatgactacgtaaaattatttaaataccttgactaaagcattttccaaaattatattatatttagcaaaaaaaattaataattaccttacgctatatttctatcaagttttaaaattaaatttcattacacaattacaatagttgatgcaaaatgtaacattgaaaatataaaataacaatattttagggactagttcaaaaatacacaaaaataacaaaaatatagtttcacgaaattttaaatatttttacaattttttttaattttattagaataatacggtctttttatgttgtatt

SEQ ID NO: 121393 - DNA, 1704 bp, Cannabis sativa
gcaaccactctccaacaccctatacgcgaagaccatcctcctgcagcctgtaactaggaaccatctgatactagacaagggaacagggtgcctggctaccccagcacctgcagcatgcagcgagaaagtgatgtcttgtcccaatgggaccattttctacatcaggcaattagagcctataaatacaccccatctcagatgtgaaattggattggaagataatttggtgtaactcagatattgaattcactatagagaggaatattcagacatcttttcaccttcatctttatcttatctttatcacataattgggtgaccttgcatttttgaccactaacttatttcacgagttctcactgtcaacaatctggcaccgtttgtgaacgaaaagctcaaaccaagtcgctcctttacacacaattgttacataatgggtagacgttctcgtgtttgtcagtacatggaaaatcaccttgacgaagaacggttggttgcaccagagcaagatctaccactgtctgccatcggtgatagggaggcgaacatagatagggcacaagcagatgaagagcaccaacaaagagtgcccatcggagtccctaatgcaccgaaggacgtcaaaacagtcatgagagggccttgtctaggaggggaagctcgaaggaaaagggataggtacgcccttgaggcaaggtgagaaactcactcctagaatttggagtggaggcccctaaataattttgagggggagaacacctaatcacctttatagaagaggacacaacaggtgtacattttccacacaatgaccccctgatgcttacggtgcaaattgttaacacccaggtacactgaacattagtcgacgacagaagctcagtagatatcctatattacagtactctaaaggagatgggattggaccttgagtatctcaaatcatgtacgtcaccaatatacgggttcaccagaaaaccagactaactacggggaacgatagaattgctgctaacgagggggaggagaccctaacattctataatgatggccaccttcttggtagtggattctccgtcagcttacaatattttgttgggaaggccattgctaatccggttgaaaacggtcatctcaatgtaccacttgaccatgaaatttccaacccccgagggtgtcgccacattgaaaagggatcaggatgaagctagagaatgatatagcatgttgctttcgattgcctcgaggcctcaacaaccattgacagtgatcaccaatgggggccccgatagagagacaaagtctcgtcacaactagatggcaaagtttgtgagaaagtgcgagtggagtctttacagcagttggaagaaatagtaatctttgaaagcccccctaaggtcctcaaaatttgaaaaaggctccttgaaacccttaagaaggagttgaagtagcttcgagcgagtaatctacatgtgttcgcatgagggcatgaagatatggaaggaatagatccaaccgtattgtgccaccatctcaacatagatccgaacgcaaatctagtaaggcagacttagccaattgattttaattaatcaattataattccaaaataagacaatatattatttatgaattttcactaagcaaatgcttaattgtgaagaaaagtggtttttcggatgaatttattaattaagagacttt

SEQ ID NO: 121394 - DNA, 1425 bp, Cannabis sativa
cgctcttccgatctttagacaaaagtccttaaatttaacaatctcaatagttcgtgggaaatttttaatggcgaaaaaagttcaagaggcacgatttagtacatgtcaaagttgtgaggaaaaaaattagtgattaatacaagaaatgacgatatatatatatatatatatatattgaactcattaatttttgggatcatacaattgagtgggcggaaatttgtgtatgtgcttgccctctccaccatataaatatacataaatacgttcactattaatgggaattactaaatgaatagtattagaaaattttaaattttatatttagagtgtatttggaagtaactgtataattattaagtagtgtaattactagagtagtaattatacaatctagtaattacactatattttaaaatataaagtatttttggatatgaggtgttacttacatatgaatttttaatatcttatttggcaaaatagttagtaatgacacgagaaaataatattttttagtagttaatatttaaatagaaagtttttagtaattgtatcgtgtaattacactctcatgggcccatgagaattagagagtgcaattgaaacccctaaattgtctccaattacacaaatacagtgttattacgtgattagacaaatatattaaattgtgtaattacctccaattacacacaaatttaattacaccgtgactttctaaacgtactcttaatttttctcactacaacaaatatatgtattaggggcgacacccaaaaccatagaaaattgcctctaatgactattagaggcgacaagacgctcctaaaaaattatatctaataattcgtacctaaaaatattattaggggcaataaaaaaattgtttataattaggggcgccaatgtcactcctaaaagtaatctatgaaattctgaattttatttgtaggagtgacaatgttgtctcgaaattgcccttagaaagccttgtcagaaaagtacttttgattttaggggcgacataagtttttaaattaaaaaaaaaaaattatcatatataaatatatatatttacatgtatcttaataggctatggatgtagtcacttattatttattttctaaccagtcacccacaagtatattattatatattaatatgccatgtgggtcctttaggcttctttaagaaaaataagtttatacggaattaaaataaatattaaaatatttataaattgtacaaattaattctgacacattctaatacatagttgttattattgatttgctaattaagatttttgcctactaaactttgacatgtaccaaattatgcctcctgaacttttaaggttattgaaaatgctccctaaactattgagattgttaaatttaaggactcttgtctaatttcatt

SEQ ID NO: 121395 - DNA, 1441 bp, Cannabis sativa
ctccatctcttccttgctctctctctgtttctctctctaatttgtagctttagaatgattaaattcgtagcctaagaggtcctatttatattgcttgtaaagatagatgaatctccttagaattaagatttttattaaaaaaaaatgataaattggcgctatagcacaggaatcgggcgctatagtgctcaacacaatttttgttctgaacctgattagtattttggccataacgtcttcaatacaactcagaattggacgattcaagatgtttcagaaagctaagaacgagatctaaaacttttatgttgagctccaagtccagttttgcttctaaggttgtcaaaatttacaataaagttctaccttataaaatcgagctcgccgacttctactatttttcaccaaaatatgctaacatccctccaaatgactccaaatgcatgattagtcttcaaaatagcctaataaattataattacactaatcaataatttaaagaatcaataagaatattaatacataaattagctatatttataaggcaaaatatcgacttatcagtacatcgtttccttgtggaagttaggttcccttggtcgaatgaaagcttccttggtctagaagtcaccttttggccagccaacttgtacgcagatcctggccgaccatacaagctcactctagccggcctataggtttctcttggccagctagacatcttggtagaacttcttaacggctcgcttcactccttccagttgctgcttaacggttttgtcatacttcgtatagagaccatgtcttactattggcatggctgtattccacatgtactctgtctttaacttacctggacatgccacgtcaggtggacaaaatttaagataacagacatgatacaaaatatctattattcttagtttctatgaaaaactacaactcatttaaaatatcaaagaaatttttataaaaatatctaatggagaaaaatgagtatcgtgtatgatcaatagatattgatgtaagaaatatgaaattgatttattagaaaaaaaaaagtcttacaaaatgctaattattttttaacaaatgaatcaaaaaaattaaagtaataacattgaagaaaaaaatatattatatgtttaaaatgataaatgtaataaatgcaatataattagttatttttgaaaaaagataccatacttagaaattaatcatttaataattaaaattaaataaaaaaataaaataaataatgaaagtttacaacacaacaataaaattaaaaaaaagttcaaatttgtatagtacattgatatataaatataaagtattaatgtaataatattaagggttgagatgcaaaatgatcctaaatttggtaactaagttagtaaatgtccactttttaaaaaaattaagaaaatggccaaatcta

SEQ ID NO: 121396 - DNA, 1695 bp, Cannabis sativa
cttgttcaaataaagccccatcaacattaactttgatcttgtttaactcaggtgcaatccaacgctcaagattttgcccccatcatccaacggagccaacgaaagacccttccttccttgagaaaatttataatgatcaagcacgattctagctgatgcaacgatatttgatgcagaccaactcttcttttgccaaacaaattcattccgcgcgcgccaaatagcccaactcaccacagccacttcctccatttcaccttcgtgccctctgccgaagatccccaacatttagctgctgaatgttgcagccgcagccccgacgtcaatcatgctacgattccaagcaactgctgaaatttatgttattttttagttttataacttagtgttatgttctttttattttatttaatattagtattttttttattattattttgtaatttttagtatgttagtgctttaaatcaattactatttttgtgataattttttatttgagggttaaaatataagattgttttttaaaataaattaaaataaaggttaggatgtaaaatttaaattaaaataaaaagttagagagaaagagaaaaagttaaataaataataagaaaaataagtatatattacattaatttatatatataattgaaaaggaaaagaaaaaaaaatagtctctactcgcttttgatttttctttgttattcgtcaaaattgagacctctagcttttgaagaattccaaaaataaaaataaagtaacttcaactttgaaattaacaattaacacaccctttcatcaaaaaaaaaaaaaaaacacaattaacacacccttcccaagcctacatatacatgtttttttttcttatatttgtatatgtgattatatataaaagagaagaagaaaatcaaatcaaatatttcagttaattttcaacaaagttttagtttgtgttatatatgtatttttgcaagcatgaaataatatagggtaaattatattaatgtattttagagcaaacagaagaaaagtatatatctacacaaatcactagaagagtttagaacaaaagaaaatactcagaatagtactgatattgtacgtacaagtgaaaatgaaatgaatacataaacatatagacagtaccagttagttactaataattaataaatatacaaaggagtaacatactgttaccagtaaccaaaataagtaaagagtaatttgtgtggtaaatatttaaatttaactcttagttgtagataaatatttaagtttaactttttacagtaataattaagtgtcaagtcattatctacatatcattttttaatagtatatttaaaattaatttttaaataagaaaataaaaatttaatgacttgaattaattaaggtacatacaaaatacaaaagttcaagaattataatttaaatattatctcaataattaaaattaaatatttatttataattaaaaattaaatttaaatatttataagatatacgtattacacagtattatttgaaataacacaaaattaaagttaatgcttaatggctttctatttcggtattgggtttccttattgttgacctcgattttagccaacgacaacgagtctatttttataagctataagtgatttatagtaacaaatatatgaaaaagcaatgtaaagacacaggaat

SEQ ID NO: 121397 - DNA, 1110 bp, Cannabis sativa
tattataattatattttaatagttgccgaaaacctcggtcaacatttgataacttccaaaacgaaataacaaaaaataatattgattagtgattactcacatgctctaaaagtaatcaaatataaaatttaaaattactaaggctatatttgaagtcatttcatctaatacaagagagaaatgttaaaaaatattattggtgttagcatccttcttagaatcatactgttattggtataattaaatatcaaattttatataatttatatatcgccacttataaaaagtactaaataacactaatgcctaataacaatacattccatataacatacaaattaattttgtgtgacttgtgtaaaaaaaattataaatattcaactccccaaaattttatctattttttgctgagttaatagttgtattcctcatatcacatcatacacatgtcactcattagtgtctttatttttctttatactatttaaatattatattttaaaaatatttttatggaatggttacactaaggcacattttttatgtggtattgtattttttaaaaaatatatgcatttataaataaaaataaaaaattagatctcatgtcattataaattatattatttgttataaaagaaaattcaactatactagtaatattgttggcgaatactcacttagtcacattatgaatcgcaaaattataatgtctaaaaataaataaaaaattacaatttaacaaaagagtaaagagatatttacaataatacacataattatcaattccacaattaaaacaagtttcctttaacgtcttgataactgtctcagagtcactgtcaatcattacaaaagagtattgtattaaactatacgtactttttatacgccttataagttattctaattcccaatttttttacatgatgatatttattataatatagtaaattcatttatttattttttgtatatttttttaaaattacaactataatgaatatttttttacaccctttgccattatttttattcatgtcaaatataaagtaatgaggagttagagatgtaagaaaaaaatagattatttttttaaaaaaacaaata

SEQ ID NO: 121398 - DNA, 1056 bp, Cannabis sativa
gggcacgttactacatgtcaaagttcagttcaggaaaaaaaattattaattagccaaatattaaatatggtctaataaatatctttaaatgtgataataattaataataaattaaatattaaatataattaataattaaatttagtgtattaaaatctacattaatgattacagacaaaattgtatttattatatggcaaatatgatataatgttatctcttctattaaattcgatacaatttttaaatttgacacataatttaacacactaaatttctaaaaagtgttagaatatactttgtttctattaatagtgtgtaacaccacaaataaagtaaaattgaaatatgtaaatctccatatttaaaggataatataatacgtcgtactaatgctaaatagtatttctctaaaatatagcactacgtttcattactctactcacgctcttgaatgaattccgatggtttctagaaggcaatgttattgcaatgcaattatgcatagcctgcaaacaatttgaattcagtcagatttaaaatgacgtcttctgaaacttttcaggtaaaagtccactttggagtgctcccatttacttttctaaactacttttcttttcttagtcatttaataaagaatattgctattacgtaccagtggtgcttaatcctttttcaatatgtgatgttgcgattggctagcgatacttcctaaaaactattatattaaactatgtaagatctgatatttaattaaactaatagcgatactgatacataaatatcagacaccactaatatcctttaacatttctctttaataaattaacaactatttcacaactaatccaattacactatttttttgagaaattctattatactacttgtaaactttggtctttaaaatattaaagttggaaattgaatctttttgttgataaagaaaaaattaataatttttatccctgaactttgatatgtattaaattatgcattttaaacttttaaggtcgttaaaaatacttcttgaactattgagattattatatttaa

SEQ ID NO: 121399 - DNA, 1380 bp, Cannabis sativa
  modified_base (26)..(60): a, c, t, g, unknown or other
tatatgtgtttaaattacattgtttnnnnnnnnnnnnnnnnnnnnnnnnnnnnnnnnnnntggtagtaaatctagatccttctaaaatataatccaaacgggtattgccaaccaattcattgtagaagttgtgcacttgcatccacttttcaatcaaacgattagggcactttcttaataagtccttgaacctctctcaagctttgtaaagagattagttgtcttgttggatgaagttgttgattttagatcttaacttggcaattgcaggaggaaagaacttggaaaagaatttcacggccaattcctcccaagtgttgatagaatggggtggcaaagatagcaaccaactcttggctcgctcccttaatgagaatgggaacaccctcagtttgatggcatcatcactaactccattcatcttgaatgtctgacaaagcttttcaaagttagcaagatgaatgtttgggtcatttgttgacagccccccaaactggactgaggattggaccatctgcagtatgactggcttgatttaaaaattgttaacatcaacggcaggtggccttatacaggatctggcccctgtcaagttcgatatcaaatagtccctcaggctacggtcactatggttgcaaccattagtctggtcttctacaacacctttattgttaccattaatgtcgatgttaacgttgttaacttatatatacttcttgttcaatctctattgcagttttttcctatttttttccttcttttgttctgtctccaagtcttctcaatttcaagatcaatagtgtaaagactgcctatgttaatatgttaaattaacaaataattagggtttatttatgtgatttaattattattatgattttatatttgtggagaattatttagattcagtttatattaattatgctatatatgtgaatttcttgattttttgtcattgtgttcgatagctatagaaagggacgttgggccattaaagagtcacgttttgtgtgctttagaattttattggcagtaggacattatcgttaagctttggttgtttcggggattttttttaggaagttaaaatgaccaatttgcccttcactactacaatgtaagcctttagcttcccttttttcaacccaatttataaaaagggaagctaaagggtgtgaaaatatctgcattgacatttagaggcggttttttttggtaaaaactgtacgtatagaatgtatatatatatctatgccatcggttgggggttgtggaaaatcagggttttgtcaataaccctatggcgtcggttattgggtattaaccgacgccataggtgctgcctttattcgacatgtggcacctatggcgtcagttaat

SEQ ID NO: 121400 - DNA, 625 bp, Cannabis sativa
tctctctctctctctctctgtagggttctcggcgtccgtggtcccagttcgtgatcgacggcgtttgaagctcatccgtggttccagttcgtggtcaccgccattgaagctctatggatctcggagtaaatctaaaaaaaaaaattaggcttttttagtttaattttttctggatattgtagttagtagatatagttgctgggcctttaaatccaaactcatctgaagattttttccatgcccaaattctcaaatttttttattaaccctctcaatttcatagtcatacatataaatatatatattgacaatttttcttagaaatgctatttatgattatgaacaggtgatagtggtaataattaatctgaagagcaaagtatggttacaatagtggttgtgattgtgatatgtctatttgttttggccttcggatggaaacagggagcaactaagttggaccataccaaacgagattttctaattagagactcgatcatcccaacaagcttatgatacatatgtagtttaatcatggttagaaaaaatgattacttacaagtaccacattttttgtgtcctctctcttcttattactcctacctctcacaatacttcaaccttc

SEQ ID NO: 121401 - DNA, 616 bp, Cannabis sativa
tagggcacaaaacccaacagcagccccaaccccgacgtccactatgctgtgatgccaagcaacttttgcaaacgaacattccaccaacgcatgttgaataattaatttttatatctagtaattgaccaaaaagaatatcgtttatctcttgttatataattctatacaaaaatttaataagttcaatgcaaaactcctaattctaataacgtttatgatgattagtgacatgcttaatattgtaagtgttctagccgaaactcatataaaatattcaaattattaagaactaagtctataaaaatacataatataagaattttataattggataaaacgtagaaaacaaaagctattatacccaaattctaagaaacaaatcaagcaaaatcaatatcaatcatattactttgtggaaaataatttctatcaacattttttgagttgtggggagcagtgacaaagaaaaatataatggatgtattatattattacgcttagggttttattattatattcaagaagacttttatatagtacggtttgtagtaatttcaattgtttttttttttttttgggaaatttgatattccatgctaaaaaattagacatggtg

SEQ ID NO: 121402 - DNA, 568 bp, Cannabis sativa
ttttcatgattagtttatttgttttaaaaagaaaaatctgtcacaaaagtgataacaccatcacatgaaaacattttcactattaaataaaataaaaaccttcatatgattagtttttttaaaaatatatatatatatatcactaacgtgaaaattaattttcctattaacttttattattgttttttcaaaagaaaataataataataaaaaaaagaacacatcctgaagagacaaatagcataaagaccagggaaaaaaactttatattaattttagtacaatataaaaattacatagtaaaaaaaatatacccatgtaacaataaaaaataagttttataaaagaaacagtaccctatatgaataactctattatttatataaaaaaaattagtgcacgaatttattatatggtgacagataaaaatcacacaatgtattattactttttagttaacctaataattcataaatatgtgagaaatctatgtattaacaatgattagtttgagttagggtcggctctaggcataggcgggctaggcccgtgcctagggcccacactt

SEQ ID NO: 121403 - DNA, 975 bp, Cannabis sativa
aatgtttgactttagaaatcaatctaatacctaataatgtgttgaaggatgccacacctcataaagaagtgaggaattacataatttgccttaataaaaatatataatataatgctagaaatgatcatattatagctagtgtagagtagttatatcaataaaatttgcgccgctaatataggtgaaaagaaaactaataacaattgatggtgacgcaatatatataaatataaatataaatataaatattaagaactcttgttatgcactaggggagcgtttagttgcagctattataatagaataattaatttttcgattattttggatgaaatgattattctatttcaaaatagaaagaataattattctaattattgtgaaaatttttaataacttttttacaaaatatttttatttttatgcgttttaaatttaattggataaatattcttttagactttgaattttacaataattatcgatcggatcttctgttttattaaatgacaaaataaattgaacttaattttcgacaatttttattaatataaccaacttaaagacaattcttaacataaacggtaaacagttttatcataatagttttagatcaaattattattaaattttattttgacaaaaaatcagttcacggtcctatttgtactattttgaaaaatacaagatccattttgttatttaacaaaacagagagtccaattagtaacttttgtaaaatacagggtttaagatagtatttacccaatttaatcctatttcattgttatttttatgttttcattcttttcacccaaatgccatttatgtggccaaaacgtccttatgtggcgatctctttataaaataagcaaactcaatattaaattatactaatagtcaataggactgtacatcggtcggtttgggcggtttatcctatatattttctaactcaatctaaagttcgggttg

SEQ ID NO: 121404 - DNA, 1214 bp, Cannabis sativa
aataacatacatggtagtaaatctcgatcctgataaaacatattccaacagtttctccctagtgggttcttgaacattcagttgaccattcgatgataagtggcttcaacattcttaagcccaaacgaagtcaccctatgacaatagatgcctttaacgatttggaagctggtgtgttcctcgtccgcgacatgcgtcttaatttggttatatctggagtaggcatccatgaagctgagcaacttatacccaaacgtggtgtcaaccatttgatctatctatggaagcagaaaacaatctcttgggtaggccttgtttaggtcagtaaagtcgatgcacatcctccagtgccattgggtttaggaactaagacagggttcacaagccagacagggtacaatgctttccagaggaagtcattggtggttaactaatcaactttcactttcatcgcttctgcccttgctggatccaagggtcttcttttttgtcggactggcattgcatcctctcaaatgttcaaagcatggaaaatggtgttatggccaatttcactcaagtcagaatggctccatgccataacatcctagttctttttgactgtgttcataatgttttcttttatggatggagctaggtttcttcacactcggatggtcttcgtgtggtcttcatcgctgatacttacttcctctacctcctccattggctctaaatttcttttcgtcccaactttgggatctaacttgtcttgaaaatcctcccagatgacctcagtttccatctgatcctccattttgggagcaatgggtgtctcttcctggaccatgaacatagcctgtgttgagatattgtaacagtttctcgcacttttctaatcacctttaatcatgccaatacatccattcttgcatgggaacttcatgcataaatgtctgatggaagttattgccctaaagtctactagggttggccatcctaatattgtgttgtacgttgttgggcaatctaccaccacaaaagttgagttcttaaaggaacttgcgttgttttctcctttaagggtgataggtaacatgattttccctataggcattaggacgtctccattgaaacattgcagctaaatagggcaaggagttaagtcagcttctataagccctattgccaggaatgtgaattcgaagaggatgtttgtgttgggttttgtgccc

SEQ ID NO: 121405 - DNA, 722 bp, Cannabis sativa
gggtctgagtcccctacgccatactctaaatattctaatactaactaatacgaatcatttgttatgtattgaataatacaattcgaattgcatttaaaaatttttatcgtaataattaatacaatacaaaattttaaccaaatataatttttctaattatttaatataatacaatccttttacgacctactaaaccactctctatccatccttcatcatagggagccatttttgtatgttcaagagtttattttttaaaaattcactccttattctaaggaatgtatttaatgcaaagaaaataaagggggcttgagcctacgtaaacttcactccaacattgctctcgataatctccattcacacaatgatattatattacatttagccatgttaagatctccacaccactgccatctcttcttggatctccctaccaaattatactttattctaacacattatccaatcacactcaaccccatacaatattttttgctacatcgtataaaagagtaaaaaaattatattatagatatatataaactataatgatgaacaactttaagtgtggatgcagatacagggaggaccacatacggctttgatttggatttggttttcaaatcaatacatacatgatatgatacatcactatctacctatgctttcaccaataataatgaatattcacatatagtatatataaatatatattaaga

SEQ ID NO: 121406 - DNA, 1188 bp, Cannabis sativa
tttatatagcagtaggaaacctagctgcattagtttaggaaataatagaagcctcagtaattagttgtaacaatataactaatcaagattaagctctaactaactaacagtctccctaattctgatactgaggcagggaccgagctcagggtccaagtctaggtctgagtttggggatggtcgggctaggtcggggcagaggatagggtccgagtccgggcgtgagtttagggtttggggtttgggtccgtagtccaagtgcgggtctgggcctagggtctatgtccgagttcagggtccaagtccagggcattggaccaggttcgaggctcggggtctggttctaagtctgtgtctgagtccaaatctagggtttaggttcggtctaagtacgggttcggggctaaggtcgtggtctggctctaagtccggagtccatgtccaggttgaggtctaggtctaggtccaagcatgaagttcaggtccatgtctgaggttctagtttgagaggagtctgggttcagaggccaagtccggatcaaggttagagttgggattcaaaatattaatgaaagaaaatacaaatagattataattaagaaaaaaaaatttgtttaagtaaattttgaaagcaattttttttttcttttcataattagattttgattttaaaatttaaaaagtaaaaataattttatagaacctatttttttttttataaaattgttatattttaataaaaaaaaaataattaaaaagttgttaccaaacacaactataataagatgattattagtgcgataacttataatgtaacattttcttttcagagaagtaaataaagggggatgatggtatatgacgaaaaataatataaatatagttatttaagacatcttgtaaaattttaaaattttaaaataatttaatatgctgaaaatatggttcaagtaatatactacacgtgtgattcttttattttatatgtatatgaaatgaaaaaattacattgtatacacactttttatttcctattttaatttttatattttattactctttaatttatatggatgattacaaaaggcgtcattttttgtaaaataattacacttttacgtttaaagaattttgttttttttacatttttacggtttttcatagaaacaacatgaaaacaacaaaaaa

SEQ ID NO: 121407 - DNA, 919 bp, Cannabis sativa
gtgtgcgtgcatagtgtgcatatatataaaccacaaaactggttgaaaatatcagcttaaatatataaatctagaatatgatgaaatcagtggttactggttagttcagaatgtggatgaaatacaatgcattaatttcaaatattattctaaatcttcatgataaaacattatgttgcatcgatcataattaacttaacttgtatatatgtataatcaatgcttgaagcttctcacaaattcagtacaattaattcacatgtgatatatatgttacattgcctcatttttaagtttggtatatatatatacaaatatatataaatatatataaaagaatcggatgtgtgcgcaccttctagctagctagcttaatacaagattagtcttttcggcgcaattattgtaaaacatatatatgctcaagttaagtaattatataaatatatacatagagagagagagagtttgttcttctctaataataataaagactacaagaatgaaaaccacataaaaatttgaacgaaaaaaacaatatattccaactaccgaccaaataataaattgagatcacgtaaatctttgcttccatattatattatatattctagactcacgtattacaactacaaaggagagtatgtatcgaattaataaatatttatatataagaaaagactgcatatttttttctaaaaaaattccttaaatcccgattggttgttaagctaaacaaggacccatatatataattaaatatatattattgtcaattgataatagtatatccttattcaatttcgtacgtgatggccgggtttgagtcaatttgttcgagccccctctcgaaagttttaatttacacaaaatagtacaagaaaaggtgcatttcttttataaaaaaataataatatta

SEQ ID NO: 121408 - DNA, 630 bp, Cannabis sativa
agatatctcaagcaaaaacacatgtgggctaactctctcgcattagcatgtgatccttatcgcgaaaaacatttggttgctaatgttcggtctggacttgatacaaaatacttgtccatcgttatgttaaatgaagctagagaacacaccacttggcaaaaactgtcaaacatgttacttagatttgatggtcatttggaatgattgtatgttgttacttctaatagaaaaattctaaataatccatctgccgactttgctaagaagccatctagatctggaaaccaacacacaaacaacacatctcccaggccttaccaatagagtaatcatggaaatcctcattcagggaacacaagaggtggtggttacagtggtggttgaggtcgaggaggtagagggaatggctccaaaccacttgttaatgggaaacatggtcattcgactgaaatttgttataatagatatgatgaaatttttatgggacaacaacccaacaatgaagctgctcaagacaagcaatactcaactctcatagctacacctaaaatgatgaatgatgacagcaggtatgctgatagtgttgggttttgtgccctaaataaaactaattacaatctgattagttat

SEQ ID NO: 121409 - DNA, 2072 bp, Cannabis sativa
ttctctagactacaactctaccaccaagagtggatacaatgtctactttcgtctatatttgtctgattgaaaaaccaaaactagtatatccagtaggattcaacatttcttcggaatacacaaacatgagatctctcactctccgaagatacttgagaatgtgccttacaactatttagtgttccaaacttgaatttaattgataacgactaacaatccatactggatttgataaaagaagaattggttgtttgctccatggcccaacatcacaaaaatagagtgggcactctaattactcatttgcttaaatccaaatcattctcaaagtcacatgaaaattctttcttatttcttcttcttcttgggttgcatggtttagaaaggaaggaaattggctatgattaacaacagattatgacaaaaccaaagttaactactgcgaggatgtgcatagaagtggtcaaaagacttaagcataaatggatgatcgtttaagtgaaatctcatgtgcaaattgaatttctaatagagtcacctaacttctaatatctccatagatggcaatatgatagtgaaattaccttatccttttcctactatgtagttggttatgtgcttctatctatttgggacttattgtggctggtcttggtaaatcactgtacaaaaaggtactcaagactttgttgggttttataccctaaataaaatgtattttatataatcttattattttttaataagagagtataattttttttgacttagtcaaatgcttggttcacatgtttttttttacatgattatatgtttaatacttaaattttattaaattcaaaacttatagctattcataattgtaatgacatcatcaaaggtgaaaataattatgattatgtgctttaaatatttttagtctcatgatttatcagtgcattagatttacattgacgtgacaatcaacaataaggtttatttatacttgggtaagtagcatgtcttttccaagacattaagtaaaataaacttgaaattggatgtctagagtttccatcgagacgagaccgatattgaaaaatagaatcttaccgttataactattttaaggcaatattacttagtttatcatagatcaattagatttgaatcttgagatgaataagctttaaggtattttgagttctttgatttattcgttacaagcttaccctactctctagccaatacttgcattttgaaaactcggagtagtataattgactgagagtgttagtcatagatttagacatctataacttctatttgttagaagtaaaatgatagtttcctttgaacttattaatggataaataatagagcactcattttaataatgataattagtttactgaaatatcatttatattaattaaatgttttaaggataaaatacattaaaaggataaaatagtaattttagttcctactcagtgtaatccatctacagacgatcactgattattttgatagaaacaatgtatagctaatagtgtatttatattatgtatatagagcgttctatgaaactataattgtaatgttgagtctatagtggagtcataggaaatttatttgttaaatttcaaatatatcttattggaaatctagatttcatgggtccatcatcctcgcactatctgggataaataccaagtagtaagtctcaataattgatttattatgaattaattaggattcacattattaattttctcaattatgagtttttacacccttaataaaaatagagataaaaaagaagataaataaataaaatgatattttattagtcatggcattttgttgtcaagataataaaaatatttaaattgtatttttatttgataatttgatgattattacattaaaactagtatgtaaatgtaagaaataaattagttatggtaaaaataaaaaaaaaaaatacactttcagcccaatggactttgaacaagtgaaaaataaaattgggctattttcaaaaatatgggaaaaattattaaagttatgataaatatggcataaaaagt

SEQ ID NO: 121410 - DNA, 1568 bp, Cannabis sativa
gtacattgtagaatcaccctataaatatatatacatttttgtatctcattttttaacacttttgcactctttcacaaattttattttattattattatttttaaaataaaatcagctattcattaatttaagcatctagaatacaatatgacctttatatcagttgtagcgtttaatatatttgatatattttctatagcaccattttgggcaaaagcattacttgtccccaatagttgtggatagctcgagctaacgagagtagtgcataagacacatttttttgagctctaaaatacatcataattaaaaaattattttttattttaaaaatagaaaattattttttgaaaataattaagcttgtttagtcttgttttttgaaaacaatttttaaaaaataaagttacaaaaaataagaaaatttttagaaaatactaatcaaacgcgacttgtgttttaaaatttttaaaaacgattttttgttcttatttctaaaaacacttttttgaaaacaaaaaatagaaaacaataccaaacatgctctaacactccgcaatagacaattgtttagaacaaattggaacaacaaagtatctaaaaggcaatttcttaacaaaacttcgtgcatctcaaatttacgcaacccatgatagtatatcattcttttaaacacgtttgcttggagcccaaaagtctctgagaaccttgatgggatgtcacatttattgagtaataaataatttgtaaagttaagatgggttaaaatttaattttttatgcataaagcgggataaaaatgataaaatgatccgaaattggtcaccctctcaaattgatgctcatatttctttaggttcccaaaatactcctcccaattcaaaggtctcactttctctctatcacatttccctctctcattctttcatacaattcaaaccaccaccctctcccatgaacgacgaagtgtcaccaccaccatcgtctcgcctatccaaacccactccgacgaaccaccggttggcctacccatttgatcgacgaacaaaacatcacacgcaaaactccttaaaaccccaaattgcgaatcactaattttgatatatgttggtgtttagttgatcgatcttttcttttttgtgtgattttcactgattttttggtataaaacaagttttagtgaaatctgcattttctgtgattttttcttgaatacttgataaaagtactatttaaaggttagggacgaactttcgctgcaacccatcgaacccctaaagaataacgtggtacaaattcttttcctagttttttgtcattttgacaattctgaggaccacataggaaccttatacctcattctaccttaattaggtcattggtagttttttttatatatatatatttttttttttgaaaaaaggtcatttttgtcaccttaccacccacaacccttgacccaagtaagaaaatatgtcactaaaagggagcgtttagtatgcggtgttcaaaataatttgattatagataatattatgaaggagaatatgattatagaaaaatgtgta

SEQ ID NO: 121411 - DNA, 2413 bp, Cannabis sativa
taaacggaacaatactttggagggttttcccaccaaaatatgaggtttgatggttttttacaagtaaattgatagttgagggggttttgccacagattactctaaataatactaaaaaagaaaaaaaaaaaaaaagaaaagaaaagaagagatattataaatgtaaaaattttcttgtcacagtataaatgtgaagtttagagaaaaattagcattttgtgcaaatttcctttcaattaatagttaaattcttctcttttgggtcttgtgttaacccaatcgtgaagatcagtttgtccttatttaaataattatattaggctaattaaattcaaaatatatgaaattacttttttattagaatattttgaaattaatttaataaaaacacacttagtttaatgaaattaattttttattagaatattttgaaattaatttaggaaaaacacacttagtttaatgaaattaattttctagtaaattaaattgtatttttcaaaatttaattatataataaattattattaagttgattttttttcaagatactaaaataatattttatgaatattgaataaagtggaaagttatatttaagttaatttttttttttttaattttagatcaactataaagtgattttcaaaattttattttattttaattatattaattaattttgaataatatttatttattaaatattagaatttcaaaattattatttgaaaattaaattaaagttgaaaattaattattcattaattttagatcaacttaaattaagtaattttaattagtaattaattaaaataaatagatcaaatagaattaattgtaagaggaaaattaatttaagttgacaaattatttattaatttttagatcaacatagaataattttttaaaattttattttattttattttattttgtagtagtttcgaaaattatatttattagttagatatgaatttttgagattatatatataaatttatacattttaaagaaaaacttaaataagtaatctttctagtaatatttatatagaatatatattaaggatataaaataattattatttttagatcaaccttaataaatattttataaatactaaaattaaaatttgtatttagtttatctaaattaataattttaatttataaatttatgtatatatatttatatcaaaataagtagagtaaaataaatatttctaaaagaatattttttttaataatgggctttaatataggacatttcatttccattgttggttttacaaggttattatttttaatgggatacattcccaatagatgatcatccattagacaatttaacaccgtaaaatcttgaaaaataaatattttataaatttatattctatagtaagctcacccaaaaagtgactacttaaaattggatttgcaaatataaaacaatggcaaaagttcataaaataagaataacattgcatcccgcccaatacgggacaacgttaaattcttattttaattgaataaaaggttgctaaattaagtatattttagatgagctgactactctatttaacaagtgacatccctgcatcccgtccaatatgtgacattgtatatcatttggttaaaaatcttagataataatttgaattatatttatactctttttatagcttctttatttgtttaatgtttacaaatttttccaaaatgtgtatggatatatattgaaccatgtgactgatttctgtttattgatacttgtagtgcccactatgtctttatcaagctcaattgtgtcacatctttctaaaaataatctcactggagctaacttcctcaagtggagagagaacataaatattgctctcataggtaaaaattcattgtttgttctaactgaagaacaacctgagatgtcaggtgaaaatgcaactaatatagttagagaaagatatgagtgttgggagaaggccaataataaagctatattctttatactgtctagcatgatagacaccttgaaaacaaggtttgctaacaatttcacggcagttgagattatgaatcagttgaatgaactgtttggaaaggcgtcgcatcaagctcattttgatacgaccaaaaactttacaaacacacggatgaaaccaaatcagcatgtccatgatcacctactcctgatagcgggttatttccaagaggttgaactccatggatcttttattgatcttgaaacacaagttagtgtgatttttaacagtctatctccagcttttttgcccttcacatcaaactatcatatgaacaatttgatgtttgacttaattgagttgatcaataacctttagacatttgaaagtttgattggaggaccacagaaaggtgttgggttttatgcc

SEQ ID NO: 121412 - DNA, 877 bp, Cannabis sativa
  modified_base (114)..(118): a, c, t, g, unknown or other
tgactattttattttatacacgtgtaaaataatagattgtttgaactttattttctatattgtaattattccgaatttttccaaatttgtagatatcttaaatagctataacgnnnnngaatatgaaaaaaattagactaattttttttttctagatgccgaaataagtaaagggtgtatcagtatatcccttttaagggagtgcattgtagaattaccctaaattttaaacttcttaataaataattccaaataataattaataaaattgtgtatttagtttttaataaataaaattattaataataatatattagaaaattatatttttaagtaattatttattataatactaaaaaaaaattaaattaatcaaagagcgattatattacataattttactaatatataaagaaaagaaatttttgtcaaattgttaaaccagagttagaatctattgcaagatcacaattaagggtgttcaaaaatttatttgactaatctaatccacattcaatatgcaaaatagagacgaatagataattcacattagtgtgttagataaaaaaaatttaaagtttgtatttgtgtggattaatatacattcttaataaaaattaaaattaaaaaaaaaaaatctgaactaatcaagtctgcacttgtttttatatttatttattatcatgaaaattagaaacgtatataaaaagtttaataaattaaaaaaaaaaacattgtaaattaaaataaatgtcataagcatcttcaaccttaacactaaattacactaacattaaatttagtgtcaaaaactctttttactcttgttgaaaatcatggggttctatctcaaaactaattggcaatgagtggagta

SEQ ID NO: 121413 - DNA, 890 bp, Cannabis sativa
atcacttcaaagtgttgaagagcagccacttgatcagtttagcgtgaaaaaacattgttaaggtctgccacccacttgatcagctgagcgtgaagaaacattgttaatgtctgcgacccttatatgagcttctaaaatgttcttcttcattctaccatattatccaattttccactgttagagatttgcagcaaaaaagtcaaggtttgtcagcattaaagagatagggtcagcggtaggcgaagatacccaacacctagagatgatatcttgacttttagggtcagataaccagagtttttcaaaccaataacttgttgttcttcattcttactaaatcttgacattttttggattgaaggaagctgctaacacaagaaggttttaactaaaaaatatccatgtggtaagtcaaacaaagtctcccaatgttgattaactaaacaccagtccaatcattctttaacagtattcaaacttgatctatttttaacttaggtcaaagcatcaccctcataaagttgttcctataagagacaatggtcaaaaacttttctgaaggcatccatttatgactcattttggagagagccactagacttgttaccattaaacaagatttccttaaaatctccaatggctagccacaaaaagagaggcacaacatcttttaaacatttcaaaagaatccaagaatcaacacgattagtgttaacccagaaaattatcctaatgacatggacatcaatgttaagaaagaaaacagtttggagttgagtagtcctgagtcatagcagtcgacctaggaggggtccttagccctgcgttcaaatgggaactccagaatgggtgtttggatcccgccaagttgttttcaactcactatcttt

SEQ ID NO: 121414 - DNA, 1156 bp, Cannabis sativa
  modified_base (48)..(89): a, c, t, g, unknown or other
tttcttaactttatatgtgtttgatttatcgttttagaaagttcatannnnnnnnnnnnnnnnnnnnnnnnnnnnnnnnnnnnnnnnnncctggtaaaatatattccaatagtcttcatctcacagctaatactagcagccattctatatttagactcaaacaaacaagtgttacgattggtccaaatataatacagggctgctgagaaggcagcattacaaatttgtctcttgagatcaatctttgttaaagaacaccattgttgaagctcatcactagtctttggccaatcaacatttcccaaccatttgttaatttcttaaaagactaaattcgagaatcaacagttcaaaaataagtggttgtggtcctcattttcaagctcacaaacagcgtaaacagaggaagataaaggcctaaaccggttcaagttatctcttgtaaggagttgagaattaaacacttgccaatagataaatctatgtttgggcacagtgagtttattccaaattgtcttagcatatgaaactatattagccatggcaagagaactgtaatactgtttaactttattacctcctttttttgcttgcttcaaggaggctttgctgacaacttgtcttaatctcagaatcttcttgaagtaccaccccttatcttgctttatatgcgaattccaaacattttcactcttaagatagatggaattaatccatcttacccaaagacaatcttgtttgttagaaatagcccataggaacttttccattacagccatatttcacttcctaccttcataaaagccaatgccatccatcttttttggaagacaaaccttttcccaagaagggagatgaagtttgcttctattaccattcgaatcccaaagaaaatcacgacaacttttatcaatagctgcagtaactttgtatggaagaatgataatgctcatccaaaagttcctaatcccaagaaaaaccgagtggataagttgagctctacctacagatgaaaggttttggctagcccaacaattcaaattcttgttcagcttgtcaataataaccccacagtgagccactttccatttagttcgacaaagatgagcccctaagtatttcaagggaaaggacccctgtaaagcccgcttagtta

SEQ ID NO: 121415 - DNA, 707 bp, Cannabis sativa
aatcaatggcagcatcccatatttatcttgaagatcccagcaggcagacgaaatgggttgagggtgtcgttgctacttgatgaggagagccagcagcatgcatccctttggccttctccttggtaggacaagaagttggcggcccaaggtccaatgatctttggcagtatagtagtttgttcatacacttgtttgttttaggtaccaaatacgtcaccatgtcaacatgatcaattctatttcattcggaggaagattcaaaatattaattacaaatgaaaccataaatatcacttaattacaatcatgtttgggttccttaagtttaaaaacacatagcttccaaaccgagacacgtttgctacatccccaaagagtatatgaatagttccaactcattagtacaaagtggacataaattgttattgagaaattataatccatgcatgtctttgaaaactaatcttggtaggaatccaattggaattacactctccacgcaaatttttttatcttgagagctacatttaatttccataaagtaatctccaatatagaaatgtaaaagaaatactattgataaaaaattagtaatcaattttcattaatatgtaaaagaaatattattagggtgactatttaatggttacatttttattgtaaccatatagttacattttttttttacctataatagaaggttacca

SEQ ID NO: 121416 - DNA, 1267 bp, Cannabis sativa
ataattttgagagtagataaaatttggcgtagttggtcaatatgaattagctttaattttttttttaaaaaaaaaattaaacctaatggaagagtatttgatcgaatttctcaatcaaatttcccaacttaaaatccaaagaaagcacatataaatgaatgattatgcatacatgcatacgtatatgtcggtgggacacgtggtgaaggtggaagaagaaaacgacatgatataagattgtgtctcaatgaatgatggtaaagacttataataataataataagaatgttaaaaaaaagagagtagacaaattaatatgcgtgctcactcatgctactctgatgggtaactttcatcactccaccacctcctaagccattttacatttttttccccattttgtatcttctaaaagtcaaaggtaaagagagagaaattaaacactaaatacataataaatataaaaagcttgaagagaaaactggtgacatacattgatggggtttaaaccagttgatttaatgactgtttctgatcaagtgggactttgttttgtaaggagctgtatttttttcaagtgggtggggtggggactatcttttacttctttattttatttattttaactttattattattattagtagtagtagtatcattagtagtagcattgatgggatttaaaatgaacagatacagttttaatgagggattttatatttttatgggatggattttgtacactgatttactcaaaacctttcctgtaaaattcacttcctctccaaacacatacaataataatgcctgcagcaactggtgctttctaacatcactctttttttttatatatatatatattattattattttttacataaaactatttgccagaaaagcaaacgtaaaggtaacgcttctgaatctatcaatttcaatcactcttaatcttagagtacttttctttttcttcctcctcaattccaacaacaaaatctctttttacttgtcttaatgatcttaatttacttcacttaacttaacttcactcactcattcatttattaatttcatttcctcaaaatcaaactcattttacagttttagtgtgtgtatatattaaaatttttcattttcctcctttttttattttttttaattattatttattttcagctttccctaaatctctattctttttctttttcactaccaaagaaaataaataaataaataaaataaaataaaaaagaacgaggtagagaga

SEQ ID NO: 121417 - DNA, 950 bp, Cannabis sativa
ctgctttttcccacagcacagctacagctgcttttccccacagcacagctgtgccaaactggccctatatatgaaacatggttatcaaattgaagtgttaacaccatgtaaaaattgttgttacgaaaactattttttttttttgttgaaacaagtagtatttagtttccaatataaaaaatattaagttttaaaataaaaataaataaatgtattgcatctgggccctctacgtgtctatatttatgagttaacggaagtagtagtaacaagtgtaagagaattgtaacattgagtatttttgcctccaaaaataaaaataaggtatttaagtgtataaaaatctgaaacattaagtatttataccgcaatttactttaatttttatgttgatatttctattataaataattaaaggaggatttcttttacttatatatatattttttttaaaaaaataacattcattttctattgtgacaacataatataatgtagcataacatgaaaataactatttatatttttgtataaaagaataaattcataaaatatatataaaagaatgtaaattagtacttttgtaatttttaagtatttataaaaaggaaattcttttacactttataataagtacattcacttatttttttaaaaaataagtttgaaattattttaactttttttatattattttatgtttttttttatataaaatatcaacttcattgaataaattagtattttgaatacaaaagaggcaagagtttaccagaaataaaaatatcagaaatactacgatcagattgataccgagaatgtctagcaatataatgtgctactcggtttggtgatcgtctaatgaaaaataaattaacatttgggagggtagataacaaaagttggcagtcttttattaaaaggccgaaagtggacttcattgcttggtt

SEQ ID NO: 121418 - DNA, 793 bp, Cannabis sativa
  modified_base (727)..(753): a, c, t, g, unknown or other
acatgaactaccccaattgtgaatgcacatttgccttatttttttttttggaagaaacaaagttcattaaacagaaaaagcgatgggaacttgatacaaactagcaaggtgattagaaattctaaccatttttgctaaaccatccgccctagaattaagactacgattaatatagataaaagcacaactattaaagttcttaattaaaagtaaaacagccaaggaacgactacaaagacgccaatccgggatgtatattctcttatccaaagctggcacaactatatatgaataagagcaaatcaccacatcgtgccatctgttggaacctgcccaaagtaaggccatatgaatagctttcaattcagcgtccaaagcggattcactaacatcacagcttagtttgtacatccacgagcgatcagctccattaaccataatcgcggcagcccccattctaccattggaccaagatgcatccaccatcaacacttttgaaaactcagaggcaaccattctcgatccatcccctcttgccaatcttccttcttcgtgaatcgatgaagccttccaaaattctgcgaaattaaaggatatattctttcttacattatccaagtccaatttctctcccaacagcactaccttattcctcaagttccatatttcagttaacatggctcccaaataagtgacaactctccgtcttgttgggttttatgccctnnnnnnnnnnnnnnnnnnnnnnnnnnnatttacttattaatatagaacagaaataacatttaatgtt

SEQ ID NO: 121419 - DNA, 2350 bp, Cannabis sativa
gacaatggtggttcccccatagttaagggaagcttgataatgcctaagctcatgacactgtttcctgtaaaactgcataaatttatcatgcatggtcttagtttagcctcttctaatcccattttttttttcaatgtgtcctcgtagaggatgttgacaaaacttccattatctaccactactctcttcacccttttattggcgagttgaactattatcacaaggggatcaacatgtggataccacacatgttttgaatcttcttcaaagaagatgataagtggtttatttgacttcgatcttttcaaaggttctggagcgaatgctgattgctcatttttcacttcgtttatgtacctcttttgtgcactgttactgtttcatgcgaggtgtggcccttcagaaatcaccaaaatatccttgccctctacgcggggaggttgcaatctcagattattgggctgattaggctcatttccctgagttctcacatattgcctaaagtatctccgcgagatcaaacttttaatctcatctttcaattgatggcattcctcggtggtatgcccaatatctttgtggaaacgacagtacttagttgaatcttgcttgttcctcgtgtgtctcattggttctagtttgtgaaatgcgaccctattttcattggcgaggtagatgttctcgcgagtttcatttaattcagtatataccgaatagattggtacatacttctcgtgcttttttttgattgtttttgtccttggatgaatagtttgactcatcctttcttttggtatctgatccactaggattttctacctttgtagtgacggtgcttgttgttgccgtactatgctgggtttatctctcgagccagtctttaataatttcatttcattccatgcttcctctttaagcacaaaaacttgtgctctttcatcccataattttcccctgttgttgataaaacagttgtgattctagcttgaaggtctattaactaaatgcaatcatttaggtttctgacttttacagcggctatactaaatcgactgaagtacgctttgaaggattctcctcgctgatgctttatgttggtcaaagatgacgcctttggtcaacgatctcttgcagcctggaattgatttttgaaatcctccaacaaatgttcccaggatgttatggaatgattggtgaatttatcgaaccagctactcgcggctcatgttaaggaagttggaaataatatgcaacgtaagttgtttgaaacattgcttgctcgcattgtagtattaaaattgttcaaatgggcgactagatatttggttccatcgtattgcaaatgcaagacatgtagattcttaaatccccgaggaaattctgaatttaagataatagggtggaatggctcagtttcttcatctgagtcatatcctggcaacttgccatactctccatcttgatatttactaaatttatcctccaattgaattactcgtaattgaatgggatccttaggttgttgatttgcattttggttaagttgattatgcaaattaggtgcattttgattcaagtgcttgcaaagatctggctgtcttcggttaaatcttttgcttaaatcaggtacacgatgcctatgctcatagttacttatggacctggtccgcgagtaggttttagttggtaactacataagttacttatactctcatggtcagtaaaatatcatcgagttctgctcccgtctcgcatttgtctagtcgatccactgtgcctgtgagattgcgattctcctgttcttgagcttgcttcacgcatttcttctcccattggtcttcttctttgaaagaggttagacacacgtcccctactcaagtaagtgtgcatattctctctgtctatgcgagaaggcctttgtgaattccttggaggtcgaccattggacttaggttggtttccaggatttcttccatcgttacgtggatagtcctggtttcttggtcgcggttgtcttgcatttgcattcatgcaagacgattcaggtatatcagttcattcattctcttggtttgtaaatccatgggaagttcttggaacatcacgtcaaagttcttgatttcttgtattacatggattgggttgatttgatctatccgctggaataggaatgggaatggaatagaataaaatttagaatgcataaaaaaattaataaaaaaatcattaaattttttctcgtgttacattggaatggtctttcgttcaatttcaaaatggaatagtcattccaccaaaatagtagaaaggacattccattgaaatgacattccaatactttaaaatacaa

SEQ ID NO: 121420 - DNA, 1006 bp, Cannabis sativa
  modified_base (36)..(67): a, c, t, g, unknown or other
  modified_base (723)..(725): a, c, t, g, unknown or other
aacattaaatgttaattctgatctatattaataagnnnnnnnnnnnnnnnnnnnnnnnnnnnnnnnnagggcataaaacccaacaagactcactataagttagtacggtaattcataataaggaattgtcaggaaaaagattgagaatgtgtatatttcaagatatgtttgggaaaattattaagattcccactgaagaaagaacgggatttcaggatcaaggtatgatctttgattaattattgttagttgaggaatcaagaaatgaatactcccaatttagttataggtactcggtatgagtagtgttgcttttatcatatgcgttgaattagttaactttataacaatggttacgtgtaaacgattgggaaatctaaaagttgtattagtttaagaagaattgatatatgctaaaataagtttagatgaagaaggttcaattgacatcaagtgtaacaccctaactaatataggcgtgttaacgtgatttttaacgtactgtgcaactcgttgctaatcaacgaggttattgaaaatcgtaaataattaaactttgcttatttaattaaaaacataaagtaatacatttataaaattctgggatcccatttacaaaatacatttacaaaagttaattattcatatacaaaagatttgtcgcctagcgactaaacagcaaaagccttaacgtccccaaagatcgtacgctccaagcctaannnccccgacatgtacaatcttcaccagcttgtactcacggctcctcaacattagccttgcccttagatacacatggaaatcggactgtgagtcaatagactccataagaaaagcataaaaaataacatagcaataacccgaattatgatcggacgcccatacccccaatcataacgctatccctgtgacccacacagtactgagtctagaacgttcgtacgatggtacttttaacatagtaacagcctatactcggtaaactagtcgtactctagctgtattg

SEQ ID NO: 121421 - DNA, 925 bp, Cannabis sativa
ttaatttgtaaatgaaggtgcttaagctttgaaagtcttgaaatattagatgaaaagtgtcccacgaatttattatctgtgagattaaaagattcgagtttgacaagattggaaaatacagattctggaattgacccaatcaaactatttctagacaagtcaagaaaagtcaagttcctacactttaatatgaaacctgggaatgttgaattaaagttgttccaataaagatcaagataggttaagaaaggcaaacttgaaaatttagaccactcagaattctccaaatagtttgctccaagtgataagtaccataccttttgtagattgctgagctgataaggtattggcccctcaagagaattgttatagagactgagatattgaagctctgacaattggcttatcaccactggaatttctccttcaaaatcattgtcactcaagtccaacaaagtgagcttggtaagactaccaatggctgttggtatcaaaccagtgagattgttgttgtggaggttgaagactgtgatattaaggaatggggagaagttgaactgatccaatgctccattgagttccaagttggagagatctatttgtgagatttctccattggaaccatcacagacaacattagtccagttgcatagattaatgatgttgttgctgtcccatgaatccagagaagatggtttcaacaccaagctgttcttccaccttataagagcctctgcttgtgttcttggtgatgaactaatcttcaatggaagcaaagaaagcacaaaaatatgaagaacaagaagagagaaacaagttcttccaattcttttcatggtgttgactacaatgtgtaaattactaaatttgatcatcctaatgattatctgctctctcctatacatatatacacatacaaatacct

SEQ ID NO: 121422 - DNA, 745 bp, Cannabis sativa
tttatgtagttttttggaacaaacattggtgttcttttatgtttttaagttttttgtagacaatatgtaatctttatttctttatttttttttttagtttttgtcatgtttaaacatgtttttatgttaaattatttagtattcttatttcatatttcttcttgtctgaattttttaatattgtttttatattgtatttttgttttttcccagttgttgtaattcatttattagttgttaataacaatatagttatgttattacctttttataataaaaatctgcattactataataaaaaacaaactgtatcaataaaaaatttcatatttatatatattttttcaatttagtatccaatttctttaataacccttgtaaagtgtgaaaaattaccaatgtaattatcaattttttcaaataaaaactttaaacactaggtctcttagaaatttaaatgcctcaatatctcatgctcaaatgtatgttcagttttctcctatttttccactgttattctgttgttgtttttattctatcctacgccttctgctgcatattctcttattattctccaactcaccacatttgctgcacttgttgtgttgatccttttcccatcaagctttcctccttaatgtttttgatcttccagatttaaccatttcatgcggaggcaagactataatgtctttcacttcttccggtactttccactcacttaagttgctagccaattgggtac

SEQ ID NO: 121423 - DNA, 1525 bp, Cannabis sativa
cgtcgccctgatcagcgtcggtagcaaatttcgcgaaaaccgacgctgaaaagggcttaaaaaccgcctctaaaggtggtttttgtagtagtgtaacaattaaaagtgatgaggatatcaaataacaccatgttttcataacatgggagttaatttgttatggatagcaaattattgaagaactatgaaataagttaatgatatataaataaagatttttttttttgtaagtaataagtatttggttacaatatggataaatagaactaacatctatagtcaataaaaaagaaaaattctattcattgtaataaattataatttttgtaaattaaaacaaaattataattgtaacaaataattaattttaaactttgacatatagttttagtgtacatataaagtggctagcaacatgaatattcacacgactatcttttatcttattgtatggaattttaaatttttatagcttttaaagtataatattgtaaaaatataatttttttttaaaaaaattattttatagaatttatttttaaaaaataacgtaaagtatctgattattctcttatggtaactagtgacagatttaaaatttttattttgtgaggatttatttattattaaaaaatatttatacttatattataatcattattactagatttttttaattttgtgggggcttttctactattttagtctataattatcaaattaaaaaatattgtatttaattttttaaaagacaatatttttattagtatagtgggtccatggcggatggtaaatggttatctttttgtttactattcttataaaataattattttgaaaataaaatttatatttttgcaaaaaaaaataaatataaaaactaataaaatttataatttcatctattacataatgtacaatctctaaaagttacaacacaattatcgatcaaatgaaagggacattatttttttaaaaataagttttttttttttttcttttttaattaagttacacatgaaacttttaaccatacacatagtaaatgataatatatattttaaggaaaaatgctaaaaggcaccagtagtgttagtacgtgttaatgtggtggctggttgacaaagccaggagtcaatgtggtggtttcatcgggattgggatctcgtcggggtggttctgggtcttggggtgggggttggtgggtggtggggggtttggttttatgggcagcaaagaagaagaagaagaatgaacagaattaaaaagaaaataaaaaggaaaaaaagaaaaaagtgaaaaaaattatttttatttttttttattttaattttttatattttaaattaattttttaatatttatattattaatattagttggactaataaaattttgccacgtgtacatatatacactgtaacagtccactttaatggaggtgttcgcggtgcgagtggtgcggtttttgactattttttcaaaccaactcgcacatgcagttttttaaatttctcaaaccgca

SEQ ID NO: 121424 - DNA, 839 bp, Cannabis sativa
tgggttgtgtgagattggtccttgaggacgctttgtgtttgcttgctcatgcttatagtttgcactcaacatgtgcgagacatgtatcgtgcctaacctttgaacttgtttgtctgcaagagcgtttaggctgacttgctagctcggtgtgccagcaagtgccgcacgtcccacctatttgggggtgtccaaataggcggcccgtgacacaaggcactactggtaccttttagtatttatttaatattattattatatatatataatataagaaagataaagtaaaaattaattacatttgaaaaataataataatattacattattattatacatcatagaatttactataaatacgtttaatatataaatatatataaaaaaatatataagtacattaggataggaaacaagttaaaattttatttattatatatatattagatatcaagaataatggtaatgatgtaaaagaggaaagaaaatcataaaataaatataaatattagaaaataaaactataaagatgtctgaattttattaagttatactaatacatcttattctctcatatgcattaagtgccaataagtgacttataaaaataaacaaatactcttaatgggtctaaatctggccgaatcaaaataaacaattagtcatatgatttaccagtgctgttatatttgagtaagtgaaatatctttttttagagtattagtaaaataaatttgtattaaatgtattgactatatatgtttgtttttttttttttaaataattagcaattttacccaacattcgacaatattgattttggcccttaaaatatacggctt

SEQ ID NO: 121425 - DNA, 1419 bp, Cannabis sativa
  modified_base (26)..(28): a, c, t, g, unknown or other
tacccggtgtttccccttacggatcnnnggactactgactgtcacagtttatcccagtcttcttattacaattaattatgatgaagcgttcaataattaaatatatttactaagcagtattagacccaaagcatgcaatcatttaacttaagaaaaatattaaattctatagagacacgttaatctaagcaacaaattaatttagcatataattcatttaacttatgttgtattcttcaccataaataataatacttgtcacaataacattagaagcaaattatcatttaaatctagaatttagagtattaggtaaatagaaattttgagaatgatagtagaataatgtaagatcttatttagcgatcgtctaaacaatgtcaaaacattaatcataaaattaagcatagaataatataaataattcaatatgaaggaataaaatactaatgttaataaaagcattcaaaaaatcatgtctcgggttttgaaataacccttaacctaaaagaaaaggctactccataatctcaaacataatgataaatgaaaattaaaagagttttaagaagaaaagctagatgtagattctcctcttctcttgagttctctcctttaaaatgcagttcaaaagttgctaaaaaaaccctaaaagtcctataaatacccctaaaaatatcccaatttaaaaaagataaaaatttgaaaactggtagaaatcacaaaagtcaataagttcaagagaagatggagaaaaattccacgactacgaggccacgttttcccttcgtggtgtccaattttgggaccccgaagcattacttctgacccccgtaagtctcccttgagtttttattatgtttcgtttgttaaggaatactctctcactcacggtcgctcggctttggcatgaggctatataggttctgaatgccccatactcggtggggtgatagggaaaaagattttttatttttcaaacatgagtggtttccatggccgatctcaaatgagttcaactctcctaattcctatctttctggaccattcttgctacctaacttcaagctagtttcttccctcatatagttttttaggagatgacgacattagctctttaatttataaatttgtaaggacagaattaggacattagggtaggacattagctctttaatttataaaagtgagaattcacgacggtcctaaaaatattttttttgggtactatcgctaaaaaaattaagtaactgcttaaaactgtcgggaaaaattagtattcccgacggattataacagtaattacaggaataggccacggttttaattggaattcgtgaatttattgggcccttatacccgacgggtataagggcccaataaaaaatcgttacatacttcttgccacattttccacgt

SEQ ID NO: 121426 - DNA, 1170 bp, Cannabis sativa
ttttacaacgattccaaacatcgatggcatatcaattcgactttgcaaagcttgaacagcagtaaggcagtccgtctcaattacaacatttgacaagttggaatcttttatccaacttaaggcctctttgatgctaattatttcagcaaaaggagcatttgagaagccagttgaaaaagtagaagaggccaaaattacagcacctttaaagtcacgaacaatgaaacctgttccgaaggaattgttggcatcgaatgtagcttcgtccacatttattttgatcattccgtctgctggttttgtccaaaaatcgctactgttgctgcaattggagttcaggtgcagtggttcaaatcgacaactttgagcaaacttccattggccaagagtttgatgcgccatagcaactacatcaacagttgaacatgtaagattattccaaatgaggttgttacgtgctttctaaatggaccaactcaccatcataatttcttcaatagattctcctccatgccgagaccaaatgcagtaaaccagtcgaaaaaactggtgcaattcgaaggggggagagacacgttttgctattcttaaattacctactcttggtgccattctaaattgattagtggattgagtttttgtttaaaaaaaagaagaaaaagtaaaactcgacttgattgatgttgacaaaaaaaaaaaaaaatcttcaagttttctaaatctagttcgtaaatatgtcaacggtttaatttaacatattttttttacaaaataatgatttagatattaatttttagaataattagcaattttgctccctgaactttcgacaatattgattttgacccttaaaatatacagcttgttaagaatcccccttgaacttttacacatatagaaatttagtccttctgttaggttccgtctcattattccgtttaaatgctgacgtgtctttttgaattagcaactttgttccctaaactttgacaactatcaaattgtaacccctcagaataaaaatgaaaaaaattcagcattttttttttagtaaatcttaaaaaattaacgtagatattaagaaaaggttattttgaatgattatgaaaattaaaaaataaattaaattttaaaactaattaagccatttaaaaaatatttattttttat

SEQ ID NO: 121427 - DNA, 772 bp, Cannabis sativa
tttgcaggcaattagaggagccttcacatttatcttggaacagaaatccaagaggaaactaagattgttgaaccaccaaacatatttggctcaaacaaagcatgttattttatatgtactaatatctaaagtgacaagtgaatatgcaatcaatcaagaattattttgcttccatgcataaatctagagatagtactatcaattgattccttccaatgtattgtgtttgtaagtgccatgtctttgtatggcaaattatgttgcttaaaattgggttagttatgttctgaattggtttctttcctcaatgttcttagatgcatctgttttgtctggtttcatttatcttttctggatcagtttttagtttaattggttcagctcattaccagctgactcgagctgttgccttagttgagttggttttaccaaagtgctaggtatattaaactgatttagccttctctaactaactctccacacaactattttaagaaattcaacaaatgactcttagtataaaccaacccaacctggttttgataccacttgtaggacaacacaacacgtgaaaacgtaattacgcaaaaataattacaccaaaacttgaatataggccataatataccaagcactcacacctttacaacaattatatataattcacacgttgaggacacataatcgaacacacatttattgaattgatcccttaaggaccccaaggtccatatatatactttaactgttctagaaaattttagcaattgtg

SEQ ID NO: 121428 - DNA, 2026 bp, Cannabis sativa
  modified_base (1979)..(2001): a, c, t, g, unknown or other
gtccacacatactctagaagagttatagaaaacatatgatcatagataatatacggtgatattttataagtgatggggagatatattcatgttgtactcgtttttccttagttcaggttatgtcccactgcgttttcttggcaaggcttttaacgaggtaacttgcaaatagttatgaatatgaagtatatattgcactcttttttccttagctcaagttttgtcccactggattttcttgacaagatttttaacgaggcaactttaaataatgttaacatacttgcattttatgaaacaagtagagaatatgtgagagtaacatcattgacataacatattcaggaaacatatggatgacactcaataaagatgtatcaacagaagcagttctctatgaagtcaatactacttgcatcgctcaattaaaaggagcgtccattgaaggagatagaattaaaatacatttcaccaaatttttctttatacatttcaagagaatgtatataggtgtccaacatattcaatcaagtgtcaatcttgcaaacttatgcaaaaagttattaccaatatcaatatttgagaagacggcagacaagatcaaaatttgttgattagaagatctcaatgaatacctaaatgagcggaagttagtttacactgtactctttttcttttgaccaatttttttcagcaaggtttttaatgagacaattcttatggacatccaagggggaatgttatgaaatattatttatggatgtccaaattaccaaattaattatcaccattattgcttagttgtattttcctttattacattgatttagttttccattcttttagtcatatttttgtataaataggggttcaccccgttagaataaacaataaacaattgaaaaatactcattcttcagtttctctttctctcttcatcttctttttctttttttcatatttattttatattattctatattgtttgataacacatatgcatatgttttaattgtagtctaatttatctaactgattaatttttttattattagtttggaaatttcattttagttgaaaaagtatgttagtgatgtttaatttgttatattttttattattattatttttgccaaatgaaaaattagtatatacttagtttttaagtcattacttatagttatattttttgaattaaattacagtaaataaatataaagttaattcttacttcttttttaattggtttttgtttaaataaaaaatttcataagtatatttttgagttgatagtgtctaatttttcttacatgtcattggaatttttatttgagcatattttttgttatccaattttattttatttttaaaaaagtctttctttcgaatattttattaacaattcatttttaatgtatatatatttagtattatgtttcataatttttttttacttattctaaaaaatttaaattttttttaagacaatattattattattatgtttcttcaattttttgaggttgttgttgccttatttataattttttttttttttttgtgttgacttaatatgatgatactaattgatttgtattttaaaagttaggtttgtcacgtgggggctagtgacaagttctgacactactgttgcatgcgtctgccaactttgatgatttttttcctcatccgcgtgtgagtctcacttgcctttatatattcacatgtgtagctcatttttttatgcgcatctggattttctttcaactgtaatgttgtaaataaatttttttatagatagtatttttgaaatatgtaagaagtataaatatttaatatttttctaatgatggtataaaagtttacttttagtagtattaacgcaaaatagaaaaaatctctactatttaagggttatttcttttattatcaactagaatactaagagatttcagatatgtttttacacttctccaaannnnnnnnnnnnnnnnnnnnnnnatcaccatcttatcagcagactttc

SEQ ID NO: 121429 - DNA, 1221 bp, Cannabis sativa
tcatgcaaacatcaatcacttaaaatttcttatattgataactaatcagattgtaaaaagttttatttagggcttaaaatccaacacaagccaacttaaagtggcatgttttccagcaaaatgttgccaagtgcatcgacaaacaagtcagagagaggaaacccttcataagagacttagtgctctgaagaatattccttttcagcaaatatcttgcaccaagcatgtttggaccatgctaaaaaggtccgcactaagttacaagataagaagaaaaggtgtatacaagcgtggcgagtacaacgagaacttacagttggctcttctaccaaaatactaatagagaacatctcggtaagtgctctcactagaaaacttgtataatttttcctctaacgtttcaccatgcaagaattcataaaagatctagtacccataactcttcagcgatggcctctgtttggcatgttaagtagcggtagccaaaacgtgatttcaaaagtttacattaagttgtaagcttttgttacacataagaccaattatgtctaaaccacttcctgacaaagattacttctcaatgttattctttttcagttccacatgcgtacacccggtagcacccacaagaaaattctcaggcaaggtctatgaaacttggtgaacttcaagtgaccaagagaccatatgtctgcgtgctcacttgagggatactcgcaccgtacaatgcatcaaactagcacggagaacttatgcaaagaaattttaatgcttagtaaaagctactaaatttccactatgtcaagtgcgggcgtacttcaacttggcataaagaaaagtaaatctagatacttacatgtcaaggaaataagaagatagtcaggatagtcatatgtccatagtgaaatggtttaaggctaaataatagcagtgctcaaaaatagagttcctgtaagccaaaagcaagaacatgaaagcctcaaggctgaatatgaatgaaaaatcgattcaaattcataaggccaagcataacaagaaccggacaactagagaagaactggatagagttcctataggaaccacataccagacaaatatctaaggtaaggtagagttcttgaaaggttccaagctaaaaggtagagttccttgcaagttccaagccatcgcaaaaactcttggcaatcgtaccgaagggtacttgccaaataatgtcattgt

SEQ ID NO: 121430 - DNA, 2071 bp, Cannabis sativa
  modified_base (64)..(84): a, c, t, g, unknown or other
catgtgaactatgcaacattaaatcttatttctgatctatattaataagtaaatttgattatannnnnnnnnnnnnnnnnnnnngcataaaacccaacaagaggatgatctgagcctaaatgccccattaagattcattgagaccaaccaagaactagaggatctggtctcttgtgtaataatcttgaactttttacatggcacaagtataagaaactcctccattgatgccgcctccttcagtgagacgtcaccacctttgaccatcgtctcaagtcaagacatttcctccattgacgccacaacttccgatgtcgttgccccgccccgctttgataccatattagggataaaatctctcatttactgctattaggaatatagatgccagagtgtattctgtagggttactgttaggaaaatatgagatatcaatagaagaataacaataagatgaaaaaagagaccaagatataattacaactctatgcaataaaattgcaaggactatagattaaataaaagttacaatcccaaagcacaaaatacaaataaagagaaataaaagatgaaggcaaagttacaactcaaagcaaaatatacacataaatgtaaaagtaataaaagaatataatatatataataaagatatatatattcatgggtaatacccattaagaagtgttccatatatgtatataacaaagtggagaagagggcacaaaacaaatagaaaaatagaggatgaagaagaactcaagtaagctatgggggatcaccaaaggcttgaataaggtttaagcaactttgtccaaaatgtttatttcccctataaaaaaaaattagggaatagaatggaaatgcttttgggaataaacaagcctctcaatattttctaacttagtgtttagaagatagaaaattattattgtccacaagtgaaccaaagacctctatttatagtgtttaaggattagatttgaaaatccaatcctttcatcacatggttgttaccaacactttaattggtgtttaatgagataaaaatgttagacaagagagttggaaacatgctcaattaatttatgtaagtttatgaatgtttttcaaaaacttgattccagttcaaaaaataaccacaaaacgacataataacaaccattaaataactgtttttagaaaactcaaaatttagtttttataactcctctttgagttaaatctttctccaacgtctcaatacccatttaaatgatataattgagtattgtaacactttctaaccgctaaaaacttatctcattaattccataactttcatatttaataactcacatatttatcaattgtgatccttaggttacaatctatttttagatttataacacctcatatgttacaacttttatgtatattattatactatatatgatataatagaacctccgacatataatatatattaatctcatattaatatataatatgccacattttaatctttataatatatttgttaaataataaatatataacattccccaactagattaaaatttatgatattttatcgtaatactttatttaatcaatgaaaatatctcatatgtcccccactttgattgaaaaaatgaaaaccatccatagagtctttggtgaagtagataaagtaaagtgtctttcaacttgaactttactatagtgtaatcatcacaaattttattgaaaaattagttgacaaagcattgaactaacttttctttataataaaacggtgatgacacacacgcttttgctaggttcacccaagacctcatgtctcgctttgcacagttaatggccttgtgcacattgcattcattgatttttttttttgagaaaatatactccctacttctcatttagggcagaaccacccttaggtcaatataggtagaattcttacagtatttgttaccaaaatacttattttccaaatcgaattgtattaaagacattagaagtccgaccctcaaattggtaactcactaagtacttcaaaactttgtaagatgggacatatagtacttat

SEQ ID NO: 121431 - DNA, 629 bp, Cannabis sativa
ttgtgactaatacctttagccacaaattttttagtcacaacataagaataattatttataattagtcacaattttcttttttacgacttttagtcacaaattttattgtgactaaaaataagattttttgtagtgaataacaatctatatttctgtaaaaaaaaaaacaaacccttaaaactttagaaatactgtagattcatatgaaagtacattataaataaaaattaaaaataattagtcacattaataacttaaaatagctaatttatgaaataattagtaaaaattatatcatgtctactagtaagaatttaaaatcttagaataatttagtaaaataaaatatttattaaatcaattaagcactacacattttctttctttcttgaagttctatagttaatcctattatatacacgactattttcaaaatgagcaaaaaatgattatgtacaaaagagctcaccaataatattaaatatcttaagaagatctatattctcaaaatactaaaagtccatatagctaatatttttgatattcttcaaggttaagatctacaagtgatcaatttgactattaaattattattttacttaatgttgttctttttagttttataactt

SEQ ID NO: 121432 - DNA, 1262 bp, Cannabis sativa
aataatttcataattaatcacaatcaactgataatttccaaattaactaagcgggctttacatataacgtactagtataggtagggttagatcattatgcatgtaagtactaacctttttaccatattcactcagtacctcgaaggtactcatgttagtaggattagttcgtaccctttgaaatacaactaacgtctttaccacattcactaagtacctttaacgtactagtgttagtagagttattttgtacttcctaaccactttaccatattcactctataccttaatatactagtgttgttagggttggttcataacacatgcatgcaatgaatgaagatttccagttaaaaagtagtgtctcatcctatattaaatcaatttaaatttaacacatcaactaacttaatttatattaaatatgtttattatttttgttaattcaattaaaggtttaattttttaataaataaaaaaatagttgatgtgttaaatttaaattaatttaatacaatataggacactattttttaattggagagagatcttgattccaatttttatatttctcaattggggatgttcttatactgaagcactccagaaataagaatttaggaaggtgaaaggaacatggacccttattgtcaaagtatagaagttaacctattttgaataattgagtttataataatgaccacgttagttggttggttattacattcaagctcacataaaacataaaaggttatagttttaaagaaatcaaatataaaatatatcaatgtgtcgacattgaccgaattctccaagtggcattaaaactagatatattattattttatttttgtaaaaaaatatatattgttattttaatgaaaacaaaaacaaaacaagccttcaaagttcaaaccactagtagggtccaaaaaacgatcaacatgttggtgactaggtcaaaagccatcgtagaggaacatagaaatatagctgataagattgattgtattgtctttatttatttatgactatggtagtgtaacaaatagtcatactctttattttattgacatatgaatttaaatgtatgattagagcatcttcaatacaagtgtaaataagtagtaaaaaattaaaatataactcatttaatcaaatatgtgttctaatagtgtaccacaaagtgatgtaaatttagcacatagtaaattttgtaccaaattttacacaacatttgctacgatgtaaaatttacacca

SEQ ID NO: 121433 - DNA, 1579 bp, Cannabis sativa
tcttcattagagaaagctcggttcgcggttcagtaagcccgtacttgtttagtattatatgtgattattaaagtatgttaggaagcatattatttataattgtttattttgatgcgtgtcttaaaatccataagagcagtagtaagtttttatgatcgctgtttgacctgcctcgcttatgggttcgcaggctaagtcctattaaatggacgcccggcgaaatacaaggagtcagggtaataaggtcaagaccggaggcggacagggaaaatcaaattccctaaaatccccgtggtcgtggtcgaggtcgtggcagagttcagagtggtcaacatgtgaatccaccacaagctcatctggattgggagcagaggtttgcagaaatgcaagatcgtatccgccagcaagatgaagaaattttgatactaaggcagtagggtcctcctgcagtgcctccaccgcaagctcaggatgttgtagttcctgcagttctagcataacaacttgttgctggcaaccgtatggggccactatacgagaggtttcgcaagcaagcacctccagttttcttgggaggtcgagatgtgatgaaggctgagcagtggctcaccgtgatagaaagaattatgaatttcatgggagtagttagaaatgatcgggtgacttgcgccactttttagttatagaaaatgctctcgtgtggtggtaattggtgtccctcacccgagacatcactattaagacctgagaagagtttcaagagttgtttaactccaagtattacaatgaggcagtccgcaatgctaagcggaaagaattcactgagttggtgcagactgaaggtatgtcagtaactgagtacacaacaaagtttgaccgtctagccaagctggcctcgagtattgtgcctacagacttcagcaagaaggagaaatatctggcaggtctgaatttgaagattagatatgacctgttgattactacaaatgaagcaacattttatgcggagatggttgagaaggctcttcgagctgagggtacagttaagtttcttcaagagcctcgagtgactccgagtaccccactgttcctactcctgtctatggtagggctggtggtgattccaccactgatcagaaaagaaaggttaactcgacatctggtggttcggggcaaagcaagcggttctgtgggaaccaaggcaggggtggacgtcagggttactcttaccttgagtgcccacgttgtaagaaacatcatccgggagagtgcaatcggaagacatgctttcagtgcgacatggtggggcatttcaagaaagatttccctcaggcaaagaaagaagagcaaaagccagaggcaaaactcgcacctgctggggtgtttgccatcactcaagctgacgctggagcgagtccttctgtggtgacaggccagtttcctataaacaactccttttatattgtgctatttgactcaggagctacacactcatatgtgacaacaagggtaattgatcttttgggtaggccatgtgattttatcgagagagagggtttggaaccctaatgcctagcgg

SEQ ID NO: 121434 - DNA, 1336 bp, Cannabis sativa
gctacaaaataaataataactctagaataaaatggtcataacccactatcacaatactaaaagaagataagagggatataagagagtcttcccttataattgcttggagaggtccctactggatcttacatcaagaattataactctcacagagtatccattctaagtggttagattgggaatgatgaaggccaattgaaaggaagataaaaacatcacccgaaaccataagggtttctaatagaggactaaaatttgtgccaatatttttgttgcaatgtggattttatcctaaatgaatcaaatgaaaaatctagttttcgctagatacagaattttttcaacgtaatacccagagtatcctgtctctaccaaacaatcagagtccagtcataagcctaagttccactcttcaaacaaaaaataaagcacattcaattcttaaatgtgatattaatttcaaatatttatcaacatttaagaaattagagagaagaaagtcacatgttgaagaattggatgatagtcttgaactcgaaggagagtactgccttgaagagtaaacactaacatcgaacgacgccaaactaaattctaacggagatggacggtcaagacggtcaagtctttctagtagagcacaagtctgattgatcaaggaatcgattttagagttgagatccagtgttaacagttgcctcagagacgtgcaagtaatcactgggggtggtccatctggatactcatgagccctgatttggagaagaaaatgaatgcaataatcaatgtcatactctaatgttgtttggtttgttgtagatccttttctgtaagtttgaatgtggtttgaaattagagtacaagtggtttttcaaaatatttatactttgaagaaacgatccgcgtgatattaaaatcaagggccaagatttatttccaagaaaagcactacagatctaacggtccataatgtcattagtcaagcattaaatgctatatctgtgattgagggaaaccgcataatgatattctcctcaagactcgcattatagtaaatatctgacagtttatttacttcattccaagcatctcttcggcaaacagctacaccatgaactagtgacacagtgccacatattgcattaaaaaaatcaaaatgaaagttgtcttccatccatgaaaaatatttgaaaactgtaaaagtttcacctttagcctccacatgtccatccatgtagtctgaagcaagccttcacaacccacatcgttttaaaagcttgagggtaaatgttatttgtatttttggcaagggacacgtggaatctaaataataaat

SEQ ID NO: 121435 - DNA, 2749 bp, Cannabis sativa
  modified_base (47)..(51): a, c, t, g, unknown or other
atattaaaccataaaattgaatgactacatgtaaacataaatgactnnnnntcttctattgataacaaataagattatcttgaaataggttttatttagggcgtaagatcccaacattactaactgtgaagaagacttacaaaggttaaaggaacatttggctagagccaccattttgtcaaagccgattgagggagaattgttgtacctatatttggtcgtgtcatatcaagccatcagtgatgcattagtatgagaagaaggaagggtacaacttttggtgtattgtgtaagcaagagattactggatgtagagtccagatatcccatgatcgaaaagctttcctatttcttattgatagtctcaaggaagttaagaccatacttttaggtccatgccattaaggtactcacaaaccaccctctttgccaagtcctacagaagccaaaattctcaagtatagactgccaaagtaggttaaagagatcagccgatttgacattcagtactaaccaagaatctctattaagggtcaagccctagaaaattttataatggagtgcatcgagatcaatgtcaaatcaaaagagccagttccaaggttggtgatttggaaagtctattttgatggagccttagactaaaaaggttatgaagcgggaattattttgatttctcctcgagggcactagctccaaagtgccctccgattcaaattcatcacctccaacaacaaagcgaagcatgaagcaatggtctttacttttcatctagctaaggaagtcaaggtaaaaaaacattgaggtttacattgactcccaattagttatgaatcaaatatcaggagagtatcaaactaaaggagaaaatatggttgcctatatctccaaagcttaagaacaactctataattttaaaatatattctatccggtaggtgcccagggacaagaatgcctttctggacatattggctaagttagcaatagatccaaaaatagagtaacacgaaaaggtccccatatctcgtcttgtcgcaccaagtaccaaaatactaggggtaaatgtcatcgaccattccacctcctggatgtgctcaatttataaattcttaatttctgcaaagttacctacagatagagcaaccgcaagaaaagtccattatgaagctcctaaatatttcatcttggacgggggttgtacgcataaggttctctgtaccgtacttaaaaagcattgtcgggactgaaattggtgcagtgatccacgagatacatgaaggtttttgtggagaccacacgtgtagaccaactctgtccaaaaagatcatctagcaagggtatttttgaccaacaatgaaaaaatactacatagactaagtctaaaaatgtgagcaatgtcaatgctatgccaaggtcccaagggcttcgacaactcaaataaccctcatgaataatacatggtcattcattgtttggggaattgacttggtagaatctcttcccactgggaaaggaggagtaaactatgttattgttatcgtcgactacttcaccaagtgggtagaagtagaaccaaagaatacatacacctccaagaaggccttggatttttttgtcgaaaatattgtgtcattgtggcctcccaaataaaattgtttctgacaatggggagcaatttgctagttaacacttcactaatttctacacaaaacatggaatcaagagcttttcactagtgggcaggccgcaagtaaatgggcaagtggaagttgtcaacaaaattttaaagaccacattgaaaaagaagttacaagcctataaggcacattggccaaaaagtctaaaaacttttggaaagtttaaagaacttcaaagccatggcttaaaagaaattaggtaaataattaaagacactttaatcagattgtggtggcgagtacctggattctaaattcaaagaatatttactggaagaatgggtcttgtcccaacttataacacttgaaatatctcagtagaatggtgttttagagagaagaaaccaagccttattagacatggtcagatcaatgatgtgttacttaacattgtaactaagcttctagggatacgcacttctagcggctacttacattttaaatgtaccctcgaagggtataagcaacactccaattagaactatggaatggaacaaaattcggtttgaaacatttctatatttatgtatgtttatgggatatccataggaaacttgagctgcatacttctatagtcatcaagacaacaaagtatttgtatcaacaaatgctacttttcttgaacatgactatatgaaaagtcataagccacacagtcaagtggctatcgagaaaattagaaatgagtaaatttttgaactgtcaacttcagtaccatttgttgaacgactaacataggtcaccacaattcttgagaaggaaaccccagtacatcttcgtagtgggagagttgtgagatagcctgtccagtatgaacatgaagcacatgttcttgtctctatcatagacatagacgatccattgacttataaagaagcaatggaagatcctgactcaaaaaaagtggagcaatgccatggatcaagatatagattccatgtgcaccaacaaagccttgaaatatgaaactccactcgaggatattacacctacaaggtgtaagtagatttttaagaagaagaaaaatgttgaagccttgaagggaaggta

SEQ ID NO: 121436 - DNA, 2432 bp, Cannabis sativa
  modified_base (42)..(57): a, c, t, g, unknown or other
  modified_base (2199)..(2205): a, c, t, g, unknown or other
catcgttttagaagttcaatattaggttgttaaatcaacatnnnnnnnnnnnnnnnnaagatcctggataaatataattccaacatgtatgtgccccttccctatcactgcgagaacgacgttgacgatgtctcgagggcgacccccctgccctaggttgagtcctaggatctctcttgttgccatgagggatttcttgttccctagttcgaggttgcctcctactcgcattcctgcgagaagatttcagtaaatcacgatttctattcccctgggttgtgcatccccggggtctttgaggctcttcttgacgacgagcctggtgatttggttgctcatcatcaggggcatctttagtctcccctggttgttcttcctgagcattttgagagtctctgagttgtctcctgcctcctagtttaggtgccgcgaggtctgcctcttggcattcttaccttaggatcaggttagttttgagcgtcatttgcctaagcttccctggttgcggcatcctcctgttccaactcagggttttgtgagttttcctcctcaaactgtcacttgaggtggcgattttccaactccaccaatggcatgtatctagtgggatcataagcatcctcctccctaggtacataaccaccagcttcagtatgagtttcctcattcccagttttcgggttttggctaccttcaggttggttcctccttgaacgtgtcgatcgtgttgttcatgagttgggaggccttcgtgagcccatcggctcttttccttgatgatgagtaatacttcaggatgagtatcattattttccccgttgttagccatggagaaaagtttttcttttagttaggagggattttttttgagctttttccacgtaggccatcaaatatgaaagcaccaaactgttaatgcaaatttttgttaacgataataagcgtatttcgtgataggatcagcacaattattagttgtaatctaagaaagaataataaagcaagaacaacacgtagtttttacgtggttttgcagttaactctgcatagtccacgagtcaatcttattcagattattctgatataaactggggttttttctctcaaagaattttcgtccctttttctttacattgtgcccctatttatagtaacatagggtggcaattaattacaatcagatttgaatcccacaacagtagttccccaaaattgtgggttttaattatgtcccacgtaaataaatgcagttattatttgaaaatcacacagctatgatttatccgctttaaatgggtcaatactgacgtgtatttagatacggtataaagtgtatctcgttggagcatctcgctgggaacatggataacaacaataatcatggcagcgagctggagcttttcccacgtctttgcgaggttgataatgtaaatccagtcgtttcagcgattgaagacataacactccatctgacaatcacaattcttggtgacaaggtgaactttagtagccaacatcatttgaatgtcatcttctatctgagagaaagctaacgtgacagagcagtggatctcattgaaagatgtctcgagctgattagtgaaggtaccaggattatgccttcctatagcgagatgggtgtctcgctaatcgttatctaggttctttaagttgttatacttagtataatgtgtattatacgctaagtgccctaacaatcaacacgtcttattaacacctttttgaacatagcgaggttgatgcctcgcttatgcattatcaatgttaccctttggatcatgtcttctgacgtgaaataatttctcgtcaatacgtgaattaatagttcgtacatccttgtctcgcttaagactatacagttagcgagttatagatttgctctattaactccgcattcaataagttattccatttagtatcttttaatataattgccattatattttttgattcatattgctcaagattgacacgtgtcatcctcttaagtgccagctgaatttcgggtataacaaaaatatatacactaagaataataataataaaaatatattactaatatatatgtatactctactaactaaattatataccacaattaaaatatatataccatgacaataaaatttattcccattatatataataaattcgaaactaattaaatattatttaaannnnnnnatatatcatacaattaaaatatagaaaaataataattaaatatatgtagcttgccactaaaattatatacatgcattaacatatttgtgttatgctaacaaaattatatactactattatacatagtaaaacataaaataaatatcatctaagaataataatatgtcatacaacaaaacataaatatactgtaggacaaaatctatataccaacaacctacaacaac

SEQ ID NO: 121437 - DNA, 2133 bp, Cannabis sativa
  modified_base (44)..(59): a, c, t, g, unknown or other
tatataaaaatatgatatacaatccaattcaatataatacaatnnnnnnnnnnnnnnnntaatacgacgttccaaacgagctcgtagtgtactttaagttgaagaactccatagtgataattctagtgttgatataatcggaacttaaagacttcaccaactctagaggagttgacacatataaaaatgatttgagattattaagatttgagttgacattgaggtagaagcctaaccattatagataaagatttgtaacaaggatttatgagtaaagtctttaatagttgaagcagagattgattactatgttagtgttttattaactagagattttgatactacaaaacaagattatatggagttttaaagcaattcaagaaagccatcgcctgtgtgtctaagtaattagaaagctaataattgaaacaaattttgttgttaatggcaaaaagtatgatcaaagttagaaaagagcctaggattagaaggattgatcagcattacataacaatcaagttattagaatggatcaagatgatgcggcaaagtaaatgatcattgaaagataatgactaaaactggattctagataataaagaaaggaaaataggaaatacatttaggaatgacaaagatgtatttattcttcacggtaacccaccatgagcttattttggagttaagagtacttaacttagactaatctcaagatgggggacctccctataaatattttttgggaagcgtgtgagtatgaaaaaagtacgctagaaaaatttgtattagaatgcaaagccagctgtcattccaagaattaattaagagtaaagttctaatgtgtcaagatcaaagagccattaaaacgaggatgtattagtgactggaaatgaggaataatatgatgagatacatgtccgaatgtttaggttgccagtaagtaaattagtacagtaacgattagtgaaatttgtatcagcattgtgagatttttgaatgaaaatgtaaaggtaaaaaccatggattgtatagtgggattgtcaaatactgcagtaagttatgatcttatccaactaatagtagttaaataaaatgattcaacacactgtttgacagtgcagaagacatatacagtaaatcaacatgaataagacagtttgacttcatagagtttcaaagttgaaaattctgattgtgatcctaagatttgataaaacttatcaagaataaaatgggtataaattgaattttagtataagttttcatcctcaaatgaataaatgagaggattttggataatggaaaatacgtcatggacatgtgtgatagatggcagagattaaagaataatttgactggacactctagagaatatggtactagggaaaatattgatcacctgttcactgaaatgaaacttgcgagaaaagattacattggaccaaaagggtccagggaacttatgagcccattgggagaatttgagctcgtgtgctcacccgtgaaaataaaaaaagctcgctggtttgaagcatagagataatggcattctatgtaaagactttatgatgctctgaagggggttcaaaaattttgaaaaaaaaaaagagagattagtcaggaaaatgatagagcatgttggggaagtgggtgtcagacttgacacattatttgagtatagaatatcacatgaatttgatatgagaggatccacctatccttatgctagataagaaggaataaaggtacggaaccagataattttgttggttaaaaaaatgtgatgtaacaacaaggttaagaagaccacttttgagttagagtccaggtgtgggagctgtgttccgaattaaccagaataaatttcaaggatgaaatttctataagaaagggataattgtaataccctaaaaatataattatgattaattagggcatgttttataaaatatggagtaatatgtgtgttaagggtttaatgggtaagattatgatcttactaatctaattatgtgggaattaaggaatttattcataagtgattaaataagcgtaatttattaattacggaaattttattagaatatgtgggtaatagacatgctattaatgaaataaaaatattttcaagtt

SEQ ID NO: 121438 - DNA, 908 bp, Cannabis sativa
ttaccacctcatatctaaacacaccttgcattttaaaatatagtgtaattactaaactgtgtaattaccatcctagcaattacacagttacttccaaacacacccttaattttcgaatggcatgttcaacaatagtatttcaatccaataaatcctaataccataagaaatacatgaaaattataagttttcaaataaaaagataaaagataagtgaaaaatgataagttttcctctttttctttgcttaacaatttaataaaattccctaacacaagagcaagggaattcaaaatcctaattctattgaacatgcttgatgattagaaacaattgtctaagatggtcataattgatgaccatgtagtagtttcaagagaaacgcgcccggttcacgtcattaagtcaactccacaatagtgtaaagttgacttggtgaaaaatattaaccctgaaacttttcctagtgacgttgacatctatgtttgatacatggcaagaaaaatgacatctcgaagttgagtagtcctgagtcataccagtcaacctaggaggtataacagcctaactattctaggcatgttaacctgattttaaacttaactgtgcagttcgttgctaatcagcgagtttattgaaaatcgtgattaattaaaactttgcttaattaattataaacattaaaataaaatcgggatccctgtaacacccgtatttgaaacttgcttaaactcaagagctaattttattatattataattaattaactatataggtcgggatcccgagttataaacacagttgaaaaccacatttgctattacaaaatccctaaacattttttttaaaacaaatgacaggcaacaacaaaagtaactcaaaatgttaaaagatcgaaaccctccagg

SEQ ID NO: 121439 - DNA, 4801 bp, Cannabis sativa
  modified_base (4730)..(4739): a, c, t, g, unknown or other
tcaaagtaccataggaatggctccatatgagctgctctatggcagaaaatttcgttccccaattcattgggacgaaacaggagaacggaaatatttaggccctaaattagttcagaaaacaaatgaggcaataaacaaaattaaagctcagatgcttgcctcgcagagcaaggagaaaagttatgctgaccccaagtgtcgggacattacatttcaaccaggagatcatgttttcctgcgtatttgaccaatgaaaggaatcagacgctttgaaaagaaaagtaaactaagtcctaggtttataggaccttttgaaatacttgagaaggttagacatgtggcttatcggttagccttacctccatcattgtcagctttccataatgtattccatgtttcgatattgaagaagtacgtatctgatccaatggatatcctgagttatgaagcattggagttacaaccggacttgtcttatgacgaacaaccagtacaaattctagatagaaaagagaaggtcattcgatgcaaaaacatagcattggttaaagtactctggagaaatagtaaagtgaaagaagccacttgggaagaaatctttttaacggggggataattgtaacgacagcttaagatcaatattttggattattaaataattagggttaattacaatattgtgttatgaattatgatttatatgttttgaaaattatttaaattcaatatgtaataattatgctataattgaatttctcattttctgtgattgtgttcggtagcagtggaaagcgacgttgggccattagagagtcacgttctgtatggtatagaattattttaatagtggggtgtcattgttaggctttggagttatcggagcttatgggtttggaaatgaccaaatacccttgaatattaattatcttttggtttggtcaaaggggtaaaaaggacttttccttttatttattattttggcattttgtggacaataggatctgattcctttttcattttttgagttagatttaattaggttggattattttattaagggaaaagctagagaaacttagaatctcttttctctctcttcaattccctctctctttcgagccacctagaagcagtaggaatttggggttatttttgattcaatccaagaaattcagcaaggtttttggatctctactcaaggtatgattctctagtgtttctatccttgttttctttaagctctagcttaaatattgcatgagttatggttttagaggctatgtgatttagatttgtttgatgttatattttgactttaagttatggttgtctatgcaattttaggttggattagttgattattagaggttgggatcaagttaaagcttgtaagctcttacttggtgctttaatgatgtttttgttttttggactcattgtggagttttattgcttggattgggtctattgtggtgtgtacaagtgttctggaaggtttcatctctgcacaaaacaggtttaccgattttatgggacctgagaaatcggttaaccggttttgccctcaggaaacccagtgaaccggttaaccggtttaccggttagggtttttccaggaaccctagttttccctaaattgttgattttagggtatggtcatgtcttttatcgatactgttattcctagttgattttaaagtcaccgagaagtgttttagcgtgtctctcaccaaaattacaaatgatgtgatttagggccctatgaaatgtcgagctgcaattccactcaggttgaccggcacacctgggcacgaaaacgaggtaagatagcataaagcatatatatgtgaatgaatgtatgttattatttgtttacactactaacactagcaaggatgtagtttaggggtgttagtacagtgtaggattttagagtagttacagtattaccaatacgagtacagaattggtactctagtgcatgtggtacaacactcggtaactcctgggagtacaaattggccctaccaacacgagttcgaaattggtactctagtgcatatggtatagtggtcgaccctaccaacacgagtacaaagttggtgctttagtgcatatggtatagtggtcgtacttccattaagaatgttcttaaacatttggcaggctcgattattgagctcaggacggcttaagcataaagttggtacatcattactgttatatatgttatgcatatcttactgagtctgttgactcatcagtttgctaccatgtgtaggtaagggaaaggctaagctggaggagcagtgagtttgagcttggcaaggattgtacgtatcgagacagtgcaacctggagggtttcggttttataatattttgagctgccctgtattttttgtaagaaaaaaattattattatactatatattgtaaaggtaatttttaactatgttttaaactcgggatcccgacctataaggttatataattataatatgataagattaattttggtttagcaagtttacaaatacgggcgttacaaaatagttcatcatttttctacaaaaaacatcactccaagtccaattctaccgaaagcgaaccaaaacctccaaaccacctagaaatcacataataaacatatttcaactgaaaaatgcaacatcaatgcattgaattaaaacttgtcattattgagcaagatttgagttttaaaactcaaacttgctcaacacatggctcacccataacaagggcctcaaaacaaaaacaaacactcacaatcaacccctcaaaacaaaccttaaatcccccaagctcagacacaaataaaacacaaaattgcatgctcaacctaactttttttcttaaaagttaaaagagaaataagagtcaaagctttccttggttaacaccgacaactactaggaattcctgttgagttgagcttgaattggtttgaaaatctttggtttttcttaggtttctttggctgaacaagaaagaaggaaagagaaagataaggttttgtattttgactttttgttaggataaagataaaataaaaactaattgctaattagtaaaatcagaatatcaacttagataactttagaattctcattagttttaataatagatcataaagcaaaatgacccattttgcccttttcactcagaagtaatttaataatctaggagtaaaatggtcaaaaactataaccctgattaatctcaacattctaaatatctaactttcttgccccgctaattctaagatactcaaccgtatctaagtggctttaatagtcaattcgttgtattctactgttatcaggcataacttacgaaaatcataaaaattcatacataacataggcttatttataccgtaggtccttaaattatataagttctggtaagttggtccataaactctattttttaacaaataagtccccaaactatataagttttgacaaactgatcctcaaactttattttttttgtcaaattagtcctcaaacttttattttctttgatacataaagtcttcactcttaaatgttggtattatatttatttatttattttgttttgtattaattttaaatatcttaatatcgatatactataccttatcaaattaaaaattaaaaaaattaaatattttttatttatatatttttttttaaatatgcaccaaaataagaagaaaaaataaatgaagacatttttttaaatatgcaaaagtaagaaggaaaatatatatttttatttatatgtatttttttaaaatcaaatcacgacgtattttgaacaatacaaaactatatatacatgtgaaccaacaatttatctttttataaacaacacttacacaaaatattttttctaccgaataattcatttgcacttcaagcaaatattcactctcattaaatagttgatgtttgttgccccgctttattcctaatatacatggcggctgctgtataacatgtggcaggtataggcacgtcactcggagatgagttgaagacacccaaacctcctcaagaaccaataagtacagtttaatggccaactcccggaaatgagcaaataggccaatcttcttctcggtgagctaaagcgcgaatgagcttctccgggccagtaaagctgtagttaaatagtcacttcgcatttaatgcgacatgagaaaaatgtctgggaatacccataatagaatgtatcagacgtcataaacccagctttgggcgattacacgataattaagggagctagtgatggatccattatgaagaatcacatcaattaagaagggatgaaggctaatctcacctaaaacctaaacagcctactacgtaggtaatgcatgccctattttgtactttctaggaacttgtgcatgcccatagttggcacttaaagacaagttactccttttcttcttccctccaattgctaaaagacaccaagaaaagtctctctaagaaatacccacccattaataacagagacttgtggactatggctcattaatgctcgaaccacgtaaaaactacacgcactaattatccctcagctctcattattacgttagatatttggttgtcgaaaaccttggtcaacattttggtgctttcattgagagctgtacgaagcattttcaagaggacgacaatagaagatttaaagtgttgggttttatgcccnnnnnnnnnntccatttcaatgtaatctttatcttttaaatatcaataaagaaacagaagtatttatcactc

SEQ ID NO: 121440 - DNA, 1658 bp, Cannabis sativa
ttgtcatttaacaaaacacagggtccaaaatagtatttacccttctttatataatatttatttattttatttttatatgtaaaatctcaatgtgtatttgcaaaaagaggaaaaaaagaaaagaaaagaaaagaaaaatgtttcatatccgtgtaaatgcctaattcactactatgttgaccttgactttgttgatctagatgatcatgatgctcaaatgttctcggaccatctttaatagttatactaatttagtatagaatttacactaatttaatgtaaaatcttttacttttaatgcaacaactctaataatttatactaaatattttaccaaataaatatattttattaaaaagatctcatattttatactatttatattaataaattaaaataattaatttataatataattatatcatggctactatcttaaaataatttaataaaataaaatatttatcaaatcaattaaacattacacatttttttttaaaaaaaaatcacaccacaaaatttaattttctaattattatggtgttcccacatatggtcaattaatacatttcaaaggacatatatagtgagcattcgtatcattgatttgtctatgtcggccaataaaatattggaaactaatattttcatttgatatctgtatccttgatttatttatttttattatgttgttctttttaattttataacttagtgttatgttgtttttattggattaaaattctcaatataggctcatatgtattggtgtattgctatttaaagtttgactcaaataaaatgtcatgagctaaatgtatagataccttaagcaatatttctaatttattgagggacgaaattaaaaatacattaataacctagctatgaggttataaattggtagtggttcccaagaaataacaaccattctattatcatcttctcccatcaaaagagaaaattaaaaaaatcctaaatcttgttttcttggaagatcattacccaaaatcaccaaaaagatcatctctacaagatgtttggagatcatcactatctatggattaaagtacgcttccgctatttgagttcatctctttgaatcaacaaaagtattctttagatctacggatgttatacacttatattaaaatgtaatatatttgtctatgaatttaaatcttgatgttgcatattttatgagtgatagagaattctaagaaatagtatcagagctacatttgattgattctttgaggatttaagtttatgttcaagaaattcgaggattttatttttaatctaaaaattagggttttgatcttccatttataatttgaagttgtgatttcatgattatttgataacccaaatttaaatttcaagatgaattatatatatttattattttttttataagattttgatttttcatttataatttggggtttttcatttataatgggtggttatttttctacaaaaatatccacgtagaagagaggaagaccaaaagttcaaaaatgagaaagtatgcaagtgttgttggattaaatacttcatgtgggcacatatgtataatgtatatgctattataaaatgtgatgtaaaattaagtgaccaattatgttatcggaatcaaaagggtattaaattgt

SEQ ID NO: 121441 - DNA, 756 bp, Cannabis sativa
ttcaaataccaaacatgctctaaagctcttggtcaagataagtttaatagtggttttttcatcaaaacttaagatatggttggcaaggactttactaaggcaattctctcagttttacaatcaggaaagtttctcaaagaggtaaactactcttactcttataccaaaaggtaattattctttattggttaatgactttagacccattgcctattataatatggtttacaaaactattacaaaaatcatttgtaataggttgaaacaatgctttgctaatcttgttgccaaaaatcaaaaggggtttgttcatagaaagttcattgcacattaatctaactaaaacaacaataactttcactattttgtaaaaaatattggatgaaataaaaattatatcattaaaaaaactgaatgactgtatatgtattatgcttattggagttacaatttatttttttaatggttgggggttacaaattcaaggttgatattttgattaattttttaatctcttacttatttcatttcttacccttacttattactttaattttatagtttgggtaaaattcaagcaaaccataattttatattaatcaatcattggagtcaacactcaacacacaagctttgtttaggttaaaagtcaaagtaaatttatttggattatcattctattggccggttcataatttattttttctttgttttaaaaaattaatggtggagtaaaataaattattaatgagcttt

SEQ ID NO: 121442 - DNA, 1101 bp, Cannabis sativa
  modified_base (1038)..(1038): a, c, t, g, unknown or other
taatataattactgaaatgaggcctcaatcaattaaaactattaagccaagctcaaaaaaaatcatcgtttcacttctaaatacttatggaagctatagattccatatctataattagcgctcccactcagttgaactaccatgtccttaatctatatgtcacgagaagatcaaattggtcgactttaataaaaaaattgaagaccataaataatacaattaagattgaacctaaccatctcatgattaagatctatagacctaagatcaaccactgatattgacataaaaaaatataactgtaacgccctagtgattaggcacgttacaatgctcttttgtttgttgcacactcatttgctaattaaagggttttctcaaaaattgtgataatttaaaacttttttgaataataataaacttgaataactgtaactttataaccaagaaatatgtcgggatctcgctttttaaacttgtttacatattaaaatacactttagaactatatcgcaaagtgactacaaaataagcctatgttgtcccgggaccggactctccaggtcacaccgtcttgagatgtacaatcaccttcaagctccaaactcattgctgctcagccttagccttccccttacctacacatgaaagcaataactgtgagtcgacagactcagtaagataaacatataacatataaaataatatcgacttgtatctaggcgcccatacacctatctaccgggcttaacagatgatttaagaatgttcttaaagaaggtacgacctctgtaccacatgcactacgtactgctactgtattagtgttggtagggtttgaatcgcaccccaagtaccgctaagtgttgtaccacatgcactacgtacccaatgatactaatattggtaacaccaaattatactcttaaatatcatgtgttgtaccacatacacttagtattgtttcgtactagtgttggtagcatatgaattatataacaacattcatataacatactgttgaccgagattttcggnaactattaaaatatgattatagtagtgagctgtaagaaagcgagatgaggatttttacgtggt

SEQ ID NO: 121443 - DNA, 706 bp, Cannabis sativa
  modified_base (328)..(339): a, c, t, g, unknown or other
tactatagtacttttttatcgctatgtacctaattgttgccttcagaactaagccgtgagtggctcgactcccatgcatttatggaaacaattttctataaaaaaacaatttgataaacaccatgaataatgacttaaatagagaggtgcaacaaaggtgatgaaatgtgagtttctatacatcacatgggttttgtgagtatgaacatcatttataacaaaatctatgtcttgagtcatatgatccaacaatacttgttgatgttgctcaaatgtcatgaaaataataagtgtatattatatagacataataataataataataatnnnnnnnnnnnnaataataataataatctatatatatatcttttttaaataaaatgtggctatgtaacaagattcttagtttaacgattatttttttaacgtttctttttttttaataaaaactaacgggagattaatgtctccgttaacttttaaatccccaatttattttcatttataatttttttaaatgaaatcgtttgaataataagaaaatcgttcgattatacttaaaaaaaatgattgaaggaaatcaataatcgataaatgttgagttcaaaaataatcaaaggaaatcgaagaacgattgtcactttttttgcaacaataatcgtgaaactcaaaggaaggaagaaattgaagccgcctagaatgagag

SEQ ID NO: 121444 - DNA, 670 bp, Cannabis sativa
acacccataatcaaatttagaacaaaaaattaacataaaaaaactcaagagataagaaagaactagttggtgattgcgctccagatcgtcacaatagcttcctctcctccttcaatcacttttcggggctaatctctggtgattttcgtcatcaaacttgaatcccttgtataggaagtagggttgctacctctgaatggcaaaatttcaaaactggccaaaaatctagtgtttcgcccctggtcgcaactacataaagtcctagttgcgaccatagaccaattaaaaaatacaccctttctgccaagcctcttagtcacgacccaggtcgtgaccatagataagggtcgcgaccatgggtaagcctggtcgcgactactgatgctaatttgacagcttcagcagatttttctccataataccccgtcttttcaccaattgtgatacaaaatttgaactataaaatgccaccgggaacctgaaacaaggaaaatcaagcgtaaaaccattccaaaaaagcaacattatgtgagaaaacacttatgaaatcggcccggaacttaggctaaagatagcctaacatcagtgtagatcatctatggaggatctttgactattaggattgtaacaatagataatcataacttatctatatcgtggtacatataga

SEQ ID NO: 121445 - DNA, 2299 bp, Cannabis sativa
  modified_base (2252)..(2254): a, c, t, g, unknown or other
gattattccacaaatatacaaaaacaatgaaaaaattacagaaatacagttttacggaattttaaatatttttacggtttttttactttatttatagaaaatacggttttttatgttatattcttattaatttgttattgactttttgttatctgtatgttattatttattgttgttttaatgttatttagatattttttttcatgttatatagttttcttattgttttcgtattatttctttggaaaactgtaaaaatgtaaaaaaaaattcaacaaatctaaaaatatatttcttttacaaaaaatagtgtcttatataattatccatatatgtatccttcaaaggatatgaaatactattttttgtaaaaattttatatttttacgtttaaaaatatttttttatatttttagggtgttttataaaacaacacaaaactacaagaaaattatataaaagtaataggaaaataacatcaaaacaacaacaaaaaaataacatacatacaaaaatcaacaacaaagtaataagagtacaacataaaaatacatcaaaagaccgtattttctgtaaataaatcataaaaaccataaaaatattaaaatttcatacaactatagttttataatttttttttttgttatttttgtataattgtgaaataatctctttcctaaataatacataccaattgttgaaattatttgaaatatacgatatgttaagcaaattatcaaaatctcctggtatctctaattactaaattgcaatgttaaaacgactatctctaatggatgtggtataaatatatataggaaaactttactgtaggacaagtagttcttaccccatgatatacggaagaaaattgttcaatcacaagtcaagaaattttaatagtatatatatttttatggaacataggtagcagattatccacatgtagtagctgggaccgtaattgcttttcaatctttctgatgcgcacaaaggtaggtgaggcacacatttggccaaggaattggtgtgagatgcacttgtatttttgaaagatttgagctctcctttttcaaagtttggtatcttcataaatttttttgctctcaaaactgaagatttggttgatcatgtatatgatagtttagaaatggttgcagaattcattactttatattctaacacacttacatttggtttaagaaaatggcatcgtaggctaaactcagatggcgcaactcacgaaagggagtggttatgttctcgcgaggctacacgattagtgtagaatgagagtggccaaggcaaaaacaaggatagagtgcaaatggtggttcgagttttttttaaataaagtaacagagaaatatgtttgcagagatttcaatcctacccacgcagattcatttgcagaagccactcataagtgtttcataagagcaaatagagtgattacaagacaaaattagttgaagacgcatcaaaactatacaccaggttcatggattcggaatgggttagctatggggtctccgttggtttgtcgtgggtcgctgtggggtcgccgtccgatttcctgggctagctgcagagaaatagtcttgatggagagagggcgtgagtttgatgtaaagatcgatgaacaatattgtaatagagagaaaattaaaggttctttttctaaatattaatattatttatttttaaaataaatgttatttagaaagtaaaaagtttttattgtatacactgtatcataagagtatatatcttacactataataaccacacgatctaaaattaatggttaaaaaaagtactctaccggtaaggaacttttgctaagtcctatcataatcttgccctatatacatatatatcaagttaaatttgacttaaaatatattataaagttatatttagtcctgtttttttatttgtactccaatacacagtgcaaattagatataaaaataaatactaccattaatatttattaaaaatatataaaataattaattttatttatattattttaatattttataaatataaaaaaattcttaacaaatagtattaatgagaaataaatatataattaaaaatgtgatatttattgtgagctaaaaaatagcattgataactaattctagagtgataactttattagtggataataatatatagggtaaacatcatcttggatcttgtgttttacaaaagttaccaattagaccttctgttttgttaannnacaaaatagaccttgtattttccaaaatggtacaaataggaccct

SEQ ID NO: 121446 - DNA, 689 bp, Cannabis sativa
ggtttgccgccggcgccgttgcattcgattctaccgccgcagtctccggtggcgcaggtgaagcggttgttggcgtaagtgcagccagtacgtgcccagattcggcccgaccagtgttgggtcggggccgggaaggagtggtgggttagggagttgagagcgaaaccgcctcgctcgaggacgggatgaccggcgttgggctggatcgccggccagacggtgaatgggcagttattgacaagggtgagaatgtcgtaggcgtgggagagtgttattaggagaaaggtggtggtgagcaacacagagagagaagaagaaaaagccatttttggtgaaagttttcttcttttctttttttcttttttactaacaaagggtgggatgtgtaaaatgtgctttttttcttgttcttttatagacccgggtgctgtggttttttttaactttttgttttttgtttttcaatgtgagagaactgatgagaagggtgcttttgctgtgtgcatgtgtaatgaccgaattgcccttgtgttcggaggtttattgctgcttgttattattacctgacaaaatatatgattaaataaaggaataattatattaataaatattattttggactctctgttctgcaaaagttacatattggaccttgtattttgttaaatgataaaatagaccctgtattt

SEQ ID NO: 121447 - DNA, 1924 bp, Cannabis sativa
  modified_base (1867)..(1869): a, c, t, g, unknown or other
ctaagaaaagaaagaaagaaataatactaacttagggtgaaatgtccaaaatgccctcaccactaattcttgaagaactataatcctagaattaattttgtcataaccaaatacctcgaaatacccagataatccaaaatcatcttaacttcttgatttcaccaatcccgcaaataaatatcgttgtgacatttttggccctaaatcgggtctctatggttgccggacctaaaaattttaaatcatttatgacaaaattttctaattctcacaaaattagattagtaagatcataatcttactcattatacccttattaatccatattttataaaatatgccctaattaatcataattttatttctgggatattacaaaatagttcagatttgcatttaatgcatcaattggaattgaaatattcaaatgatgatgttctcttcgggacacacgctaacatggtcagtcatcgtttcaaaaattgatgctgcacacactccattaatgaaagtaattcccacgagctaaagaaataataccacgattcattttattttaaaaaggaagaagctatcaaccattaagaaattaattgtttggaattcaaaaaggtttccaccttttcaagcatccacttgtccttcaaccatgtgaaagggagaatgcaagcctcaaaattacctccagttctaaaggcttggaggtaaatattattcgagtttttggatagaggacaagtgtaattctaagacagttgcaactcaattgatccaggcccaatcgcaggcccaaccaacataatagattggatccattagcgaagtcaagccatccagatgttggacagatgactcgtcccaacaagagacatcttaaatacaccgtatctctgaatggcatcaaacaattcttccagatgagtgattaatgggcatcaagatatttagctccatagaacaacaattattaccaaatcccacaatatcaaggcttcatttctaggatcatgttcaggattcgtatctttcaaatgaagaaataaagtaattatcaatcaagcattaatgtatctttattatccacaaaagtatgacatggtttgacaactatcaacgtgatgtggctcccacgtcagtaaaagatcaaagcctcactgactaggccttgcaaaagcagcccaacagtcatcatattatttgaatttatcctatcagtgggcaaggtgtacatatgagaaccctagtactataaatatgaaaaatccatccatgcaaaaggttaaaatctcgatacatgagagctaaggaaaattctagggttcaaacaattaacaaaaatacttatataaatctataaatcttttctagctttagcataattatatggacccgtggactaaggctcgttaacaccccaaccacgtaaaaattctagccttattctttgtctataatatatttttattaagctttattattttttattggttttcaaaaatatcggtaaacaagaaaattgtggcatcattctaaaaaagttcaagctaagacttcccacttggaaaagctatcacctctcttatgcaaatagatctcaacttatcaactcaatactgttaggacatagaaattagatgagtatatttttgcttccttaaagaattgtcatagaggtagataaaatgtgtatgtggttcatttgggggcacaacaacttgagcagtaaattggaccttacttcttgggataaagtctgcttacccaaaggttatggggggatgggctatggtgaaggaaaaaaatgaaacaaagctatgatagcccaatatgtttgggctattagtaaaaaatagggtaaatactattnnngaccctctgttttacaaaagttatcaattggaccctgtgttttgttaaatgacaa

SEQ ID NO: 121448 - DNA, 837 bp, Cannabis sativa
ttaattcaatattatcctatcctaatcaccaaaagcagccttaaagaattgtattacttgcttaagtacagccaaaataaaacaccaaatgacttacccatcagagtatttttcctctaaatctttgtatagttcatatagaacatttcttccaggaactactgtactctgaaagaaacaaagaacaaccctactgttagagtttaaataattattcaagtatcatctttccagtaccctttataaaataaattcattgcaaactgaaagaaagaaagccaaaccacaataacaaaaatagtaataatttatatttatttaaaagtaaacagaacatgtttaactgatagaaatgcgaacatgaacctaaacatggccaaaagacatgcatggatacagaaaaagagatcagcaacatgatacaagcacttgggtagacctcactcccaaaagctggcctaaaagaggagggtgcccaaatagttacatactggtaatcaatcccatacttggtcaatgtggaatccagacaatacactctcctttggagccggcgtccacggcggcccactctactctgggcctaatccacaggttgccccttccacaaaatcggtcccatttgaggatgcaggctctaataccactcatacaagcacttgggtagaactcactaccaaaagttcgctgaattccctaagttgcttaacccaaaactttactaatagcctgttgaatcgccgtttgatctgcagcaagcacacccacctggagacaaggcttgtcaagggcatctttttttgcatattttcgtgtaaaccttcccaagaagccacc

SEQ ID NO: 121449 - DNA, 846 bp, Cannabis sativa
aggagtaacactcattccgcgttcaagtactgcaagattatagtggtggattttcatactgcatacaatgtaatactagctaggatatcctgtcctagtcaattcgtgagcagccacctccatctgccacttatgtatgaaatttccttgtgatcatggttgtattggcattgtaaaatattattagaagagcgcatgaaagtgtcacaatattttttctaaaacaatctttatggtcgatgaaaaagccttggaagaagagacaaatcttgaggcaccagcccaactggcacttggggtgatctacagagaagatgaactagatccgcaaatcagggttgaaagagtaaagagatccaatgaagatgttgaagaagtttacttcattgacacataccataccaaagtgattcaaataggtaagaactttcctcccagagtaaaataaaacgttgtaaagtgggtcaaagataactaggacatccttgctttgtgacattatgataaccaactctcattgtcatgttggatttggtgccctaactaaaatcatatttcaatattatcaggcattttatttatcaataaaggaataaaagtattttattacttgtttaatataatgcttgttttacatatttgcttcatggtcatttgtttgatatataaattcttttaaatccttatcacattgttatttatgatttttgtgttgtcaacatagtggaaaatagtcaagattatgtgattaaaatgattttcatgatttatcagtacacagaatttacactgatacgataatcaataaattggtttgcttacacttagatagtggtatgtcttttc

SEQ ID NO: 121450 - DNA, 761 bp, Cannabis sativa
  modified_base (31)..(56): a, c, t, g, unknown or other
aaaaaaccaaaaaaaccaaaaaaaaaaaaannnnnnnnnnnnnnnnnnnnnnnnnnaaaaaaaaaaaaaaaacaagacattagccccattgtaatatgaaaatcaatcaaagattaacccctttgtactactaagttcttttttgaatgagttttttggacaacttgattcttattatttaaataatataaaataaagaagaagaaaatgtagataaagaaagaatgcaaagagaatgtgaattttaactctttttattttaatggagtgaattcttatttatacaataaaataagacttggaaaatcaagtaatcaatacttttatctttggcgtaactaattgactcttcatgattatagtcattcatatatgttatataatactttataacactctcatttggatgtctataatagttgcctcgaaatcttgtgagaaagcatagtgggtcaaaaaatcggtcaagggacaatagtgcaagttgtatgtactcctcattttgatatttttggagattctttaattaatgtattttgatcttgtgtactgtcttttgatattgatattaataataactttgtgaaataagtatgtgttaactcaatatttcgttaacataaatgagagttgataattaataatttgtatttaatgcttagtaaatactatacatttataatttgagaaagagaaatgctaaagggcaccagtggtgcctagcaccttcctgtgtgtcaatatcgctattggtacaatta

SEQ ID NO: 121451 - DNA, 3460 bp, Cannabis sativa
  modified_base (726)..(730): a, c, t, g, unknown or other
ggtttggaattccaatgaagatagtatctgataacggaactcagttcgatggtgacttgttcactgagttctgtgagaggaataaaataattaagaaccaagaacgcttaaaactgtccttggatctacttgatgaaaaatgtactgagtcgcaagttactaatacagcgtatcaacaccgagtaataagatacttcaacaaaagtgtcaaaaagaggctatttaatgttggagacttggtgccaaggcaagtatttgcaaatacgagcgatgcatctgtaggagtattcgacccgaactaggagggtccttatgtgattgaagcaatagtaggaaccgaggtttacaaattggctcggctaaacggctcgctgataaagaactattggaacgtggaacatttgtgaccctactaccagtaaattaatgattgtaactcacatttctaatgtaatattttgaacatcagttatgaataaagttaatcatttcattttcaagtaattacaaagtgttactctttaaaattacttgaggggcatatgtgtatgattaaccggaatttatctagaaatacatgatatagtgcaaacccacaactttaaaaaaaatttaatttttttttttaaaagttttttgatcaaatctttctgacgagaaagggatcaaactattataactttttgatcaaaaacctgtctgacaagaaaggaaaatcaaaagttnnnnntgagatataactcataactcgcatgtgaagttgaatattaatgactcgcactgtataggaaagtattaaatgagacgtcaaggtgtcttgataaaagtacttaaacttagtgtatgaatagataatctaactattcatgtaagcaatcaaaaatatacaaagtgataagatcattaaaagtatattcaagttttcttgaaattgattataactgttattgcgaggaagaattgataactgctcgtaaattaaaagcatggcagataataaactactcgtgcgtatggtagactattaactacttaacattaaaggaatgtacaagcagtggaaatttccttaaagtactttgtatgtgatcaaaatatgattgtttaaattgtgaataaaatacaatcaaaaaattatgtagtacaaacataaaagtacgaggcattaaataaagattgaaaccaagttggccatccaacctggcaaatttgtctttacacaaaagtaaaagtgccacaaggggaaaaccattgtctcggccctagggccattttcttacataaaataaaagataaataaaaaccaagcctacattgtaggagacttggatggatcttcttcttctaccgtctcgacctcttcctcttccttcatagtcttctcgcagaaagtgagaatttcctcctcatcttccttcaagaagctcgtttccatgtccggattcgccatcaaggctcgataaatggtacaaattccaaccttgttgcatcgatatttggtttcagcctctttcccctcgagtacccctttgagcttctcgcattcatcagttttggcctttgttgctttctcaacatcttcaatactcttcttcatcctctcggcttctttggtgaggcgattaatttcctgttgagcatcgttccatttcttgactacgacctcacattggctaagtgagttttggacatcactctctaagtattttatcttttctctgcctcgttgctgggaggcaaaagagatgaaagaagcctagagattcacaaacaaggatgtataaaaaacaagggggaagaagaaaattaataaatgacgtaagcatattagggcaaagaaacttaccaagagggtatgagacaagcctctcgtaagcattccttccaaatccccatgattgattaaatcccaatcatggggaggagagccttgagttggcgccagcaagcggctccaaactcttgagcgaactctgagccagtctttcctacctcagcagataatgtttcaatggcttggctcgaggaggcgggggtgtgagttgtgttggggggaggctcgtcggtacttgtgatgactggaagaggagtttgattctgtgtctcaatctcagggacctcgaggttaacaggctgaaggctttcttctttttatgagcggttgttttcctttgacttttaagaggctccacctcgacatctgaaggagctcttgaattggtcattctcttcttccctttcctctgcatacatcctcgaagtgcatgtctgcgaaacaagataaaattgttagcattaattataaataagtaaaagggggtttaggatataattttccgcctaaggaatttaccatagtcgctaaaagaagaggtatgactagaagatggggtagaaggacaataatatcaactaaaatccctacaacatttgatcttgaatatatcaaaggaatcaacaggttctaaatccaagctcgcgtctaggtgacttgccctatccatcatggtaccatattgcttggctatatcgtagtacgactcattacatttaatctggacatggaatctagggtaccagttctcaaacctatgggttatgcaacctacgaggagagggttccaaatataaaaattaaagcggttatctcacaatgtaactagagtggtatagagtggtacactcagccctaagaaatgtgggtgaccaaccacattgattaccttgggatgctctttcactagcttcttgaggggtggtgttctgaagatacagtgcccgagccacgcgatcctgaactttctccttgtcagggacaggaacctactgcaaagaataatacttgggacacttgtaatcacaagtaaattccttgtcattcaggaggtccacagaccttagattgacttcgcttagaagaaaatcgcatgacctaagaccgtagggaagagttaacaaaagcctgtgtcgctcgtctatctcaggagtggggacaggtcttgttgaggcagctagaaaaaaaaaacaaaattttagtcagataaattagaataaaaagacacagattaattttaccaagtctaatgcgagcaatcacttacgaattatacagaaagtggttgtgccaattggggagaggccagttgtctagaagaagttatccttgaaggatgttttgtttggaaaatccacaatgattttgggcttgccggagttaatgaaagcctcctacggaattcttcctcgctagaacgactttgacagagtaaaggtactctatttccacgggagtggggcactcccaatttataattttgtacagaaccctcaaaattgcgaagattctataggagacgggattcagttgaaatggggcaagcccgaggtggttgacaaagtctttgaaataatcacaaagggggattattgcccctgccctaatatgctcaaggctccaagc

SEQ ID NO: 121452 - DNA, 1391 bp, Cannabis sativa
  modified_base (27)..(31): a, c, t, g, unknown or other
aaaatagattacattgaaatggagttnnnnntagggcataaaacctaacagtagtgttatgcaaataaggcataactaagttagactcgaagatataaccaagataaaccctactaaggccctaaatgtaagagaggatgtgagcgtaacacgtaagtctatgctacatagacattaattataatgatattgttatatggaataatgtaatctagtgcggtagcacagtaaatacacagtggcgtactatatgaggtgtaattattattataattatcatactgtattattttctatcttgctaggccttggctcatgagtgctcttttgtgcaggcaagggtaaagcaatgtcaggtcagccatgagatcgagaactttaaggatgacttgtacatgttccgaccaagctagaccacgagagttgggtccaacagaaaatgtatagaatttctattttgttgcttaggccgacctgtacaaaataacttgtaatattttgaaaataattttacgggatcccggatatgtaaattattttggtttaaagtaaaatatgtttgataattctaagttatttatttaattaagtttattattaatttcaaatcatttggctaatagaccccgattgacgggattagcaaattgtaatcacgacatgtggcgttcttctgagtaggacgttacagaaggcattgttggtgctacgtgggagaaggttgttaacttatggcatttcaaagccaaggttaatgagtaccttagaagtatatcgacaaggacgtcgagttcttctggtgaaggaggtttgtgagaccctcactaagatcactcagggttgcaagtcatctggtgacagcaacagagtgatgtgcatcttctaggggtagcgtgcagcagttgaagagttgaacatggtgtgtgggcatgccatgagttaaactcatattttcccacgcagtgaatgtttcatggtcaataaataagtattaaggaaggttggaatagtttgtttaagaaaatatgaaactataactaaagtgataagccatatgtttaccaaaagaaaattatatatgttcctcactatgggttaaaagcccatattgctcattagggggtggtccatgacaccccaaggacaactctagaggagaatcctaggatgctggccgtaggctatagtgctcctcctagccagcataagagggttggcttgatggttcaaggtgtgagaaccattggtggcatggtgtgtgtgttagagtctaacattgatacgtattgtttgagtcaatacaaaactcccaacaaaagctcaaaaaaagcttaagaacaatcaacatgcctctgttcgttccaatacaacagtaaatatactcagaaaga

SEQ ID NO: 121453 - DNA, 1770 bp, Cannabis sativa
aaaaaaacgaattggtggtagtgcatatcacttgcaattgtctcctgaatcaagattgcacccaattttttatgttttggtgttgcattcagcatggggaccgcagaatgcaccaatccacaattttaccttcaaacttgaatgtaaatttggaatggacacttgagcctaagagtgttggatgttcggcctggtactcacacggttcctccttaagcccttatactatggactcactttccagctttcgaagcaacttgggaaaacttctcgactatttagcgcaatatcctgacttacaccttgaggacaaggtacgtctttggacctgggagtattgataagccgcccattacatatgtatgctaaaaagggataagggagcaacaaaacaggtcaacttaaaagagtgatgtggcacaagttgttagagtaagactaatgcactagagtattatgataaagtaaaaaagtagcgagggtgtggagagatttgtgtgagttgtaatactccttttggagagaattcaggctctcgaattcctgattatttttaacaaagaaattcaggctctcgaattcagctcagtttttctatcagctactgtttgtatttctttgtaccaatctgcaggattaccctatcataatgttacacattttcaagttgatcatggtgtaatgcaattctctcaaggttctatggatgatggaggtttgcaattctcacaacttgaaggatcaaatgcaatgattttaatagcaaaatgaataccttgatgcctccaagattcattgtatcatctgcacgaccatgtgcatgatagtagcctttggatgtaagctcaaacatgtccccgtgcctccttaaaacttttccattcagcgaaggcattctcttaaaatagacatcataatgatcagcattcagcaatgtcttggaagctccaaacatgagaggaccaagcgctaattcaccaatccctggtttgtgtttaggctgcaataaaagacaaatgcattaggttgagtaaaatgttattaaaaggaattagtaaatacatgaattcaaccacttctaaaagtaaaagtgggaaattaattgagatagcattttctatttttgggcttcataaaacaaaattaagaactgcaacaaaatggttaagtaaaataaagaagctgactagtctttgtttactacaattcagagattggttgatgcttactatgggataaccatcactgcaaagtatgaacaaactacatcccatagctggtgtgctaaaagcagctaatgactgagcctgtaataaggacccagttacaaatccccccccaatctcagtgcctccacaatattcaataacaggcttgtagtacgctctccccatcaaccacaagtattcatctatattagatgcttccccagtagagctaaagcaactaaaagacattgaagggggaaatagttaaagcgtaaaagaatcaactatgatcctgaaatcaataatggatttaaaacataactaaaatacaagacaaccatcatgatacaaatgaaaatattttaccaacaaaaggcaagcaatatactataattatttaccgaatggtggaccaatcatagccagcaacacaatttgtagatttccatgttcggacaatacttgggattacacctagcattgttactttggcatcctacgcatattagaaaagtttcagctgatttatagggattatttcacaaaaacataaaaacaacaa

SEQ ID NO: 121454 - DNA, 672 bp, Cannabis sativa
aacttagataacaggttaacaatccatttaacctcaacaattatgttagctaaggctctaatttcactttcagagctcgatcttaccacaacttgctattttttggcagaccaagagatgtggttaccactaagaaaaacaacatattctcttattgatcttcgatcatcaatgtagttagcctagtcggcattagagtgtgcatatcctcctaatggaatagatagaaatatctagttgaagttagattactattagtttattaaaagtagtttattaaaagaagaaaaagaaaaaaggaaattcaagtttatcaaagaaaacacattatccctacttcagccttagaaaaccaaaggaaccaaaggtgtttttctttatttctcactaattccttgatcccttatgaacctagcaaatgatctatattctccaccccaatcagcctgaacagacttgataagtagattaaattatttctcaaccatacttttatattttatgaacatcaaaggcttgggacttaagtgttaaggaaaagatctaggtgtatctagtgtgatcatccatacagtggacataatacttaaaaccctccttaaatgactcatgatatggactgtgacagtcagtagtcccgtgatccgtgaggggaaataccgggtaagctgt

SEQ ID NO: 121455 - DNA, 862 bp, Cannabis sativa
gagggaatggggaataaaattctagatattcatagaattccatcttctcatcatgatcacatcatatggaaggataatagtaatgggaagttctctatgaagagtgcttattgcttggatcaagctctaagatttagaactccaagaaatttgtggaaatgaattcggcatgtggatgtttacccaagaatatcagttttacactactacaaaaatgggttttcccgacgtttttaaatagtcgtttaaagtattcccatcggtttctataaccgttgcctatacgaccgtcgtaaaacgggcataataggcgacagttcaaaaccgtcgctaatgtgggtttcccgacggtttgcaaacgtcgcctataccctgttataggcgactgttttaaaccgtcgggaatgtaaaaaaaaaaggaaaaaaatacagatttttttgccattaatatttttccccattttttttcctccattagctttataatttcacctaaattaaaataaaacaattaattaattttgttacaataacaactaactttaaaacacattaaatttatacaataacacaataaatatataataaataaaaaagtatataaataaatgtatttataccgagcttggagagagagaaagagagagagcgggagacagacgggaggtggtggtggtccgacgtatgagacgaagatgagaggaacacgacgagaggtggtggtggtccaacgtatgcgacgaaggggagaccgacgggaggaggggtgtgtagagatcaatgaacgagagagacaagaataaatggagatcgagagagggaggaagacagcgagagaggagggcgatggtgcggaggcatg

SEQ ID NO: 121456 - DNA, 1365 bp, Cannabis sativa
  modified_base (47)..(49): a, c, t, g, unknown or other
gcgctagttgtaataggagttttaaaatttcgtaaaaatacaaaaannnaaaaaaactattttgaagtgtaaatatgaaaaaatcctattttttattgtttcgataattgttatgtgagttgttttgtgaatttagattatgatttaagttgtttcgttgattgttatttgagttgctatgtaaatttttataaaaattaataaaaaaaaattgctttaaaaatgtaaatatgaaaaaacccttaaatttaatataattaattttttctttatccaccttcacttttaaatttcaaaccaaacaatataaaagaaattactatatgtttttaaataaggtaaattagtattgagtagtcgctattacaacttttagtcaactttttttctcaaaataatatgcttgaattattattttcaatcttttttcataattgtattcattatagctataatattatctcggtagattttcgaaaaaattgaataattgacatcattaaaaacagagtttctaaaagatagctgaaattccagtttaccatgcgttcaaaaaacttcaaatctattttgtttttcttttttcatcaacaaaagataatttcattaatcaacaactacattagagcctagcaaagataaaagcctcaacacatatacattatgtgtcgaagcgatcaactgattaccgtcgagacgaacttccacatcctaaagacaacaagaacgtctaaatattttacagggattgtgtatgaggaaacaatgcggcattatcctatcgttcccacagacggtgctaaattgttgacggtgagaactcatcatgctaattttgtggccagaaaatcaaaatctaaacttaaattcataaataagatggggatgatgataaagagtaaattcaaatgataataagattttataatggagacaaaaaaattcttctattacttttttagctgatgattacaaatatgattttttacccgctctcacatttgagaatgggttatttataggtcatattggcttgagatgcaacaccccgatttcttgagacgtcacagtcgctagtccgtttaaaaccatttaagataaagataataaatgacttctttaatgaaaaataactaaacatgagatctcattatttttaaaataaaatattaatttattcatagcttttaaaatataaagctttacaaaaaaaaaattatttgaaaaataatcttcaacggaatatttttaaaccaaaatatcgtgataatcccctaatgtaatccacgcctcgagctcgccatcctcactatttagttttgcctttacctgcacacagagtacccgtgagctaacgcccagtaa

SEQ ID NO: 121457 - DNA, 581 bp, Cannabis sativa
ccaagagacctggtcaatgacaatccaagaaacccaagaaaaactcagaacattgagaaagaaagtagaaactcacgccgagtggggatcttctgtaagctggaacttgttcaccacaggaagcgcttcagtttgcatagctgtgaatttaatcccaaatcaataaccacaagagcccaagaaaatcagaacaacacaaatatcaatattgagagaaggaataccgatgacgatgaggattgtggaaatggggctgttttcagcctgagaaactgcggcttcctccgcagcatgagatttgtcgccatgaggagccattagatttctctgtttaccgtaacttttccaggaaaatataaaggcaagccgagaaaatgagagtaaaaagcgagagaatatgcttgtttgtctaaaccaaaactctaatttctttccttttcttttcaattgttaatttgcaattagttgtgggataataatgatattattggtataaacttattatagggtaaataccattttggactctgtgttttgcaaaagttacagattgaacactgtattttgttaaatgacaaaat

SEQ ID NO: 121458 - DNA, 2641 bp, Cannabis sativa
acataacttccttcacagttgaagtgcgcttgttccagacaatgttgtttctagctttccacaaagcccaacagagagttgcagctcggcaaatgaaatcactgtcctttgtattctgcaactgttcaaaccagtggccaaatgaagccgacatatcaatcacgacaggcaagccaaaaactgtccagcaagatcgggcaaaatggcaagtgagaagcgcatgtgatacagtttctgcagtagcttggcagaccgggcattgtgaggagatggggacatgtttcgtgacgagattgacacaagttgggagtgaacctgcaatggctcgccacagtaaattcaaaaccttgggaggtagtttcaagtgccagaatttttgccaaaaaccagagttatttggccgaacttcgactggtttttgcttctgcagcagctggtatgcactctgaacagtgtaggttccttgatgatttgctgtccatgcccaactgtcaggtcttaggttgataccaagaggaatggctaggattagatcagcttcctcaggagaaaacaggtcacggactgcctcaatatcccagcagctggtgttcgtttacagaagagagttgacagtgttgttgatgagtccaggatgtgtaaaagtgacatacttattgctggaagatggaagccaagggaagcccagaattgttgtttcttttccatctcctataacccgagaagctcctaacttaaccaaggtttttgcaccccaaatactgcgccacacaaagcttgggttattcccaagttcggatgataggaagtcggtatgtggaaaatatttggctttgtaaactctaccggcaagagaatcaggcttacataataatctccatccttgtttggcaagcatagcaagattaaaatcatggagatgcctaaatcccataccaccttcttctttgggagttgctagacgatcccatgacatccatataataccgcgtccattgcttgatttagttttccaccagaagctagccattagtttctcaatctcattacaagtaccaatcgagagaaggaacacactcatagcataggtgggcagggattgaaccacggtcttgagtaaaatttctttccctgcacgagacaaaaacttgtcgtcccagctattgatacgagatatgactttgttttttatgaatccaagcacaacatttttattgcgacctataatgtttgggaggcctaaataaaagctgccttcaagagcttctgacatatggagactagagcaaatggatgcacgggtagcaatgtcagtatttggactaaaaaatatggatgacttggaataattcaccttctgaccagaagcattttcgaaaagttgaagcatgttggtgatgctaccagcagccccttgagtggcttgactgaacaaataactgtcgtctgcgaagaacatatgggttattggaggtgcacgttgagcaaccttgcaaccttcaatgagtctattagcttcaaatttctgaattagagcagagagaccttcagcacatataatgaacaggtaggtagagagtgggtcaccttgacgaattcctctagaaggagagataggatcaagaacaactctataccgaaccgtagagacacatgccatgataagctcaatccatttactagcaaaccccatacaagccatcattgctctaagaaaactccattcaactcgatcataggctttactcatatcgagttttaaagcaatgaaacctttcttgccgcttctttttcgcttcaaatagtgcataacctaaaaagcaaccataacattatcagatatcaagcgtccaggaataaaagcgctttgggtttcagaaatgatacagtcaatcaagtctctcattctgttagctaaaactttcgaaatgatcttataaagaacattacacaacgatatcggtctaagatcgctcattataacaaagtttttctttttaggaatcaacacaatattggtatcattgagcccttctggtaatacctcggttgcaaaaaattcttttaccaagttagtgacatccgaaccaacaatatcccagtggtgttgaaagaaaccaggacccatgccatcaggcccaggagctttatcagggtgcatagagaaaaccgccacttttacttcttcgtcaagaatcggttgcaagagggcttcattgtgggatatcgtgactgagcttcttacattatcaataattagaggagaaaaagaatccatagattgaaatagatcctcaaaatactgatttatcacatttgcaatatcagtattccaacattgccaagaaccgttagcatcttgcaattgttgaactaaaagaataattaataacacaaatattaataaatcaatacaaaataaagtaatcataaaataatgaataattaattacaaaaataattaattaattagaaaaaattaaaaaataaataaaaaaaacccatcgggtccgattggtccgaccatcggacccacatggaggagcatcggacccacattcaaaaaattaaaaatagccatcaggtccgatggggtccgattggtccgaccatcggacccacgttcaaaaaattaaaaaaa

SEQ ID NO: 121459 - DNA, 1105 bp, Cannabis sativa
tatatatatatatatatttatcttctgcagtatgagaagttgcatctgcataaatataaaagagaatgctacaaaatatatatttatatatttatcttctgcagtatgcagattgatacacacgtacattaattaattgattcataacatataaattaagacatgcatatatatttcaagatttaattatttaatcataactttttaattaagacatatatatataaattagaagccatcacttggtagtatgaagtgtggagcagaagctatttctggtggtggcggcgacagtggcggcgctattttagaagtagaatcaccaacgccaaacatccaatttaacggcgaactgtatacataatatataaatgtataattaataattataataattcaatactataaataataattaggaaattaaataaaaaaaattaaaattagattacaaaaacataccgcatcatattgccaagacgtagggcaaaggaggaatgttgaaagagaatcataataagacacaacaaataataacgtaaattagttagtacaaccttcatgatcataaatatatatatatatatatatatattaaatataatttttgtatatattgatagtaggaaagctttattgtcaacaagtctgttactgatgatcctgatgcttattcaaaggttgccttgtggagcaagaaagaagattgttgcatgtgggatggtgttgagtgtgatgagatcacaggccatgtcataaccaatttggacctatcattctctgtcttttctggccaaatcccttctcaagtttcacaattatccaaattgttgcaactttctttgtgtggtaactttggttggaaagtggtggcagtacgatatggatgcggattcgtgattggattgctcatagaaaagaatattgtgactgtgaggaaaccaaattggttagtgataatttttgggaaccaaataagaatgttactgccctagtactggtcgatgatgttaaacttcacatagattatgaactatctaaatatacattaaacatcattgttcataatcattaaaaccaaaatcaatactttatttagagcatc

SEQ ID NO: 121460 - DNA, 649 bp, Cannabis sativa
aaaaaaaaaaacagtaaaaaagttgtatttgccgtacaacagtataaaagtaataaattgggaaaaaacagtagtgggtgtaaaattccctatgagaagcccaattataaagtcatagcccaattcaaactgttactcaaactctctttctctcaatctccccttttggctttcttcatcaccttaccctagaaatattatcaacgtcagatcggagatcggagatcggacacgaggaattccgttttcattgccggattaacaattacttcactcacaacacctactctacttaaattatcaaccttacatcggagatcggggagtaggaattccctttcactcacaacaggtactctactttcgattttgaggctgctaatgaggatcaaattatctattttttttaataatagttaggtctgtcacaattagtttattatgtttagttctaagattaaaaaattgtgtatactattatttaaaatgctgtaatttgaatgcgttaataatcatagaagattttttttggggatcgttccgagacttggttctcaatctttttccgtttgaaacgtaagggccagggccaaacaaactcataattttctgagttctgttcgataaaaaaagttctgttttttttttt

SEQ ID NO: 121461 - DNA, 1326 bp, Cannabis sativa
cccgcctatgttaatttcaaaaaattgatattttctatctttttttggctatttgaaggagtggattttcacatttttttggaagcaattagagagtacaaaaattaaaaaaaaaacaaagtgatcgggaaggcttttcaacagagttttccaacactttcttcttctttattttcttcttatgttcttaattgatgtgtgtcgaattgttacaatgaatagacgtagctaaacatttattagggtattgttagagattgtttgacatctatttatggctttaatataatttgattcttctcccaattttctatgtgttctattttattcgtttttaattcttttaatttcctggccatcaattaaatatttatgatttcgatacgagatctgagaagtgagtgtcgattatgctataataaaatagggacgaatttcgatatagaacgagggtacctatgtggtttggatagcttttagggcatactccagcggatatggaaaacttgagttcatcttcaaacatcctccctactttggcaacttcggcatcaaagcgttgaacatatcttcttaagctttctttctccccttgcttcatgacattggctctacttgttacaggcacactgtaatcactcgctacttgatgctgctgaaggaattccaccaaaaattgtttccaggatgtaatcattcctggtccaagccttttaaaccacttatatgtggattctttaagtgtgagcacaaagcactaacactttgacttgcatgacacgcttttcatcttcattagctcatgaaaggctcctagatggtattttggatcagttgtaccatcatatagagtcatgcaaggcttcttgaaattgggtggaagtgattcaattttaatttcccttgagaaaggggattcttcatcgaacccatcatctttcgaattttcctttgacacggtagccatttcttaacgttgatcttgcatctccacttctagctacttttttattcttttgttcatcctttctcgggagttggtgagtggaacttgagttctccttgcaattttcatggggcctctgagtggtactcctctcatcccatcattgtgcaacttcccaccatgattgatgacacctttcactttcgttgctcttgaaaggggggcacaggcgttgtatctactagcacaagattctttgttcaagtcccttcgtaagaccacaagatgtttccctcattgctgtaatacccagaattaagaaaaggattaggaaaaaccctaactaaataattatgaattaattgaggaattatattatt

SEQ ID NO: 121462 - DNA, 935 bp, Cannabis sativa
tgggagtttctatacttggtgcaacaagcaatttggggatgatagaatatattcaaagattgatcgtgtgcttgcaaaccaacaatggatggctgcccaccctactgctgaagttatctttatgaatgaacttgtctttgatcacactccagcaatccttaactttcacaataatgtcattggcggacggaagccttttaaatatttttccatgtgggaatcgcaccccggatatgatgaaatcatacagcaacagtggcaacaacacttcaatggaactttgatgtttcgaattgtttccaagctcaaaggtataaaaactgttttaagggaattgaacaggaaccattattctgacatttgtgcgcaggaatgccttgccaaagccaaattagatgagtgtcaagccttattgcagcagcagccactcaatgaaaacctacatcagcaggagaaggagctcagaactcagtacactaatgttttcaagagctatgtgtcttttttgcagcaaaaagccaagctgaattgggcaagggcaggtgatgaaaactcagcattttttcacactagtattcgagagagaaggagacataatcaagtgattactattgtgaatgctgaaggtgtaaggattgaagaaccaaaggctattattgaagccttcattcagtattataaagaactattgggcagccatgtacaagatagaaagatggttcaacaaaaaatacttagagaaggggggactctaacacagcagcaggtgagctttctcttgagagattacaatcatgaggaagtcaaggaggtaatatttgccatccctggtaataaggcgccaggtccagatggctttgggagctctttctttcaaaaaaactggagtaccataggttctgaagtagctgaagcaataatcagcttactcaaaa

SEQ ID NO: 121463 - DNA, 712 bp, Cannabis sativa
atatatatacatgatatatgcataaagtaaagacatagttaatggttgttcgaactacttccaagacggcgggcggcacaacggaacgtgttagatatatctatatatattccaatagtaacgggatgatcaatttcagtactgttgttttggatcactaagtaatagtaatcactaaaccaagctttgtttgccgcaactagaagaaagagtgagagccttgacttgtgccacgttttgtgtgtatatatatatatattgcaacttaataatagcctaccacttgtatatatacattttagttttatatatgatcacataaatattctttttgaataacaaaagatggttgtcatcgtaaaatagtttctatcactctcttttttccatatttatttcaatactttataagaaagtcatttaatcggaaaaagaaaaaaagaagaaaaaagaaagaaaattgcccacaaagtgctactaatctttaatctttactaatacaatcgaaacaagctagtcgatgtatagaaagtgtcctaataattcaaatacaccatttttcttaatatggtaaattagtgtacgtgtttttcccctaaatagctttctcttataatcttttgtatatacacaataaaattatatatataatgttataaaataatataaagtagatgagaagaaagatgaagaagatgaagagagaaagaga

SEQ ID NO: 121464 - DNA, 1003 bp, Cannabis sativa
taggcaatctactcaaaaaagtaagtatattttaataaaaaataatatgaaggtatttttgattaatggatacaaaaaaaaagtatttttcaacttttcccatgaaaatttgtcggaccaaattacctccaaatgactcttgtccagtttgcaagttgtgggctaaaaaagcccaagttagttgaacatttgctaggcccacatcgaccaaaccaaatccatcaagtttgtcgaacaccaccggaccagaccagagccaaacctactctatctcgctcacacccgccatccgtttgtttctcactctatggtctctctcatctcataggtattattctcaaacccttcttatcttcatttttcctttctttctttgttcatatttttgcataattcaacacatgttatgggtttcagttcattgttgtataagcaaaattgcactatcttaaaggagaatgttaatttcgtcgtaatttcacttcaattataaataatcaattttctgttaatgtgtatcttggtctctctgttttgatcgaatttggtattaaacccagtccagcatgacactcgctatgtccgtacggttcccggtgacaccttcagcaacagcaacaacaacaacaacaacgaccaatgctcatccaacctcagccgttcgatcaaaaccggcatctttcatcaacctttctctgattaaacaaagatcaacgagcatcaatggcaccgagaaacgaagccagttttttctcgccacaaaagccgtggaagagacccaagggagctcagaatccgcgaatgtgggagaccaagtggaagagataaagccggagttgagtgaattggggtcggagataaagaaggctatggaggagaggaaggcggcggagaaagaggagggtttcctggacggagtggctgaggagattaggaaaatagagtggccggcgtttgggaaggtgttggggacgactggggttgtgttgggtgtgatagctgg

SEQ ID NO: 121465 - DNA, 2307 bp, Cannabis sativa
  modified_base (2203)..(2206): a, c, t, g, unknown or other
tatttaataattatactcttataaaaaatatatcatttatcttataattgtatttcatatactctctaatatattaaccattaattacttacttttagagcataactctcaataatccattgagatcttgtttcttcatcttctccttgagttcttcaaactttgtcgacaccaagcctccattactcaagcactattgatatatacatagctaccaagaataagagaccattctctttctagctctcattggtgtgttattcccaagaacattgccaccactattattatggtattgagtctcccaagagccttttacccataagttttgatattaattttacctagaaatctctttttgtactattatccacacactcttgagaatatcactctggtgtgttgaattcaattaataaaaataaagtagatgcattgcgacttgagggtgaacaattataaatccctggtgtccttctcatttatcgcagttttattttgctaaattaattcttcgcagtcctcttatttcttacaattttctttaaaaaatgtacaaaaacctgcatcaacaattttatttatttcatgaaatagattttgaaaaagaaaaggctatgtagagattaacttgtaaaaatatacataaattgtagctttcctaattttatgggtacacttaaccaaactaagaaaaatcataaataaaatttgattcctatttcacatttttttttataaatcaacaagtttatattattcgataaatattttacaatcttttacaaagaaagagcatctttttgacaaaggatcttaaaacaatcttttttacaatttttgaaatcaatctctatcttgttgaccaatcttttttggccaacacaattctattctatgtttgacactatttttaattctttgtacaattacatctctattttttgtatgggtgagcagcaacagctcccaaagtcttctttttaaacttgctgatcttagctttgtgtatccatttgagcaattgagataggtttgatgttcaggctcgccaggtaagctaatcctttatctgcaaaagacagtaatgagagtatgtacacctgaagaagagatgctcacttgactcaacctgctgcaagcagaggctgcaaatagtatcagttacaagattgaatctctgcaatctatcccttgttttgagtcgattctgcactactaaccagagaatgaagctttgtttgggggtattgaatctcccccaaacctcattgcaccaagacactctattttggataggacaaagcatgttatagccatcaaaaatcttgtacctggtttgggagaattgttgaccatcagatagatttttgacttgattcttggctgtcacaattttcttctataccaacttccatgcttaggagctttgtaatcccaccactcttcctctttgagatacacattgtgtatccatttgacccaaaaattatcctccttgtttgctaaagcccatacatattttaaaagtacagttgtattccattcaatagttcttttgatgcctgaagctcctgctgtccttgcttgactaacattttcccatgccaataaaccagctccctgcattatttattggcccttccaaagaaaagccctaaaaatggcttcaatctcatgaattatctttttaggaagcttgagaatcttgcaccatttagaatgtattgttgtgagaaccgagttgatgagcacagccctgctagcaaaagagatatttggttctctaagatcgaattctagccgccattttctctgtcaaaacaatacactcttaccttgaattttttttgtgcatatggggacaccaaggtttttaaagggtgtctgctgcgttgtaaaacctgatgcttctagcactctaacaacatcccgatctgccatattactgcaaaaaattgtagattttgcgttgttgggttgtaatcctgatgtggctgagaatagcttcaatccttgaagcatgaggattatgcttctatagtcacctctacaaaagagtaaaacatcatttgcgaagctaagataattgagtttcatagcttcacatctttcatgatatgcaaaatcttttttgcagcccactttgttcataattcgagttaagttgtaacgccctaactgttggaattattttactagnnnnttagatctactcacaggtatgttgattaacaacctaaatatgaacttctaaaacgaaattaattcaacacatacaaagtatgagaaatcttacattgaatg

SEQ ID NO: 121466 - DNA, 627 bp, Cannabis sativa
tgttgatgctgaaaattagcttaataacaaatttatattatggcatagaattccttacactatgtttgatttagtcgagatatacattgctctatcaatctcccggtttctacaatcactctcccattcccctatttcatgaacttgaaaggttttgagaatgcattccaatagagtttcgactagtctggtgagaggaagaatctattcctttttttgaacaatggagtctcctatttatgggcagtaatgactgttggtccctttcttttcctttgttaaaattagtccacgtggattttttttcttcttcacatgtttctcaagttcctcaggctttatttctaatttcctcaaattctgctctacttttttaggtggttgaggtttgtctttcccgttctttctttttctttatgtgaaacagtgcatttaatgttcctatcacattgtttcattcgatcttctatgtttataatgaatagaattactatcttacccctaagattatttttatcacttacaattgcccctcgactctataatttctaagctcgggtttgtttaagttcgagctcagatgttgtggaactgattacccaaaataattcccacgtgtcataatga

SEQ ID NO: 121467 - DNA, 3087 bp, Cannabis sativa
  modified_base (3026)..(3026): a, c, t, g, unknown or other
aatatgtttttgaaaaatattttcactttttcacttttaaaaacagaaaactgattaaaaaagtgttaccaaatgccatcaaaataatttgaagaaattacattgtatacccactttactttatatattttaatttttacttttatttctatattatttaagatatacccagatttatagatgatacacctattatacccattagttaatgtaaattatgtgttgaacttaagtggagggtgaaggcatattgggtaacttattcacaaaagtggatacatttaattgaaatataatatgatgatattttttattaatggatacaaaaaataagtatttcttaactgatctcaaataattaaagtttgaaatatgggaatccaaaacaaaaaaaaatgaccataaataattttgacaaaatttctaatagtaaatattgtcggagaagacattggtaccggaaaaattatttgttgcaagaaaagtcgtcgaaaaaattattgttacaggaaaagtcgttgaaaaagtcgcctgaaaagtcactgtcgttagaaaagtcactgaaaaattgtcagaaaagttaatggaattgagtcgtcattggaaaaatcactggatttagatgtctcagatgtaaattaaaatagaactggttctataacataatgaataaaaacaagtagcacgcaataatttaaatcgactataattaaaatagaatcggttctataacataatgaataaaaataaattacacaaaataactcaaaccggttataattaaaataaaatcaattctataacataatgaatacaaacaaatgacactgaacaattcaaaccggttataattaaaaaaacaaagaggaaatcagttattaaagcactgaaacataaattaaaaattaaattagtttcacaacaaattcagtaaaaacaaatgacacataatacctcatgaaccagttataattaaaaaaaaagtgggatcaattctaaaaatactgaggtataaatctaaacttaacctgtttcataaaaaagaaaaataatacacaataactgaaaatataacataaagaaatcggttatatttatcaactagttaaaaatcagagataaaaaaattaattccttaaagtaaccaaaataaaaacttacacacaaaaatcagttaaataaaataaataaattaaaaacgggttcttgaattaactaaaccaaaagtcagtttccgaaataactaaattaaaattggttatttgaattaattaaatcaaaaatcaatttctaaaataaatattttcgaaaattattttttgaaatgactaaataaaaaaccatatgagatattaattaaaagagaacaggttccacaacaaaatgactaaaaacaaataacacccaataactcaataacttgttataattaaaaaaaaaaaaaacaagagggtttcagttccaaaaacactaatagataaaataaaactgaaacggtttcataaaaaaaataattaaaaacaaataatacattataacttagaaatcgattctaattaaaaaataagaggaaatcagttccctcaacacggagacataaactaaatagaaccagttctacaacaaaataagtaaaaatatataacacacaataactcaaaaatcgattataattaaaatataatataatataaatcacaccacatcacaaaaattattgtatttatacaacaatggtggtgattcgtgtattatatccaaaaaaacacaaaatacatccaactgaaagatatcatatttgtatttaatgcgttgcttggaaccgagatattcaaattatgatatgggacacttgctaacatgatcagttattgttttacagatccatgatacaaacgcttcattaatgaaagtaatctttacgagccaaagaaaaaatgccacttgttgcctcattttaaaaaaacaagaagttttcaatcattaatttctacttagaattcaacccttttaagcacccacctttccttgggtcatttggaaggaagaagacaagcctttgaaactacttgagttctgaaagctttagggtaaatattattcacgtctcagctctttcaagcccaatcaagataatgggttggatccattagcaaattcaagctttccgaatgctggacaaacgactcgtccaggtgagataaaccttcaacactgtatgtgtccaaatagccccaagcaaagctttcagaggagtagttaatagactttcgaatatctagctccatattacattcattaattatcaaatctcacaatatcaaaacttaattcccatgatcatgtccgagaatcatgttttccgaatatggaactaaattaattgtcaatcaagcatttatgcctctttattatccacaaaagtatgatacgatttgataagaagatcaatgcctcataggtcggacttcaccaaatgagcccataattaatgtattatctgtatttaccccatcaatggacaaggtttacatactggaatcacaacattataaatataagaaaactcattcttgctaagggttagaatctcattccttgagtgctcagaaaaattctaaggttcaaacacatgtataaatcaaaaggcttttccattcttatcataataatattgatttgtagaatgaaggtcattaatccttgaaccacgtaaaaactgagggttcattcttcatttattatatttctttagctttattatattttattggttactaaaaatatcagtaatcaatagtgacagatgcaacaaaaaaatcaagtatttaagtgtataaattttaaaaaataaaatatttgtggtgcaaatattcctttagaaaaatatatattcttatctctattcattttgtgtgtgttttttttaaggtggtgtttggtaacacttttttaatcagttttctatttttaaaattgaaaaaataaaaatatttttttgacaaaaacatgttctataaaactanttttactttttaatttttttaattgagaatcaaaattatgaaaaaaaaaatcactttcaat

SEQ ID NO: 121468 - DNA, 1004 bp, Cannabis sativa
  modified_base (26)..(28): a, c, t, g, unknown or other
tcctttccattccattccatttcatnnnctccaaccaaacgccaccttattttctttactcgcgtggaagcgcgtgtgactcaactgtcactttttttttttttttaaattttccgcgaccaccgaccgcgagaaattgcagttaaatttcttcataattgattatcaattttttttttgaaagaattgattgtcaacttattgggtcaagaaagtgatgcccgagcactgtgggaaaacgatgacgtattatggtttatggtccaaattacccttcgcccttttcaatttggggcttttttttttgaaacacaatttgggtttattttaaaagaattacataaaatattaattttttttattatatttttacaatttttttataaaaataataagaaagttacataaaactagcaagaaaataaaatccaaatagtatcagaacaataacaaaaaataacatacaggtaataaaaaaaaatcaacaaattaataagagtattatataaaaagatcgtattttatgtaaataaaacaataaaaaatcgtaaaaatatttaaaattttgagcaactacatttttgtaatttttttcattatttttatgtatttgtgaaataatttcttattttaaacctttgattttttttttatttttatttttttttttattttaaacctttgattgaattgtctctcatcacccacaagtggattttacaagtaaattcattttttttttttgggttttttaatgtgtttcacagtcatcactttacatagcattttgaacataaattcaaaattgtatatacatttaagtaaaatataaatacgtatgaatggtgttggttcaatttattttttaacagttgtaatagtatagatcgtatgaatgttgctacgtttgcggagaagaaccgatttggttttggttgggtgcttcgggatactaccggttgtttcatccatgctaggaccggctcttggcaaggaagggttga

SEQ ID NO: 121469 - DNA, 2372 bp, Cannabis sativa
  modified_base (2343)..(2347): a, c, t, g, unknown or other
gtcctcaaggttgaaggttggaaattgctcgcagatgacatcaaacttctcccaagtagctccaaacaagggcagatccttccaacgaatcaaaacttcatctttttggtctggagatgtgggaagttgacaaacattcagcagctcctctggttcgacaatgagctccaaattggctgtcaaggtaggaggaagggtggtggatgagtgagccataccgatagcagcgcggagttgtgacacatggaacactgaatgtatggctgccgaagaaggaaggtccaattgataagcgacactaccaattcgcttctgaatcgcgaaaggaccataataccttgctgccagcttctcattcttacgggtggccaacgacttctggcagtaaggcctcaatttgacaaagaccttgtcccccacagcaaattcaacctgccagcgactcatttgccacatccttcatcttttgctgcgcacacaagaggtgcatcttcaaatcattgagaaaagagtcttgctcttccagccactgatcaacagccatgaccgcagtagaccccgctgaatagcgaaccaaagttggggagtcacgcccatacaacactttaatgggcgtacaactcaaggaggagtgaaaggtggtattgtaccaatattccgcccaagctaaccacttggcaaatcctttgggacgattctaagcaaagcaacgaagataagtctcaaggcaacggttaacaacctttgtttgctcatcagtttgagggtgatacgaagtgctatggcagagctccgtgccttggagtttgaacaattcagaccaaaaatggttgagaaaaatacgatcccgatccgagactatagtaagaggtagcccatgtaatttcaccaaagtgttggtgaaaccttcagccactgatttggcggtgaatgcatgcttaaggccaataaaatggctgtaattgctaagtcagacccccgccactaaaaccgtatgtactgcttccaatttgggtaatcctttgataaaatccatagtgagatcatcacaaacatgagctggtagtgacaatggttgaaatagacccctaagagacatggacaaatgcttgttgcgttgacaagtctcagaggagcgaacaaagtcaagcaccttcgctttcatgccgatccaataaacatcgcttttcaagcattgataggtgcgaagttcgccagaatgccccccaatctgagagcagtgatactcccttaagaaatggggaatcaaggacgatgcggaagacaacaccagccatcctttatacaacaaccgctcatgatgcaacgtgaaacctgtaacggattttgcttgctctaaatcactcttaattctagataggaagacatccgtatcaatctcccgcgacaaacatcccaatcaagccaagccgtagaattcaacaaagaacatttagcaagagggaagagtgataatgcatctgctgcccgattagtgtgccctgcccgatactgaatttcgaaatcatagcccaataacttcaccagccaattttgatgttccggggtgactaatcattgctccagcaaaaattaaaggctttgtcggtctgtccagacaacaaaacaccggccaaggaggtagggccaccatttgagaacagcaagaaacatggccatgagttctttgtcataaatggactataggcgggcccgaggcttaagaacttggctgaaatatgctatcagttgaccttcttgcatcaacaccgcccctaatccataccctgaagtatcggtctccaccacaaacggtttggtgaagtccggaagagccaaaattgggaatgtggtcatggctgtgcgccacgtttcaaaggctgcggtagctttgtctgtccacccaaattggtcttttttgagctgatcggttaacggccttgctatagtcccataatccttaacaaacttctggtagtaacccgtgaggtctaggaaaccccgcaactccttgattgttttaggcagcggccactcaagcatggccttgattttagaaggatccacagcaacaccttggcccgagataatgtgtttgagatactccacttgtcgctgcccaaagcaacattttttaagttagcaaaaaattgatgttgggtcagcgtttgtaacaccatttcaaggtccttgagatgtgtttgttcgtcgggactgtagacgaggatatcatcaaaaaacacaaccactcattttcgaaggtgaggtttgaaaatttcattcatctgagattgaaaagtggctggagcattagttaatcaatctacaacatagtttacttgnnnnntggataagtgttatgtcctttctag

SEQ ID NO: 121470 - DNA, 1617 bp, Cannabis sativa
aggctcttgcctccactcgttttctctgtcttcgtcgcaaactgagtctggcttccttagcccagctcagtttgaggggggtgttagttaagggttgttattttgtttattgtacagctcattgtaactacttttctgttagttagttagttattctattgctttatgtacatagcctcagctgtatttaaactcttgagcaattgctctgtaaatcagatcattttcactctttctctcttgttaacaatagtaccatttttggtggctagtatatgtatggtgactgttttattgttttataatttaaaactcaattaattttttttaaggtacaaaaagatctttaaaaatagattttatgtttgatgactatgctagtttttttgtaccattttttgatggttttcatgccttttttggcttttatgctatttttatggcttgcccctaattgtttaaggtagatttgtgatatgattaatgtgtatgagaagtattttattttgtataccttcttcaaattacgacttgtctaatccgacaaataagtgtttcaagtcttgacattaaaatatgaattatcttaccatttcaaattaattatttttcattaaattgtatggtaatagttttatgtattgttaatttgtaggttatcggttttgaggagggccaactgttagagaaatttttttcgataagtttaatttaaatattatttgtttgagagtcgttatcttctaactattgagaatttcttatattatgttttaatatcatcgatagggattgatttatttttttatcttattttattttgtagatgtttggggactattcttgatatgttaatgagttagcgtgtagtattcagcgatacaagttaaagctctagctctttgagtgtactgtttgagaaaattatagttttattgtataaatttttgggggtaattaatttgtctcatattgctcgttgactttaacagttcatggtttgacaaagcatgtctttcggttagacgagaagttatccaggttcaagaaggttcatgcactgtttacggatgtatgcatcataaattcacgattaatattaatcacccatcttttatgttttatttacaattttacagcataaaatctttaattacaaaaatacgcttgtaaagttttaaaattacaagaatacactttatttgctcatcaaaaacttaaaaaaaaaacaactaaaaaataaagagaaaccaatcttacagcaactataaatcaactataaataaactataaaacaactaaaaatattagaaaaacaaccacatgacaactataaaataaccaaaaaatagtttattatttttactaaataggtatttttataaataaaaagttcaaagaataaaaatgaaaatttatttgtattaatgtatttttataaatttcttttaaatttttgatctattaagtaaaatattttctaatatttatatagaggaaattacattatatattcatttgactttatttattttaatttttacctttatttcatattttttagggattatttcacaaaaacataaaaacaacaaaaaaaaaaatatataaaaatat

SEQ ID NO: 121471 - DNA, 807 bp, Cannabis sativa
tgttcaacattggcatatcttattgtttgggcttttcggatagcttcttcccaaattatgaagccatcagctcactcaaggaactctttcatgttatttgtagagatcctcctaatatctttccaaaattcactcaacggttggatacctccaaatatggtcgtatatcaaccttcttttgttaggcttttgacattggtggccttggccatgaacctttgaatgtagtctttcaaagactcatcttgcctttgctttattttgacaaggtcctttagttgttaaggtatttgtcttgagactgaaaactatatagaattctcgaaagaattctccccaagagttaaaccttcctggggtcaacttgtagtacaaatgttgggctatttcagatagggttgctggaaagatccgacatcacacatctccagtcatctccagttactttttggagatctttttggatctcaaagtactgtatgtgtgctatgagatcttctttccctgtgtacaccttccaagttggcattttgaacattggaaggggcagtgcattaatatatgctgagaagggtgatccccttaatttgtcaagttctaaatctgacacctttaggttggataggccattgtatatttgatttcatccaactttcttggctagacaaactctcttgcctggccagcctttggctgagcaatcggccttggccggcatgttgggttttatgccctaaataaaaatcatttcaatataatcagatttactaattaataaatgtcaaaaatcgcattttatgttgcatg

SEQ ID NO: 121472 - DNA, 679 bp, Cannabis sativa
  modified_base (190)..(196): a, c, t, g, unknown or other
aaaataattcttcaatcagtccaggaatttccatttctgtacctacagaatcgtggacagtaagtacaactttccttttatagaaaaggaaagttcaacttcggttttctcttcaacaaatctgatttaagaaaatgggaaactcagacaagataagaatatacagctagttagataagaattaattgtnnnnnnnaacttaccatttttacctcaatttctataaataggaaagctagacaactttccttccaagtttggatacacaaaatatggtaaccaataataacacaccagccgaattatacattaaataataaaatatttttgttcattaaatatgccaaaaatagaattaacaaaaataaaagtggaaactgcataagaataaatatttatgaaaaagaagaatgaagaactcaccactttttgaaccatattaactttttttttatgcaatattcgtgtgaccatgactttttatataaaaaaaaaatcaaacaattaatatataataaatttaaatatgagatgaagatgatggagagtatatcatataagaataagaaagaaaaagagattatatataataaatataatgtaacaccctaactatcttagacgtattacgtgatttttaaacgtactgtgcagctcgttgctactcaacgaggtttat

SEQ ID NO: 121473 - DNA, 758 bp, Cannabis sativa
ctctctctctctctcgctcgctcgctctttgaactcaccccaagatctcgatccataaaccaccacccacaacctcggtcccttctctccacgaccaccacgaccacagacccaatgaccgtcacagacccaatgacttctccatcaaccacgacttcaccattggtaatgttatcaaatgaataaattgtatgattaatatttattattctgtgagtagatgttagatttaaggtcgaaaaacgaccagatctgagttttgggcaaaaagatagtttttttgccaggcccgatagttgcatgatgccttcttgattgttaaaatgagtaaatattgaagacaaaggttcgatgttggtctaatggtggcccgatgatatggtccgatagtagttcgatagtggtccaatgctttcctattgttaaaatgattaaaggttgtagacaaatttccgatagtggcctgatgctatagtccgatagtgattcgatggtggcccgatgccttcaagcttaatgagtagagcttaatacctatatatgtagactatggtctgatggtagtccgatagtggcccgatgctacttttttctatgtagaaaaatatatataaaaaaaaggtagcatcaggctaccatcaaatccaccaccattagtataaataggaatgaggaatatggatagtaatttactatacaatatttagaatcggaataaattaatggagaaatgtaacggaataaatgaaaaataatcg

SEQ ID NO: 121474 - DNA, 2016 bp, Cannabis sativa
aaatgaaaacaaaaatctgaaacgaaggatatcattgagccgaaccgaaccattatcagacgactgctcttgaacccttcacagaaaaagacgttgacgttgtattcccttcttctttgtgtacagtaaaacagattttctcatgccgtaaagatccaattctcataataagactttcacaaaattcaatgatctgggcatggcattgatttgcgcgagaaatagaaggaggacgatgataataattttgattctgagactagatacttaattacaataatagcgatattacatgttgaaagaatactaaacactactattactttttaacatttttctatataataccttccaagtaatagagatcaaaaattgagaattactaaaaggcactagtattacattattttctggtaccattaaatatatatacacatattttattttagaataaacattattagcggtatctgttgtttgttaaatgacaatttactctatgttttttaaatagaaatatcttcagtcgaattttgttcagtattttttaggaaagaagttgaagaataattcttttatacattaaacattaatcaaatttatatcgatttaaataaaatttaatttaaatatatattcttttataagtataatatatccaaattactctcacatcctcacatcaagacacaatttcaaacataatagattgtgttctttgcagattgatgtgtaggtttgtgaaaaaattaagacaaaattttggttaaagaagaatagagactatcgtgataaaggtaaaattagtagaatgattgaaaaaaaaaataaacataataaattttgaaataaaaagtaaaaattaaatacatcaattttaaagagatatatagtgtaatttttttttagggtacgattagattagaaactgggctacaattacacagtagggttctaaagtgaggataaaggaagttatatatagctgttatgtttaatatttttttttttatataattgggctggagtatatatatatatatatataattatgattttattttgcaaaatatagagttaggccgaaacttttataaaaaaacaaattcaaattgattttttctttcctttttctatataagaaaataataataacaatagtgtactatatatttaaacatacacaaacagtaactagaaatatatatacatacatatatagcagggaatgggtttttaataacttctttatataaatgatttgtaaacacgagctatagtatataggtttggcagagaagccagttatatataaatatatagatatatatatatatataaatatatcagaacacagagaagatccagtagtgataatcaaataagggagataggaataattgtagaagaaagttacgttacatgtgcatattataccatagatgatgtaatttcagtatatgaatagtctcaaaatatcattttcttcataaatgttattatattttgtcgttttcatatcaagtgtctcatttggtggtacagtatatatagtagtgtttaatcatcaatttcttccagttttgcaattaatgaatatagatgtatatatatagttttaaattttaattaatttttgttttcttgtgtacatattctttttgttgaataataaataaattatctatatctttatatagatataaccaaatagtaatatagtactatactatacaactgtgtttagggttaactagggtttgggaccattgggctgaacactgtataacccatatgttattatttatatatatatatatgaaaaattcaaaatgtaatgggcaagttatatagccttggattgagagtccattaattgaattattagtttcatcacccttatatgggttggtagctagggttcaattttggaggaaatgccaaagaatatttacaatattatatatacatatgtgttatatatgtattaattatataataataataattaattaa

SEQ ID NO: 121475 - DNA, 1757 bp, Cannabis sativa
  modified_base (39)..(57): a, c, t, g, unknown or other
  modified_base (1721)..(1731): a, c, t, g, unknown or other
tagtttaagtaggattataatcctactctaatactcacnnnnnnnnnnnnnnnnnnnaatatgtccaattaaaatatcaatatatttttcgggatatcacacccatggacgttcaaaaatgctcctttgatttttgagagattgaaaactggggatattctgcgggctttgcgattgcatcatctcaaaatctgggttcagttgcacgatattcaggcgggttttaagacggaaagggtggttttggacgctgcgaactatatcagaagttttgttaaagccgacgagaataacttcaatggtgtttggagggagtatctcagggttcgggttcagattgatattgagaagccattaaaaaggcgaatgaagctgcaattaacaagaggtgagtggttttggataaattttcattatgagtttgtgcctacattttgctttatttgtggaattataggccacaccgatcaatattgcttctttccattgtcaaaccatatggttcattcatgaaggctgtccctcggaggacacagtacgcaatgggatcaaaatggctccgatcggcttctggtggtgctgggaattttggtgctccggtggatgttcagccggcaagagtaagggaggttgatgtccctgattttcgggttggtcagcaaggtgtttttcctaatatcatgggtcaagggttgatgcatggtaatagggattcggttggtggccatgcaagatatgtgggaataaatgccgtgaatagtagtggaagtgatggaggaaataatttaggaagtgaaggacaaaatgaggtggcatctgatttggaaatagatgaggaagggatgttttttcttgatactaaaagaaaaagaatgggcaagaagatttctattgggccgaatgggcctagggagcaaagtagtgtgattttgggccaggaaaagggtgctcaatcaaaaaacaattcaatggcgggctcgttcgatcgggttcgtcaatcattatgagtatattgagctggaattgccatgggcttgggaacccaaggacttttcaattccttaaagatacggtttatcaaaagaaacccacttttatttttctttgtgaaactttaagcttgaaacctcggttggcgttaatttcttctcaacttgggtatgaaggtatgttatcggtggatgcgcaaggagtggtggtttagctatgttgtggaaagagcaaactgaagctgaggttagacgtttttctcagaaccacattgatttgattgttcatcataataatttatttgattggaggctcacgggtgtttatggtgaaccaaatcgggctcttagaagaaatacttggaaccttatgcaaactttgaaagaagaattggctcttccttggtgtattattggtgatttcaataatgtgttgagtcaagtggataaacgtggtggaaatccctatccaaattcgctttttgaaggttttcaacaagcggttgctgattgtgatttaatggatttggagttggttggtcatcagttcacttgggagaagggcagggattcagataattttattgaggtccgtttggatagagctcttgccaattcggattggattgctttatttcaaagttctcggctacttaatctcatgttcaccacttctgatcattgtcctttgcttcttgacccttcttttttttggaaatattttaccaggannnnnnnnnnntaccatgtatgtttcattaacatcct

SEQ ID NO: 121476 - DNA, 871 bp, Cannabis sativa
tttctctctctcatttgcatttaagtttggcggctccttctaatcaacatttaatacctctggccaatatttcctctcttcgattttcgaatcgtttttctatttctaaatcaaccgtcatcttgctgctctccctctctaaaccaaagatcatcattactcttcagcgtcgattccagaccgtctctcccagctgtgaaatgatggttcagacacttctccactcctcgaggcgacccttcttctccaggtattgctctcttttctttctccccattctcacttatatatttgccgtttccatatttctttgcacatctgtattaaactttgctgaaaatccatcctttcttacctaccactttgctatggcttcctcttcaaccaaccccaaccccatttctgctcttgacgatgaagatagtcttgttcatgatttcgaccacatttctatccactcctccacggatactgatgctttctgcttgattttcaagctcttatctcccaaaccagctaaaccttcctggattgaaaaagccatgactgaagcttggaccctacgttttccctgtcaaatttctgagtatcactctgggctttaccttgctactttccaatgtgatggagatagacgccgtgtgcttgaagagcagccgtggcactttgacaagttcttgatggtcttcacccatccggatgtctctccaacaccgactcctgactctgttcgatactccccgttttgggttcaagttcatcgcattccgtttggccgtaaaagtccccaacttgctcagtttattgctgacgaaattggtgatcttctggaaatcttccctcttttcttagtggaaaactttggacctta

SEQ ID NO: 121477 - DNA, 1592 bp, Cannabis sativa
tctccgttccggtaagccggtgcttcacgaaaataggaaatgtcggcgaaaggtttacgaacgacgccgtgtcgaatggcggctgaaactagggctagactggggaagagtagaagagacaggaggccgaggtggaggtggtggtggagtgagagaggaggagctggttgggagctcccattggccatcctgcccttaatgggtagggattggattagtgtttagggggttatggatgaagttgcagagccatagttagggcttgttggttatgagatggtttagggaaaagaaagtttgaaaactaatattgattggatgcaaagaaagttgggttggttggattgtgaggtagagaaaattattcggaaagtgaaaaaatagattgatgtatacatagatatacattattagtttgactcaatttagaatagaattctatatcaatatcataactctattgttctaaatttaggttctgatttttttagaggacttgtggataattgtttttgttgttgttttttttttctttcactgttccatgttttgtgccactttattagaagaaaataatgcaactttttgtatatgcccacaaaagtttttgcaattaagatacatgttttcgtatttattgaggccaactactagaaaataagaacaacactaatgtataacaagtttgtacactttcttttccggggaaaaatttcccagaaagaaccagatttctcagcatggtgaaaaataattacctcaattttggttgccatgcaattttctattccaatttgtcattgtatgttttcttcatatgcaaagaattaaatattgctattttgagtccactgaaagtactagaaactcaaaagtgattgacatctttatttgtaattgttattgtttgagcagtgaagttaggtttcttgaggtatgaattttggctccaagtatgggtattcatttaaagtggctttcatacgagttatactgactgatcaattcagtactttatttctttgaaaaaccattttatttataaatgatttgaacagataatattttacccatttctattagttttgtatttattcaatttttgtattaattctattgaaacgactatcgtacattaatgctaaacactaaacataagatgttcatcacttctgcattgattaatgtttacctccttaatgcccttgcttgatttggtatgcatattttgattataagaaaggcttgatatcctttctaatagaaaaaaaaaatacttgatatttttatctttatattaaaactagaaaatgaaaccgtgcgctggatgtataataattttgaatttatatctatatatatttaaataattatatattttttaacaaaaaaaattatatatataatagaaatttttacactaaaaatacaaaatacatattttattactaaaatactaccacatggttaaatctacatttttactcttcaactttattctattacaattttaccacttacacacacatttcatgcatgcatcactacatgtcaatagactatgacctctatcaatcaatcatccatcattt

SEQ ID NO: 121478 - DNA, 3229 bp, Cannabis sativa
  modified_base (1626)..(1627): a, c, t, g, unknown or other
tggcagctaggttttctttgaaggagaaaagaatggttttatattgcaattaaatgcaatagggttttgaaaaaggaaatctgactttgaaaaaagggaatattccttttagatccgcacaaagagggaaggacgaatttacccttaatttatgactgttggggtgttgtgtgtaggggtaatttcgggttgcatttatttcctacaaaatacttaaagtaaaataatgaataataaaataaaaacactgtatatgtaaagacacatagaaaattatagatggttaagtcaaaactcgatctttttagtccacttttataagagatttgtgattattcttatttcgagttggattactcatttatatagaaagcaagtgatcctttagattacatagtcggttagacaagatcgttacatcattaattacattttaattaagatgaaaaacatttacaaaataaatgaaagaccaatttcgatcgttcttagttatatttttaagagtcgcatattaatcgttcgttttcctcaacaacatatgaacttgcgggtttcctgatattactcacatataaagtcttaggaccaactttgaggtaatttataaggtaaaacacatgcaattatatgggtcatgtatcagttgtttcatctactgacaacatagaactcctgagttcaagatgagttatcacatatattggtcattcggactagacgtttttaaagatgcaatcttttcatgggacgcaagagagaatcattaggtcctcatatataatcaatatatgcgtgatttatgataacttcttttggtctcgcttttacttcactatgatgcacatagtctgcgactagatcctgtctcggtcacaccttctcgcaagtttctatcatgcgaggatagttttactagagcagttattaacacatcatccttttttaattgggaatcgagtccacgtgtcaagtatataccaaactatgctcgtatttctagacataaaattaatactataacaattatcataatttttttagggtgataagtccatatttatcttataaatatgaataattaatgagttaatattttaaaattaattccttagacgattgacagtgtgatttttactttttaggacttttatgaaggctaattatgcattgggagacatttgaagaattttttacacattttggtagaaaatagtagaagtcagggagcttggtttgactaaactgaacgtaattgcaaatttaaacaactttaaaggaacaattggaattggagctcaacatgacatttgtagatctcattcttagatttttagaatattttcaattgtccaattccaagttgtattgaatgagttatgactaaaatactgatctgaccatgcggcacaaactttccagcaacgaccgctccaccggcagttgaagaggaggaagagaaaagaaaaacaattggcaaaggaagtaagggataatagggcggtgcccaatgcacatgcagctccaactgcagggtcttctaattcaataatttgataaagcacaccactgttttaatctttgaattgtaattataattgtaattgttttttttttttatttttnnttttttttatatatataaatactagatgtatgaattgtaagtttgttttttttttttttttgcatgctacttaatttagagagttttaggtttaaagatacaaatatatggatgatgtgaaattaggtgttgaatgttttattttaggtaggttaagtgaacatcatgagcataatgacaggtctattttataatgaacttagaaattggggcaaacatttgactatattttattaaatttgtaactcattttttttttacataattttatgatttcaactacagaaaagtaaaaataattacaatacacattaatacaaatctaaaagtttgattatttttattttcaggaacatgaacatttggactactgtcaacaaaacattcattgtagcgagcttcatctatgtttgttaagttagaatcttcaggcagctccaacatagatgagagttcaacaacttttaatgtcatagatgaaagttcagcttccaactttcctcttttttcaacaaacttggtataactactgcaacacgttcacacataagggtcataccacactcaaaatttacacccaccacttgatgtgaaaacaaaactagacaaaatattacttcttgggaaaaaaaacaagatgaaaaagagaagaaaatttttgaaaaaaatacaaacttacattatacaaaggacatctcacaaatcttctacctgagtttgcattagtccaagaggtgaagatcatagctctctatgggggactacaatgatatttcacagtcacataagccattttcttcccccttctttgtgtttctcttcttcttttcttcgtctcctttgtctttctcttctttatatttctcttctttttcatctccttcgtgctcctcctctgattattcttcgttgatatagccctaaaaattaggttattgattccttcatgctcctcctctctttgttcttcactgatatagagctattttttctcttcttgtcttcgtctccttctgttcttctcgcctttctcctcttctcttcttcctttgtctcctccctggtattctttcttctttttttctttcttttttttttcttcttcttttgtactttggtttttcttctttctccaagctagttttagttttaattttgatttataatttaggttattgattagttcaagttttagtttctactataaagtttttatctagattaattatttagtttttatttttatatttaaagttttggtaaatgtggccatgttgggcaatttttaaatgatttgtcattaccacgtaaacaaaataaaaagttaatgaggctggagaaacgacaccttaaaaatacaaacgaactagtactctaaagaattttcctattgaaatttgaagttgaaaagctaattataagtgaattgagagtttcaaaatttaaccgccaaaaattctcaaaatatattactatattaaatgttttggaggtaagttcaatttcttaatatttaataaaaatatttatttcaataaaagttatatatctatctatatctatatctatatataaaggaaagcattagagaggttaggtggc

SEQ ID NO: 121479 - DNA, 1702 bp, Cannabis sativa
tttatgccaaaaatagaattaacattcgcaaatattcatttttgatttcaaagatttcttataatttaatccataacaattttcatattgaacccacaaatgtttatagttttgagttacatctaaattattagaactttctcttatagttaaatcactcttatccatactagttattatagaggaactctcgctttcacttatgttttggctatatcgattttcaagaccggagctatcaaccactcgaccatccctccaaaagaaaatttttattttatttttttttattaaatatgacatagcgatataaatggatatttttagtatattatagaaatatatcgagtatgaattcttctattatcctcttatataatttaggggtctctcgatttgatgaatattccattccaatcaaaattttatttcgtaaaaggaatttaactctttttttctcaataaaaaatttgatggaaactatatattctcgtgatttgtatccgagaggcaattataaattgaaaaattagattgtaaaattaccagaataattttaaaaatttgattactacttccaatccaattgaattaagtatgagtaacatggataaaagagacaaaacaattagggctctaaaagttgggggttttacaaaaccctcttcttctctctctatttctctctattcagtacttctatgtattcttcacaaaggccattttcccgccttcaactctccacatttcattcggtatcacactgattctctctgtctcttaggttttcgtcatttttgcaagtggaactgggagaggtccaaaaattctcagccatggtctcaacgaaggagctcctctctatcattgaatcgtctcttttgggtccgtcgcctccctccccagcccaaagggttgagcttcttcacgccgttcgtgcttctcttcccgcatttcagacccttctctcatacccagtacgctctctccttttcgttcaaatgtctctctttagtttccgggaaaacgcggcacttctttcttatttcaaatttatattaagctttgattacagaagtacttttactttttcctttcataaatgctacttcttttcgtctttattagtgggatttttttgttgtttctgtagcctccaaagccctctgatcgagctcaagttcagtctaaagaagttaggcttccggattcaccaccaatttcgcttgatgaccaagatgtccagattgtaagttcatgaactgttactatatgtttggttgcttagaaaatgaatgcacggccaatttagaatgcattctgcctgtaattaatgtttatttgagatttgacgcttaagctagtccaaatagctgagttggactcggtttggtgaaatgtcccccgtctcctagttttgttaattgaattgtttttgacgatgcggttttagcatcggtaattgcttatgacgattcactaatctgccgtactgtttgaaacttcttcacgggcctggtgctttgttaaatttttaatacatgttcaaggacatggtgataaagctctgataactaaataacttatggattgtacatttttaagtgtgtatcctctagctttttaagttaatcaatttgtattccagtccattaatagtagaaattctttagtaagatttttagtccttattttcatatag

SEQ ID NO: 121480 - DNA, 1224 bp, Cannabis sativa
taaaataactttttttaaaaaaaacaaattcatatttgttgtgaaaacagggcctcggcaagaacacaatgatgcaagaaagatcaatgaaaccaatagacaaatatcacaattatgcaataaggattaaaccagaaatgactagcatagaaaaacataaagaacacaatgtatttacgaggttcgaacaagataatgtaacattaccttgcctacatcctcggccagaaacaaccacaataatagttttgagagtctttattgattgagcttcaacttgagagattacaatagaaacaaattacacaaaactaggaagtaatactacagcaatccttcagcatttgcttcctctaatggcagtgatcatcgacacaatgtcactccaattacaacactcatggcacttcactctctctttctttctccatcccttgaactctcttttgactctctgattatgtttttccaagtcaatctctaggttgaatgagaagacctcttaaatgctgatgatgcagcctgatgcaaggtacccgaacaccaactgtcataactgacagttggttaagttagttaagttcggtaaagggtacaagagtcatttgatgtttggccaactacattaacaatatttttatacagaaagtatacaaagtcatcaaatttgtaattttctcttactcaaaaaaaactgtatttttcctaaggctcgataaaagtcggggcctacactaaacctatcttgatcttcaaatatatagttgaactaattagggaacaatacctttttctttttgctggagaaatcaactctattaaaaaccagaaaaccagggagacaacacatggccacaagaggggccaagtcctcagcatttagaaaaccagaaaaggagttacaaaacgctcactgagcaaggagatcagcctccagcggctgatttgattaaaaattcacagccaaagccaaagccaagtaggactaatatggtcatgaaaggcacggttgcgagcagtccacaacgcatcaaacaagtagataccaaatctaacaaattcaccaaaatcatcttcatcagccccctgtaaaaaatcaggggataagagccactccatcatgtttcgaggggagtcaaaacgaagtgaatcacttctaagagcccaacggctggcaaaccacacagctttagcaagaggacacttaaaaaacagatgttgagc

SEQ ID NO: 121481 - DNA, 680 bp, Cannabis sativa
agtgaggagttgtttgcatagctagctttgccaataccactattcatgggaaaaacttgttctaccttcattttctttttctaatttgatgtaagaattgtgagaaaactaataagactatttataatagagcattgtctgattatttaattattaccacctaaaaattatatctgatggaataattaaatagaatttataacatgtgcattgcatgacaactaattttgaagccatatatattggactaaaataatatttataatagataagagaataataagcatgtgaaaccatgcatatacaataattaatttgcctactagaataatcattacaaatttaaaacaatccatttttgttatgatatcaaattaattttcagtccaataaagaattctgaattattatataattttcaatgtgtatattataatattgaaaaaagacccaaataggtctatacatttgtaggtgtggacttattatcacatttctccataaaactaggtatcgtatattaaataatttctcagatgagatgatattcgaatttatgagaaagataaagcttcaggtgcacagtaatttgtttatttataattagaaaaatacttgttatgactgaaactaaggtgtcgtttggtaacacttttgttttttaatcacaaaatgaaagt

SEQ ID NO: 121482 - DNA, 1037 bp, Cannabis sativa
  modified_base (995)..(1011): a, c, t, g, unknown or other
aaataattactgaaatagtaaaattgaatgaaattagataaaagtcctcaaaaccaacaatctcaatagttcaaaggacatttttaacgaccttaaaagttcaacttatcaatgcaaactgaacagagtgatgaatacaacaaactcactagtctacaaaagttgcagactaaagagtgagaggcctttatttatagattagagattacaaggatacaagtgtaaagaaaaggttcattgaaaatagttaattgttacaacaaaacagttaagaaaaacagaaacaactaactaacaaagattaatagttggtgactgtattatcccccctcaaacgaaagagtgtgttacacacatagagtttggattttagataattgaatcgatccttggacaaggcctttgtaagtatatcgatagtctagtcaatggatggaacataacgaacattcaattgtcctgcaagtaattagtctcaaacaaaatggagatcgatttctatatatttcaatcgagcatgaaaaacaggatttgctacaagaggggcagcaccttgattgtccacccaaattattggtgtagctggtaaagacactttaagtttggattgaattgaggacaaccactttatttcagctactgtattggccaaagaacgacactcactttctatgctgctacgagtaacaacatgttgcttttttgcaaatcatgaaaagagattttcaccaagaaatatggcatatcccctaatggaccttctgtcatcagggcagctggcccaatcagcatcagagtacccttaaagtgaaagcctcaggcatagtttgatgtgtaatccctcatgaattgtccctgttaagtatctgaataatcgtttgcaagcctcctaacgcacagttgttggtgcatgaataaactggctgagttggtttacaataaaagcaacatcagacctagtgagtcttagatagggttgttcatccgatccaatnnnnnnnnnnnnnnnnnaacaacatccaatccgcactaagtgc

SEQ ID NO: 121483 - DNA, 1080 bp, Cannabis sativa
gcgcccgccgacgacaatggctcgaccatcgggcaagacttggttcgtagcgtaccatcttcggtccgtgaggttaaggctaaccagctcagcccagtcgcaaacaacattatcttgacaaggcgtgaagatacggatttttcttattccgtcgccgtagccgcctgtctgaattagggtgccgtcggggttgacgaagccggaggagcaccaggtgttggtgtggagcgtgaggggacggacggtgtttgaaatgatgtcatacgagacggaatgagcggtgcagtcgattttgtcgtttaaggtgcggcggacgcatctgcggttggggagggaaagattggaagggccgacttctaagccgtcgaagatgatgaccttgtcgttttttagaagctgcatgtgcatggcagagattccgatgctggaatgaagaagaacccagtgacctccggagagcttcgaccacgaaaccttaaagagacaaagaagtagggctagatggaagaagaacgaagggttcttgaacgccatggaggacgtacctagcttaattatcttgggagctttcgttaatgtaacgatattgaacgcatgcaagtcctcttatttttctctttttattacactctacctctatcggagttattaacagtgttgaaaatgaactcatcaagtacttatacgacatgaattaacatgttagaatattgtcgtttcttgatgacaatacgttgtcgtttatttaatatactaatacctctcaaaattataaagatatcatttaacatatgaataaaaatgtaaataggaatagaaatagaaattaaatagaattatttaaaatgtatacaaaaacttgattaaaaattattaaattttttcttattttttcaaaattatagagaagtcattagggccattggaaaagctaaaagctgctttcaaaaaagctgtgacaaaaagatgtttggtaaagagttaaaaaacagcttattgaagaatttatggaaaagctacacctaaaagctaaagctctgttttgattaaaagactctataataaattatttttactaaa

SEQ ID NO: 121484 - DNA, 663 bp, Cannabis sativa
aaaaaaaaaaaaaaagaattgcataatagctatagcgtatccctgtatgacctaaaatgccaatgtagaacaccatacaaaacagagagaataacctgaaaatctcaaacaaccagacaaagtttccatcatctctctgtatgtagggctgcataaaaattacatgtttcaagtagaaaactcaattggggctctttctttcattccccacacacagtttacaacaatttcatgtaaatgtcacaataaaaaactaatgcatgctcttctactgagcaacaaaacacaggttcatttaattgctaaaacactgatcagagaatataaataaaatgaaatgaaatctacagggaatgaagccgtacctgtgactgtgagtaaagaaattgtttattcaatggtaaagaagcaagttggagctatactcgaacggaattcttcctcggttgataatctttatagggtaacggtcgagagatggaataacacagagagaggattggtgatggagacaaaagctatgatgcgttttattatgactagacgatgctaatatcagccctcttgctctgcttcctctccctctctttatgcccttcccttcaatcgtttttttgaagcagtaattaagtatcgacttttgaagaaaatcgatgggtgaag

SEQ ID NO: 121485 - DNA, 1133 bp, Cannabis sativa
gctagttttagtccagcgattagagcctcgtattcggcttcgttgttagatgccttgaatccgaacttgactgtagcgtgcaagtgttgcccccagacgtgacgagggcaattcctacactagatagttgatctgttgtcgacccatccacatgtagtttccaagtcggtttttctccattattacttggctgaggtactggctcgacgttgctttctggtatgctttcttttttgcatgtgcattctaccacaaagtcggccaagacctggcctttgattgttgttcggcgttggaagttgattttgtactgacccaattctaccgcccacttgagtaaccgtccagaagcatctggcctttgcaatatttgtcgtataggggaggaagataccagtttcgatgatagtgctgccttgtaggccggttattatcagggaaagtttcagactttcagatctttaaaaacattatggaggatttatggaaaaaaggtaaagggattacaataaaaattcttgatcaaaatagatttttatttcaatttgatcatgagatagacgttcaacaagtgattgatggcagtccgtggacttatgatagaaaacaatttcttcttgaaagactgaaaccgggtaaaaatcctagaatggtagctttgaatactattgatatgtgggtacaaatccatgatttgaggccgggattcaaaactgactgggcccttcgagaagcaacccgatatattggtacatttgttatttttgatccaaataactttcaaggagtgtggtgtgattacttacgtgtgcgtgttaagatcaatgtggctgaaccacttaaaaggcgaatgaagtttcgtagccgaaatggtgactagttttatgcatacttcaagtatgaacgggtgtccaatttttgtctcatctgtggaatcatgggccatgctgagaagttttgtgataaagtctatgatatacctgctgatcatattgtaaaaccatatagcctagacatgaaagctcctttgagaagacaaagtttcttgactgcttctccgtggttgcgctccggcaaggtagaccaccgtgaggtacaccaggaagcaaatccgtgttggaaattattttacc

SEQ ID NO: 121486 - DNA, 544 bp, Cannabis sativa
tttaataaatattatagaaaattgttgacgacatagtggtgatatcttgttgcaaagctcaaacatgtaaggctagaagtaataggcaaaaagtgtaataggatttgctattgcccaaggagaggagaaaaatctcatctaggagtacatgcccaacaaccacatgaggctagctcaagtggtcatagagggtgcgtgtgttgaaggttctgaattcgagtgtcaaattatgtatggttgtaatatataaacgcttaaataataaaaaaaaattacatgtccaataaaagttggtttagacttgtttcttttgctaatttcgttcttctatataatggtttttctattttgggtcatataagaaagaacaaaatatatatatatatatttttataagtaaagcttgtccttgtttgtaagctatcactttagtatattggtagttaaatctagacccaaaacaaaaatataattattttaaaaatacacaaaaataataaaaaaaattacaaataaataattgtaagaaattttaaatattttt

SEQ ID NO: 121487 - DNA, 929 bp, Cannabis sativa
atggtatttacccaaataataattatgcttaattattaaaaaaaattaaataatttttaaaaattacttttaatacatttttagaattttttcgtattattctatgttcattttaatatttattttaattttatttttagaatttttttaaatcatgcatatattttttatttttttttaaagaattatataattttttattttaatttttgttacaatatttaaaatataatttatttttatttgataaatatatttttttaaaaaatataaataaaaaaaattaaaaaatttaatgtaattaaatatataaattttatataaaataaaaattatttaaataaggtgctttaaaagtttttaaagtgtaaataattttttttaaataaaaaaattaataagattttgctccacttgacggaatggtttggttggttggcttggcttggcttggctatgcttcttggctgcacgtgattgacagcatgtcaattaattggctttcacctgatgttgacgcgtgattttctaattttcttttaaaattagtttggctcaagtcaatgtaggagtggcaaaatgtgtcatcgtgtcgtgtttgtatcatattttatgtgatttggttttatatttcgtttcaagtgtgtcggcctattttttaactcgtgtctaattatttcaaccataacccaacccgtaaaaaatcgtatcgtgttcgtgtcgacccactatgactcgttttgttattattgaagctggaattgtagaaaaaaataatagatttaagcttccttaaaaaacttatatacatgtatatataggttgttatatatataataaaaattaaaaaagttaaaatatttttaatttcatgttaaagaaaattaaatttaaaattttttaacttaacattgaatcactaaatatat

SEQ ID NO: 121488 - DNA, 1160 bp, Cannabis sativa
aatagaaattttatcatgatgtatgttatttgatgaaaaataggaaaataataaaaaaaataattctataaatataataaaaggtaaatgagaaaaaagtttttcactttcacaatttaaatgagatttttttttttttaacttttatgaaattttatataacaaccaacgaatcaaacctaaatcgcaatcaaaattcacatagaactacataaaaacaccggagcaacccaaatagtaaatttgaaaaaaaaaattaaaaataatatatgaggtaattcattaaaacaaatgactggagaagagaaaattaatcatatacaatttaaagaggcaagttgtaatataaacggtataaagaaaatgaaggaagacctcgatatatgcaaagtcgtcccagtatatcattaagattagagaaaaagattatatatagttttaattaatacgttaaaataaccacttgaggctagttcaagtagtcataagaaagtgaatgtgtgttggaatttcttcgagtcttaagttatgcaatataatatataaatatttaaatgaaaaaaattatgttgaatttaaacaatttctttattactagtcaatacaaagaagaggaagcaaacctctttaatatctctttcaaaatgatatgtaatgtgtttacattcgatttagataataaatcattgaattgtgagaggaacaagggtttggtgaggaggtcaacaaggttgagcttggtggagacatggagtagtttgagtatcccagcttggagattcttgcggattatgtggcaatcgatttcaacgtacttggtacgtttgtggaattaatactggattttctgatatgtggattgctgcagtattatcacagtagagattgatagagagccgatgaattatggggaagtcttgtaggagagttgtgatccaagtgacttcgcatgtggcattggccatggcgcaatattcgacttctgcagagaaacgagacagagtggcttgtttttttgatttttaggatatgagacaatcacctaagaagatgcagtagcccatgattgatcttcgggtgttagggcatgtgccccaatccacatctaagaatgttacgaattttatggttactacgcaagtgtacgcaatcaagtagta

SEQ ID NO: 121489 - DNA, 2252 bp, Cannabis sativa
attttaaaaggagaaaattttttttgggcctcgcttaggtgggccctaggcacatgcctagcccgcctatgcccagggctgagcctgaatataatcttcatcccagtctcgttccccatttagatgggaaattcccgtctcattagaggcgagtcctcacagggcccatccccataggaaaatgtgtatctctaaccgttacgccaatactatttaatgtttagaatagtataaataaatatataattattacgtttaggaagaaaaaaatgtgtataattattacattctttttataaataaataaataattcgggcccctaaggcaggaggccctaggcacgagcctacccctaaaatcgatcctaggtataactagtaagaagatctcaaatagaaatagagtgataaatttgtgatgcaatgcaatattacaatatttttacaaaaaaaatgcttcactatttgtgtgatgaaagttgtgtggaatattttgaaaattgagacattaaaaattggtacatcattaagttcataatttttatttagaatattgtgatttaatattaatgaatgatttcaatacacatttttaattacaatattactattattttttacaaaaaaaaatatatatatacatttaatttattaaatatcattaataattaataaatacataaataatcattaggatcctataataagaattgagcccaattggattttctttatgggatattttcataattacccgaaaaaaaataaaacctatatattataaaaatacagatctataatatttttaatatttttaagaatttgatatttttttgtcaaaaatacaaattgttgtttttacgttgtttaagaaactatgttgtttgcacgctattttcttattgctgctgtttacagagattttcaaaaaataaatatgtaatattatagctaaagaaaatacgattaaaagtataaaaaatgaatggaacactcagaatttttacgagattggagcgttaatgagccttagttcacgtgtctgtattattatgagataggttagaaaagcctaaaggattacaatgaatataaagactctattctcttctcaagcttatgagttaagaaattctagccctttgcatgaagaatttagtgtgtatttatagagtaatagaagtcatacttagctaccttttccctctaatggggtgtttacagataataaattactttaggcttatcaagtgaagcccagtccatgaggcagtgactgtctgctaacttcgcatgttgatcacggtcacagctgttgttagcgtgtcctattattatgggtaattaattatatattaattacttgatcttcaattatgttgtttcctattttagcttgatattattctctgtctgagatttgaggaaagtgatttccttattctacacgaatcagtaaataagaaactccaattggcttctaggtacatgctgaaggattcttctagatacacggagctaatatccttccagattcagaccaaccttgatggaagctcgcttgagcgagaagtgtgattgctttcccagaaggccaagttagtgttaggctcaacctagttcgtgtccttttgggccaactgatgggccttgacttctatttagaatcaacgtgtcccttgttagaaacacgaataacatttaccccaagcttctggaatattgtggattgcggaagcttacttcaatctatacaagtggacaggtggaggctaaaggtgaaacctttataaatttcaaatgttttatgtgaatggaagatatctttccattctttgaacttcagctttacgtggtatttgttgggattttatgtcctacataaaacctatttcaatataatcttatttgctattaataaaagattagaaattatttaagtttacatgtagtttttatgattatggttttaatatacaaattctattaaatttagaacatatagttattcacaattacagtgaggtcatcacagtggaaagtaattgtgattatatgtttcaaagttcttagtcccatgatttatcagtgcactagatttacactgatgtgataatcagagataaaatttacttacactaagtagaatgttctttccagggtattagtaaagtatactagtatcagatgtatagagtatacattggactgaatcgatattaacagtagaaaaaatatcataaacttatcgt

SEQ ID NO: 121490 - DNA, 2511 bp, Cannabis sativa
tgttaataaacatacttgtgagtcgatctaagatcctggtaaaataattccaacatatctcacatgcttcatattttcctttgataacacaattagcagttcctcagtcttgtgtttcttagaagattttggagcaaaaactgactgctcattcttaacttcccttacttatctcttctggtcattgttatattctccaatgagatgtggccctcccgagataactagaatgtcctctccttcaaggggaggagtttgtagtccctggttgcctgggttaatgggcagatttggctaattatgtccatcaccttgtggtttcatatattgccagaagtaacccgcgtgataaggctttctatctcgtctttcaaatgacgacattcttctgtcgtatgcccaatgtccttgtgatacttacaaaaaatttttgcatctcttttatgtctcgcatgcctcacgggctcaggtttatggaatgtgaccctgtgctcatgtgcgagatagatattttcccgagtttcattaacctcggtataaatagtgtagattggaacgtacttttcgtgcttcttctatttttccttgtctttagctaattccttagagccatctttcctcttagagcctcctagattgtcatcctttgtcgagatggtgcttgtcgagaagtgttgggtttatctctcgagccagtctttaacaactctattgctttcctcgcttcctcttttcgaacaaacacctgagccctctcattgaactcgttgatgcttttcactgagcaaccctgcaagtcatcccacagctcgcctccagcagttgagaggtcagtcgtgatccctgcttggagagcggtaagctagatactgtcattcaagtttctaaccctcgtagtagctatgctgaaatgacttaaataggccttaagtgtctcgcttggctgctattctatgttagttagggaagacgcttcaggtcgcctatcccttgttgcctggaactatttcttaaagtctttagacagctgttcccaagaggtagtcgagtggagggtgaatctgttaaaccagctgctcgctgccccaacaagtgaggtagggaataaaataaaatgcacattattcgtaacattgctaactcgcatgattgtgttaaaattgttgaggtgagcaacaagatctgtagtcccatcgtatgacgagacgtgggggtttttgaatccctaggggaattcaatggtcataatttctgggtggaaaggctccggctccacgtccgagtcttaaccaggtagtttcccgaattccccatcttggtatctcgtgaacttgtcctccaactcgatgattcagaattggataggattgcttttgatcgagtttttagcgtaagtcaggcttcttccgatttagttgattacgaagatctggcggttatggatcatagttgcttacaaacctcgtcctcgagtaactttctgttctagttgtgcccgtactctctcgatcagtactacaatgagttctatcccctcctcgcgtatatcgactatgggtccttatacgtcccgagcaagaacttgcctcgtcacgtaccgaccttctcttttaggaacgcgttgatacatgccttctgctaggatttgtatgtgccctttctctattagtttcagaaggacattgacagtgtctcggtggcaacccacctgccctagattaagttccaggatctctctcgttgccacgagggatttcctattccctagtctgaggttgcctcctgctcgcattcctacaataagattttggtaaatcacgatttccattcccctaggttgttaatacccagggtctccgaggcacttcttaattatgtgcctagtcattcggttgctcatcttcaggggcatcctaaatttcctaaggttgttctttctaagcgttctgagggtacccctgagctgtctcctgcctcctggttcgtgagccgtgaggtctgcctcgtggcctccttactccaagattaggttggttttgagcattgtcttcttgagccgccctggcttcagctgcctcccgttccaactcagcatttcgttggtttgcgccctccaaatgtcgcttgagttggcaatattccaactccaccagtgctacgtatttagtgggatcataagcatcctcctccccatatacatatccacagcttcaatattagtttcctcattcccagtttctgggttttggtcaccttcacgttggcttctcctcaaacgtgttgaccatgtagattgtgttgtccaagaattaggaggcctccgtgagcccgtcggctcttttccagcatgatgagtagtctcttcaagttgattgttatctttttccctgttatcagccatgaagtaaattttctatcacttaggagggatttttttgaggttttttcatgtagactctcaatgaaagcaccaaactgttaacgcagatttttgttaacaataataagcct

SEQ ID NO: 121491 - DNA, 1364 bp, Cannabis sativa
gtgaagttgattcggggttgtgttcttcagccgaagtagcgggaactcgtaacacgaagaagcgtggatttcatgtaagtggaaatggaatcaagagtttagaaatcatgaatgacaattgattaaactaaggttgtctcacttatgattttgtttataatttttgtaacactcccatcagcatcgtacaaaacaaaaaaagaaaaacgttgtgttgggtaatttttgtctgggatttctatataattaccgaaatctcagattcaatggtagcattttaatttaattttggacacagtgaactttgtttagtatgtgtagttagacaaaatgcaattcaatggtatcataatggcttaggaattcttttgggaaattttcaataatatatttaaaatataaattatttacaaaaataccttaacaaatcttaattacaataatactttgtcacgtcattaaaaaatactttaattttaaaataatatgtcaaacgaatttaattctaaatctatttttttttatgatgttgataagaaactaaattgttacttttacataaaaaaaaaagttaaatttttaaattatataatttgatatacaatttggttacctttaaaattttatttgtaaattttattttgagttatattgtactatcttattatttaaaatacatttgggtaactttaaagtttattttcaaaactaatgagttttcgtataatttaataagctactatttttatttgccaattcttttatatactttttttgttactttaaaacttatgtgtttatttttagattatattaaattaatttgttattttaaatattttaacgttacttactttttattttacttttataaaaatatttatgttactttcaagtctatttaataaactaataagcatatgtatgaaatagttttatttagtatactttatagtaatatttaaattaattatgattttgataatataccaattggttacttttcataaaatgattcactttaaataaatatttctggtagataatctttaatttttagattaattattttaaactatatactcatttttagtttatattatcttcatttatgttatattatagtatcttattatttaaaatacatttgagtaaccttcaaatttattttcaaaactaatgagttgtcatgcggtcatttgacatgtaagaaaactatatatttttttatcgtcaccataataaaatgtaactatttagttgcttatgatacataaaatgaaacttagaagtaactatgaagttacttttctacacacacaacataaaataatttattcttttattaatatgcattatttatt

SEQ ID NO: 121492 - DNA, 972 bp, Cannabis sativa
tacaaatccttctcgtctaaagagttgcaagtagagaggcttgtgactactaagaacctccgagaagtaggcctcattgccccacaataggacgtggcccacctttttgtgaaggacacagtcaaagatgctctgtcaggggacatagacgaggttaaagaggctatcacaattataactgttgaagaggctctaaaggcagtgaaagccgatgagcaatgggtgacatattatggacacaattcctagaaaacctaaacgaggctaaagatctcactattatattcaaggaagtagtgcggaatgagggtgcttcgggagcaagcacctccggtagtggtgagacacccttccatacaaatagggctaccactctaactgattttgagagtgtcaatcgatgtggatttgattcatattgcttaaatttagaccatcatagatatccatacaggttgtatatagataaagtagattgcatcatcaggagtcccaactacttcattccacctgtgcacaatcatttcaaagtggatgcttttagtaaaatttatttcccaggcttcttccaacacgagactaacataggttgagaagatattgctctgtttgctaggaggaaagtcagttattatagaattaatgatttggatcttcttaatattttgcatgatgatatgttgtaaagatcacatcttttgttatggccttgtttaatgaatattttgtttgttttgtgcagatcaaccaaatactctatagatggggctactaaataggttcttgggccatatccaatctaggtccgaagaggttttggaaatcgcaagaggaggcggagacaaggggaagaagagccaagcttctgggagtgaatctcaacaaccagcacctccaactttgaatccagaggctgcttctaaggctctaagcaaagaagttgtgtcaacttccatcattgacatgactgaa

SEQ ID NO: 121493 - DNA, 1412 bp, Cannabis sativa
ctttagtcttcttcttctcttctttgtactctctttctttttttttttctgtacttcctttctgaaaattcgtactccttcctacattcaagtgcagccaccatctatatctctatattctcctgcctgccccccatttagggtactaaagtttaccctaattggaaatccaagtcattgtccacttgtccttctttttccatacattggctgactcattatacacatttttaccacataagtatcatttattcctcattaacgccagcaagaatttctgccacaattcacttactgggcttgccaattgctacgcgataattactatagcattgacagtcagcaacaagcattatcctactttttttcttcttgtcccaaacacttcccaatacccatttcaacctttttttttctgcttaatacacacgaaaacaacaacataagtctatctaacacttaataacacacacacatttctatttactacaaagacactataaactaaatacaatcacataaaatagacactaattactctactatttagtttgaaattcaagtttaaagatatcaaaataactctaaaacatagagttatcaattttatacttcttcttttaattcttgtgcacgttccttgtcgaattatctccttttttgctagacgagataaaagtttggatcaatgttgagggcatatcccgactatgccttcatgtgaccaggcaaaaatatcaaggttcgctcttagaaattttattaaagctatttttatgtcgagcaacaaacccttaccaattttgagtttcctattcttccaccgatccaacatttgtattaggctccccaaggtgggtctatatcttcatccttgccttgggcaaattcctattgggtgatgcctttacctttctccaaaatctggtcggaggtttggccttggatatagcaaggttgtagcattctcgtgtcattctttggttttgactttaacttactcacaattcccagattcttgagtgtgctcgaggtgtcttctcatatcccactccatggtcattctttggtttcctttcaaatagcccactccatttcttgttacaaattttacacacaagtgatacactgaagtgacagccttcaagtcatataagggtggtcggcctagcatgacattaaagatagaaggcacgtcgatcactaggaattgagccttcactattgtgcttgtcagagtttgtcccactgtaagtggtagccagatttgtccaagtggagcaatgctttgactggagaagtcgcatactagctaagtgccgggaaccaagtctttcaagtgaagccccatcttttcatatgttgtttttgttgggttttgtaccctaaataaaaccctttacaatctgatt

SEQ ID NO: 121494 - DNA, 1154 bp, Cannabis sativa
  modified_base (30)..(45): a, c, t, g, unknown or other
  modified_base (456)..(461): a, c, t, g, unknown or other
  modified_base (518)..(532): a, c, t, g, unknown or other
ttagagtgttaatcaaacatacttgttagnnnnnnnnnnnnnnnntaaaataatttccaacaaattctcctttaggtaacaaaaagactatatagtcttgcacactatcttgagttttgccttgaaatgtatgggcaattactcaatcactcaaggggttcaaaattaacaagaagtagaagacgtgattttgaaattatgagagctccttttattttctattttgcccaacaaagtgagtcaatagtattataaaaataagaactgtcatattctatttatatgggactttagggttagatttagaatttaaatagaataaaaaagagataaaaattggcttaatttaaagggataatttcacaaatacacaaaaacaacaataacaaaaaattacaaaaatacggtttcacagaattttaaatatttttatgaatttttttattttatttacannnnnnacggtctttttatgttgtattcatgttaatttgttattgattttttgttatatgtannnnnnnnnnnnnnnttattttcatgttacttttatgtagtttttttttgttattttcgtgttattttcacgggaaatcgtaaaagtgtaaaaaaaaattcattaaacataaaaatgtaatttttttacaaaaaatggtgccttatgtaattattcataatttaaaccatatggccgaaatactatgtggcccataggttttaatttgaccattttataagactttatctttcttttcaaaattactatttttcattctaactttataaatgccaattttatctgtttaataattataattaattatcaaataaaattatcatttaacttatttattaattaaacttttcatagtctcttaattaataaacaaaccctaaaatctcttattcttctcaaaattgcccttgcttagtgaaactcataaataagacatagtcttactcagaattctaatcgattaattaaaacaattaattaattctacaagacaatactatctcaagtagtgtggagaccatatgcctacataatcaagctcccaacaagtaggtctagaatttatcgaataaattccctatcttattaattcctcctgactcctctatagatttggaattgcactcttgattacata

SEQ ID NO: 121495 - DNA, 1122 bp, Cannabis sativa
ctaggcctcacgaatacaatcctaatttatgtatttatcatataaactccccattaaagggaaataggaaaccgagtataattcatgtaaacactatagatacccaacaaatccttcagattgggttgaactctcttgcaatatttgctctaagaaaaaatagagaacatatacttattgtattcctaaaggcttttctagcaaaaatacataataatatcgattcgtggactaaggcttttaacgccccaaccacgtaaaaatcatgcgttgttctattttttttctttaaattatttatttcttcagttttaatttcttataattggtcttctgaaaatctcgataaatattttagtactttcattgagagttgaaggaagcagtggtaccatccttcttcatagttagccataagtatccttgccggatgatcttcttagacagacttggtccggatgtatgatctccacagaagccttcgtgtatttcatggattaccaaactttttttcggttccatctatacacctcagatatagtactgataaccctcttcggtataactttctatccaagagcacatatctcagagcttggtatttaatcttctgggtggctgccctgtcatctggaagctctctagaatttaagaacttgtggatggggtttatccaggaagttgaatgatcaatgatgcttactcccagtgattatgtgcttggaacatcaacatgggcaatgggaactagtccatacttctctatttctagatccgttgctagttttgctaacacagatatgaaggggttgaggttcaacacagatatgaaggtttgacattagacaaattttactgattttttatttgggttctgaattaacaatggatgtggggaaacaaatataggatttttcagttctatgtttgaagtttttagatgtagataaatgtgtgtgtttgtttaaatttaatgaatgaagagtgaaataaaaactagaaaagaaaaagaagaagaagattacctgtaagaaaaaaaaatgaagaagaaagaaaaaatagaaaaaaagttgttttattttaaattaattaattttaatttttaattttattttaaatatt

SEQ ID NO: 121496 - DNA, 754 bp, Cannabis sativa
  modified_base (718)..(719): a, c, t, g, unknown or other
tttttttttttttttttttgagcggttcaaaaaaatttggctaatgaatggtttgcaaataagcttccaactctccttattcaagtggtcagggggtaattcaagaactttctcccaatcttccggtttgatgtaatgttgcttaaaccacttatttatgttggtctttcgctcactgtacctctctaccatctcagtatataaagtccatattagtaggtctcgatagggattcccatcaatattaaaataaaacaatatgataaagcaaataagaatttatattaattcttaaaggaatttatataataattagaaccataaattattaaaattactcaccgctattcgattaagcacttgatcttcatattgttggggtgtatcaaaaaaattgtaatgatgacctagacacaaaatggttacttgttgacccataaatcgactataagcgttggcttcagtcctaactactttgcccatactgaggtccacctcgacctttaatggtttaccagcttgcctccttcgttgttcaagtttactgtttgaagcaaggccacgaccctttctaaccgttggttcgactttaattgttcgagaaaaaagttattctttaagacattagaaagtaatcatgtatttatagtaaaaataatgttagagataatgggggccgattttccttcacttgaattggattcttcacagtcttacnnactatgattgagtaccaacttgttatgtgtgggca

SEQ ID NO: 121497 - DNA, 1322 bp, Cannabis sativa
gacttagcaaatattgtaaattgcttgatccacgtgtccttatctggttggtccacatatattgggcaaaatcaggggcaacaccaggctaacttgttcatccagaagaagtatcgtggaatgatagatgccattcggaagggcgttcttagatgtctatcatgtcaactatgagtgtagtcttcaggaaagctagtcctcctccggaaggagtttcggatggctagttgttccctccttatagggattcccaaatagtcaactccagttgttgcctttcatatccgagaagtcccttcatcgtgcgctttggtttgtcttccaagaagcctatgtctcattcggaagcactatacttatgctgacatggagatattattacgaggattttgttaagtttgttaagtcgtgactaacttaacaacttagctttctgtagtcaccacctttaggatctatatattgtatctataaataccaccaacacttaacattttagagtacaaaaagaagaagtttagacgagtttcgagaggtgatcttaagagagaaagattgagaggtacagagaaaagagagggattggattcaagatttgtatgaagaatcttctatagatgaaaaaaattcttgagtaagagtgtcaaagtaaccactttgagtgaatccaacaaagaatcgatctcgattgtattgtaccatgttcttgctcaatcaataagagaattttggtggtgttccaaaactggagtagaatcatagatcacatcgatttataggacttgaaccaatatatatcttggttttaattttattgttttagtgctttaattgtttataggtttaatcttttcatccctgatttatcttcaattgttttgtattatttattaatattgtacattattgttaattgtttgttaattaagtttcagttgatttgattatccacactacactagttgtaattttctcacaaaaataattaagtgtgataaataagacaactaaacaatataattaattactccttataagaaaaaaaaacaaacaaaacataattactgtttttataataattaaaagagaattagttagtgataattctttttttaaaaaataaaatgaaaaagaagtcaaagaaattagtgataataaaataatttttcatcatcactctagaatttattttataataattatatattaaatcaacaaaactaaatattttatttgttttaatgtcatgagttaattcgtgatgtaatatgttaattccatttttggtatatttaattgacaaaaatattttattatttaat

SEQ ID NO: 121498 - DNA, 685 bp, Cannabis sativa
cggacaaacaaaaattgggaccttgggtattttcaccgctaatttttgaggttgaggactaatcggcatcaacctcaagtttttggagacttttgccgcaattatctcttataaaatttaaagtgatatcagttgctaagattttataataatgataatagtttttgaccaaaaaataagtttgtttttaatcgaaagatcccattaaatattttttattatttgttggggttctttctttttattattttagtgggttctttcttttttggaattttttctggttttcagtcacttattatcttttttggacacattttacttatctttgatgattaaataaagttaattttaattatcttgttttgggttttacaaatattttcttttggttaactcttttcgttgactttcctttgggcttaactcggtgttaccgaaatatgcgatatctcggtttgactggtgcattgttgaggtatgttttgtttgatctgagatttattacgtgctgccagccgagatatatactatctcagtcagatatatactatctcagtccgagataaatgatatccggattgtatgattcgagatatacaggtgcctcggcaatacttatgtttttcaattttttaatcacaaaataaaaatattttatttttaaaaatttatttttgaaaaa

SEQ ID NO: 121499 - DNA, 687 bp, Cannabis sativa
ttctccctccaactaaaatagtgcaaagcaaaatttttgccaactttcatccaaataacgattttgggaaacaaggcttttgttataatacgtaattatttgaaaagaaacgataagtttaatgtaaaacaacattaattcacacaattttgtgataacaatattgttaacagtgcatttggttagttgtaattaaatagaatcaatttcatcataatctcttgtttgattatattttaaaatattgatattataatatattattccattaaaataattattccaaaataagatatcaatataattttatttattttttatatatgcatattaagttcaattcaattttattattattcttatttttgttttttaattttcattcattttaattaacgtaccttaagatcttaaaatttagtgagttatagaaaaaaaaatatttttgagcccttatttaataaattttttttttaaaaaaaattaagcacttgggcaaagtggaccatacacaccaacttagctctcccatgtttagggtcgcgcttgaacctaaggctatgtttagtaggaaggagggagaacatgatgaatggagagattggatgggatgagaagtaagagagatcaagaaaatagttgatttcctttatttgatatgagtttggtttaacatgcttaaatata

SEQ ID NO: 121500 - DNA, 1556 bp, Cannabis sativa
atgatacaactgacaacagttcacgagtatctcgaaaattgaccgtaggaacatatattttatgcaaacaacagaacaatcaaacgttgaagcttacacagttaaactcattacagcaaacgattaaagttgattgttgatgtttctgccatacaatattgaaagaacattcactaaaaattctcctatttattaacatctcttaacaatactgcttcaataaaatccaataaaaacttaagaacataaataatcccaaattgagttgcgtaggtaagaaaaggatatgaaagaacggctatgacagacacagaaacacgtcggaatatatgcattatattccgacgtatgacgatctaaatcagcaaaaatatatgcattatatatatatgagtgtgtgtgggatcatttagcagatccacgaaatgaaatatcgtacatatatttacacagatctatggcgaataatgataacaccctagagttcaatttgtgaataaatttcaaaaatatgcatacaggaacaggaaattggcaaaataataataaagtattaaaacatacatacgttaaagaagcatagttagtgtacctgagaagcagtgaaaccctaaaagtttgggaaatttgaggtgggtgtggcggaaatgaattctccgggaaaaggaagaatggggggtttggattgcgtgcgtgggacgcagaagaaatgatgaaagaaaaggaggaggcgatgcggagagagagtggatgattgaagatattgatattggagggaaaataatgattaaaccctcattctcaaatctgaaatctcaaaactcaaaattaaattgagagccaaatcgtaggcactacgttcttccatttccactcaaataactaactaataatacctctttctttctttactttacgcctcatttcccttcttttctttcctcccttttgtgggccgggcccaaacctttattaggtagggctgagcctttccaaagccttttatttgttgctcatttctaaggcacccacttgatttgtttttattaaaaaaggatttctttaaaatctccaattgctagccatggttgaatgggagaaacatcaacaaattgtttttaaaagtgtccaacaatatgctttgttttgaatatttggagcaccgtagaaaggctgtaaaatgaaagctagcttcaccatttgacatcatataacaatcaaagaagttatgtccatagttaagaagagtaacatcaacaccatcatgccaaagaagcattgtgtcaccactgagaccgatttgaggtgattcaagactaatattaagattaagggactgtcaaaaacgggaaattgagttaagggcaatttacactaatatatacattatataattttattacaatatatgtgcataataatttattttcatataatcatacattttacctattatgaaggaaattattttcaatttattatacaatatataaatggtaagtatttgattatttgatttattatcactcattattataattattgaatgatgatat

SEQ ID NO: 121501 - DNA, 655 bp, Cannabis sativa
tcctggtccaggacacgggacccaggtccgaattcgagtccggatcccaagtccagttttgggtccgggcccgagtcccaggttcgagtttgggtttgagtcttgggtcttaagtctaggtctgggtccgagtctaatttttgggtctgggtcctgagtccgggtctaggtctggattcggattcaagtctaggtttgggtctaggttcgggtccagttcacgagtctgggtctgggtctttagtccaggttcgagtcttgggtccaagtcacgggtcccaggtccgagtcgaagaatggggttgatccaaatcttttgtaaatattataatacaagtaaatacgaactatttattatgtattaaataagataacttacattgtataaaagattttagtcgtaataattaataaaataatataatgtaacctaagtggttgtatagggttttgagatttaatattaaattgtacaatataatatatatagacccttcaataataataaaaaaactactgattgctgaccaaatttattttcttttgttattacatatggagcactaaaatatttacatttttttttatattaacaataaaatccttcaattttttttttttttttggttcagttggcaaatccaaaatactattt

SEQ ID NO: 121502 - DNA, 1250 bp, Cannabis sativa
  modified_base (1222)..(1225): a, c, t, g, unknown or other
gagagagagagagagagtctaaacaagagagagaaatcttttcttgtaatctctgagagtttgtgaggattcttataaccttgataatactgatatcaataaatatatgattgttgttgttctggtcgagacgtagagcattgcacaaagctcgaactcgttaaacctggtattattcttttctattttacagctttataattcattacttgattcttgagatctcttggtatattgtttcttgattgtgttgtgtgttttgctggttcgatatactgaattgtaagttattgattgtttttgttttgcacaacacgtattaatagaggtaaatcaccctgtaatcccgctcctattttataattgtcaggatctttggatgttgggccttcttttcaagaaaggaaaacaatatcaaagactaaaatttattttgatgcatgctaaggtttcttaatattggaattctgctctagtatgttacgtttttgggggcttaccggcctccaattgaagtcatggaaggttttttcctaatagtttcattgtatgcttttatacttttgtgcacagataaaatcatagcacaaaatcgtatgacttcccactgaattgttcagaatggcccataataccaaaaataagcacaatgtgggaacattttcatatttgaaattagcataaaaagtttcacctcttcattgtcaaaacttcattcatctcttaaggggaacttcaagatcaatacgcacacgcactcttaagtactcctgccaaatgcttgtgaaattattcaggtccgaatcaatataagcacctatataatttccagcctcacgaacgacctgttctgtcttgaatcctaattaaagattatggatttgaacccacatgtcaagcttgtttagtgcgatgttgttttcagatatacaatgatatgtatcttgcaatcataggtccaagggctgcctgtaatggctcattgaatatcgatctcatagtagaattgaaataaaaatcgattttgctcaaggattttcacatacatacccttggtttccaaaggttcgctaatatattctgaaatatttggaaatctaatactttccctataagtgggcgacaaggcaccatatcgattatcaaattcaagttctttcgcttcttcgaagatcgtcctccacacactacgtacaaaaaatgttacttttagtcacaacannnnttgtgactaaaaataaaaaaattgt

SEQ ID NO: 121503 - DNA, 900 bp, Cannabis sativa
ataccagtaataactaaactatcaatccctgcaccctgaagaactgaatgaagatgagtattaaagaaagcactgaaacgggtcttcaccagcttatagtcttcttctttaatcaccagcccttcagccaattctgcacctaaactgcccttaataactggacccaatttaccatcaccataaagatgccggcgaaatagttcaacatctctacctttcgggtcatgctcacgaacaacctatacaaaaaaaatagtatattttaacacaaatgacataattatacttgtcatatttataaccaactttaaagtaacagtagacacaaacatacagagttacacgaaaacaggttctggtttattaaaagtgaagtaatttattaaacttaggaaaaagaaaggaattgggtacccaaactatgagaatgccgcgctgcctagctacttgaactgcctcaataacattggggagtatggctttgcctccatttactcgcacaggaccatcttcacgtatgcaatcattctgtgaaaccagatattcaaaacataaaacaacaccctcttcaaaaatccaaaaaaaaacaaaaaaagaaagtaaatcaatacctgcatatcaatgacaagcagagctgtgcgcttccatttctcagactcagtcattattgtctctttcaaagtcaaactatcgttttcgtcttttgaaaagtaaagaaagtactagtcgtaataatcgtcgtacatatctctatctctatatataataagaatgaaaagtgctttccactccttcttttcacctgcttagaaaaaaaatatattttatgattgggccacgtaacaactacttaatattccatgctaattcatataattacaagaggcatcaacttgtgat

SEQ ID NO: 121504 - DNA, 737 bp, Cannabis sativa
  modified_base (591)..(591): a, c, t, g, unknown or other
tttttttttttttttttattatgtcgactatatatacaaaaagtaaatataatcaaatttttttaaaaaaaacataaagtttttaaaagcacagtggagtctaatctgggcccttatttttccattgttcaaaaaataaattatatatatatataaaataaattaaaaaaaaaactctaaaattgaagaattaataacctcaaaaaaatttgaagaaaataatgatggaaatatatgggaccaccccaggcaaacgaagcatgcaataaaatatttattgttataatttatatatatgtatataattatttatagaactttagtcatcgatatatattattggaatttattagtaatttgtgattagtatgaaagtttataaatatgtaattgtatatatatagttatgggtgattttataattaatccttttaaaaggaatgtgttgatgcattttttacttatttcggtatttacaaaaaattaatctttttttttatattcatgtacgttatatctatttaagatatattttataaaattttgagaaattcaaaataatttaaaatatagaaaacaatgttcaaacantctcttttacacgcgtataaaataaaatagtcacgcgtgcaatacactacttcaacgcaattttcgatgtgttaaactttttcgaatttcttaaaattttgcaggatgttttaaataactataatttaaatgaccatgagaaaaaa

SEQ ID NO: 121505 - DNA, 2613 bp, Cannabis sativa
  modified_base (226)..(228): a, c, t, g, unknown or other
  modified_base (1191)..(1205): a, c, t, g, unknown or other
taacatggatgaaagtttagagggaaaaatttagtacatgtaaaagttcgaggggcataatttggtagatatcaaagtttgggaacataatttaatacataaaaaatctttgaaatagtaaaactgaatgaaatttgacaaaaatccttaaatccaccaatttcaattgttcaaggggcatttttaacgatcttaaaagttcaaggagcatgatttgatacatgtnnnagttcagggggcaaaaatcataattagccaataagatatacacggttgatataaatagtacataccagtctatttaaataattttcaattgtcttataatttttttttcttccgataatattagattagacaacttactcaatattaaatcacaagatacttattgtcacaaacacaatacaaagcttcaaagctttaaaaactcctctaacaaagaaaaaacatgatagaaaactcacccaacaaaacatagctagtttttagttagacaagagaatgtaataagtacattttacattattcttttcttcttcaaaaactaaccttattgaaatattgaaccaataaatcatgtatctttaaagatcatgacaaattattgtcgttttgtgttttcagaacaaactgccaaaaagaaaaaagaaaatttaaaaatttaaatagaaaaaataaaaaaaaaaaaagaaaaagaatacagttgtgattagaaggcttacagcggatcaagcccatatccaacaataataaataataaaaagaaaactaattataacactcataataatacttcccaacactcattcacacgctcttcaaagcgcgtgtctaacatttctcaagaaattaaaagacaattttcaaaaatgcttcttttaaaaatacaatctattacaaaatagggatatgattttgtcatgttattgtacttttacggattgtaattcgtaatgtacggcaaccgtcagatgatagagttatttgatctgacggctgagattgacctaggggtaattaagattaaaaagtagaaacgtacactcacactcatttaatataccttgagactcatagtcatgtaagttatagttataagacatcctgcaaaattttaagagattcggaatagtttaacacgccgaaaattgtgttcaagcagtgtgtaaaatagactgtttgaacatnnnnnnnnnnnnnnnaaattattccaaatttctcaaaattttgtaacatatcttaaatagctatagcgtacatgaatatgaaaaaaaaaattaggttaaattttttttctagatgccgaaacaagtaggggtgcatcagtacatcccttttaaaggggtacattgtagaatcacccacaaaaatattacttttcgataaattttagtgtatcaatataccttttcgtgttttcaatattcatataattttagaaaattctagggtgcacatctttaaaataaacacacttgtatatttttatttattttggtatccaaaataattttcttataattatttaaaaaattttaaaaaatttaacacgctaaaaaatagaatttaaacattatgtttgcccgcgtgattattttgttttatatgcgtgtgaaatatattaattgaatactactttctatattataaattactccaaatttttcaaaattttataggatatcttaaataaatataatgtacaggaatataaaaataaaattagactaaaaatttcttctaaatgccgaaacaaatacatgatgcattagagcatctattttaagggggtatattatagaaacaccctgtaattttaatcttcattatatatataactatgggtgcactcttaatgagtttttatgattaatttttttatttaattagaaaattttctcatttttacattatatgggctggggttgttccatcagctgaaaaaaaaaataataaaaagaaaattttcggcaaaaaaatgataaaaaaaaaattgagtttgacttaaatattttttatataaacatatttttgatatagtataaaaagaggtattttttgatattttctttaattaagtagctaatttaagcatagaaatttaaatttctattttattattcgcgattagattaaaatttaatggtttaatatttttaaaattaatatttatagttgaatttgtttagtacccatcaatagataatacccattaagaagtgttccatataactatatacattgtagttatttaagatattttgtaaatttttaaacaattagaaataatttaaataatctctcgtacacatgcctattttattttaaatcgtactttttgtattataaattattttaaaattttcaaattagagaatttctaaaataattactacattcttttcttgattggagaattttatgagaattgagggtatagtttacttttttatggtataaataaataacactatagggttatggtttttttattttgtttacatttatatgggtttttaatataaccggttctgtaacataataaataaatataaataacataagataactcaaaccaattataattaaaatagaactagttctataaca

SEQ ID NO: 121506 - DNA, 1783 bp, Cannabis sativa
gttaagctttccattaatactgaggttcccactcaactcctagcaatctttttacgatttgaaaatacatgggctcgacaagctaggtgacaatgattaaaattacctctagccacaggctccaaaaataacagacaatgatcggatggtgacatttctaaattgaacagctttgcatcaggaaaaagttacgtctggtcacttgatgttaacgccctgtcaaggtaaatttcaacccatctactagtgccacagatcctttcccaagtaaacggatatcccaacaagtccatatcctctagaccacaatccgtgaggcatcgttgaaagtcatcaatcaaccaccgagggtacggctgacccccctttttctcctcttgacaaagaacattgttaatgtcacctataacacaccaggaaggggcgaatcacccacaagagttctcaataattgccaagtctgaggttgtagcaaacgagttggctcttcataaagacccgtgaatctccaagaaattccttcagccattttgatttgcatgtcgatatggtgatgcgagaacccaagagagagctgtcgtccatgtctgtccagagaaaagcaaggcctccactaagaccttgggcctcaacagcaaaaataccttcatagcccaacatacagcccaccagttcgactctttttttttattacatttggtctcacacagaaaaataaaattgaatttcttatgagaaacaacctctttaaggaattgaactgtctgatggttctcaagcccgcggcaattccaactcaaaacattcataatgcttggcgggcctagagaccagagcccgccccatgcgagtttgttgggcagttactatcaacttttggcataataacatcatgattctccaaggtcgagttatcatatatgttgcttgtgggccccaaaatagttaccatatttggcccaacatcacccatgcttccactaatgtcttcatctacacgtgtccttctccttttattttccaaaatcattaaagcctcattttaaaaaatatcacctggcacattggtgttatcaaccaccattgactttcctttattagcaatatcttcaataattacatgggatgagataccaacagtatcgggctacaatcctctgatatcaggacgattgattgccaatccctgaagtctctcctcatcattaacagtctaaacattgcaggttaaccccacctgagaacctcctttgcctgccatcacatttggcttagcggtaatgcccgatcgaagccatggagaaccagctatgtgttgttatcttcgtggtgctgctttgagtgaaagatcatacattttttgaattaaatctgatggtgtgttgaagagcttttcacaaaatcgtttggaatgtcctaagaccccacaaataaagcaaaacgttagtacgacctcgtatttaaattgcattgtacaaacttgtccattcttcttctccaatgtcattttcttctttagtggcctttcgatattgattgtagtacgtactctcaagaagtcccgccaaacgctggtaaaattgttaggatcaaatttcacaaactttccaacatagttagcaacaatcagggccgaccctaggtataggcgggctaggctcgtgctgagggcccactcatttcgggagcccaaaataaaaaaaaaaaaattattaggcttttattaaagtaaaattaagtgtattgtaaacaacaaatagtcatagcttagttggttgaggtg

SEQ ID NO: 121507 - DNA, 1845 bp, Cannabis sativa
  modified_base (65)..(94): a, c, t, g, unknown or other
  modified_base (190)..(208): a, c, t, g, unknown or other
ttaaaagaatacatataatacacaattaattgcaaaacttaatagataaaatgtatattctattnnnnnnnnnnnnnnnnnnnnnnnnnnnnnnaaataaaattaaatattttttatagatacaattttttttttgtagtttgttttattttgttgctagttatgtaaaaaaaaatattttttttcatannnnnnnnnnnnnnnnnnnttaaaaagtaaccaatctaaagtaaccgatccaatctgcacttttacggattaaatttgagctattgtgtggattggatatccaaaaaatgaaatccgcacttagtgcgaatttgtttgaccaaagtgcggattgaatcggataaacagccctaccagtattatcactcaagatgtttaccccaactaattttttttttttaagaaaacaaatatattccattaaaaagtctcaaagcctaaaaggtatgggtgggcaacatctaatctaatacaattgaatcaaatcattccaattcaatccaattacaaaaaattagatatctaattacaattggattggattggattctaaaagttagattctaattggattggatcggttattgaatgtcaatctcaaaattcaattaaaaatcgatccaatctaattacatttatttatacattataaaaattatttatattgatttatataataaaaactaataaaaaatacattaattatatttttaggggattttttttgtgaaattagtaatacttgattgttctatatatttattttcatgatattttgttatattttattatttagaaatattgttattttagttatttcaaacgtttagttacattacgcttgtaacaatgatatttttatagagtattaaacttaaaaataaatggtgatatttaatttttacgtatttatcttcatatttttaagttaatattaaaaattaagtttataatttgatatctaattaaaaaatcgattcactccaattagtaattggatcgaattagattggattttgaggtctaattagattggattggatgatgatttttaaatccaattactaattaaattggatcgaatcagatgacaaaaaaaaaatgttagattggatcggatgtccacccctactaaagggtgtcaaaataccaaaaaaaaaaggcttaaaagtagggttgttcatataattcgcaatttgtggttccaaacctcaactaatcaggaccaaactagttgagattggacaaaatgaatctagtatcaatagtttggtcaatccaaacagttaataattttttgctttgtgcacggttttaaaattctcgcttgtgattcaaaccaaactaaacctcctaattcttttttattattgaatattgatatttagaaacaatcttatgcataatattgataattagcttaatattgtgttaagaatatttattttcattgttattttcatattataagcattaaagtaaaaataattcagtaaaaaaatattaaaacatttacgaattaaaaatcacagtttcgaaccaaaccaatttgttcttaagtggattggtttggtttagtttgagcatttattgctctaattcggttttgaattttaaaaaaccaacattattagtttggttcgaaaaaaaataagaaccaaaccaaaccatgaacgcgcctcaaaagattaaacaaaaaaatccataggaaggcccgaccaccaaacatgggacttgtctaaaacaagtgttgttactgatatttcgcaacaccaaaaagtacaatttaactggaaaaagagagaataatttgagagatgacaaatgcgagtattc

SEQ ID NO: 121508 - DNA, 572 bp, Cannabis sativa
ctctctctctctctcttggtggaccgctggcctagacggaagcaaaaaccttagtaactttttttgcgtcggttaataagtgaagtaaaaatatcagtatttgcgtctatggctgtagcattggttacaccaaccgacaaaaaaaaaagcctttttgtagtagtggattatggtctccacatcactcccacatcaaatttttccacgaaagtctttgtgatgcagattggacctcaaaccctaatgataggagatctactataggctattgtatatattttggaggtaatttaatttcttggaaatctcaaaaataggccaccatctccaaatcatctacatatcagagtttaaaagcttaaacaatgcagtcgttgagtttaaggtgtcttggcttcaacctcttctgaaagagcttcaaattcaacaacatggtcctccctctatcttgtgtgataaccagagcatagttttgttggttgctaactctatcttccatgctcaaacaaagcacatagagattgatctatattttgtttttttttttttttgaaaaagaatttattagaacc

SEQ ID NO: 121509 - DNA, 1731 bp, Cannabis sativa
taatttgatacgattttcgagaaagttctttgattagcaaagatagcactataattgaaaaatcactgtagcgtgccttagcattaggacgttacaacatcgatactgcttttactgatatgatggactaatggctttagaatttgcctaacatatatctatcggtattcaatgcaactctatgtacattaatactgctcttactatatgttatctaataggcaaccataaaatatgtacgctaaacatgtaaggatgcatatcattatactaaatcttgcctcaattctgaatttaggtgtaccagtcaacgtaagtggaaactgctgctcgacgatttaaggccctaagtcacaaattacgtaaatctggtaagtgacctacaacatcactttcaaggactttaaactcaaaactaagagtttttccatcgataaataatgtgtcaatactctaaatattaaggaaacaccaaaaacaaggctttagaaaaattccccaaaaaacagtaggccgtttttctaaaaacggtaagcgatttttctgggacactgccagggaaaacattagaccgtttctgagaaagcggtctaccgtattctgctgtagaatgccgaaacctcatttcaaaactcaaacttatcctaaatcacctgtaactttccaaaaaacttaaatatactgcaaaagacataaaccaaccaaaattgtatcataaaaccactgaattcaaactcccattgatgagctaagttgtaaactcaaacctagctaatcaacacccgaagctcataaaactaaccgaaacagctccaaacaacataaaataacttaaaaaaatcatcctcaaacttcctaaatttggatagaaccacatgcataaaacttgcatgaaaaacttaacttttaatcttaaaaatcaaagaggaagaagcttgccttgacatagctaacaccacccttggattctatggtgaaaaacccctgaattatggtttgaaatggtgaagaaatttctttgttctcttgatttttctttgggccgaaatgtaggaaagagaaggaaggaaaaagatttacttgaataatttgtaattaaaatgtttgttttattgaattattaacaacataaaacctttaagaaaaatctagaaccccactaaaaacaaacttccaataacttaggataaaatgaccattttgcttttttcttcaccttgaagtaacctaattgccttggggtaaaatggtccaaaactataatcccgaataaattcaacattgaagtctaactattttaccctgctaattctaagatattctaccatatttaagtacctttaatggtcaaatcatcgcattctactattacttagcataaactatgaaaaatatgaaatttcatatataacatacataatacaccaaaaattcaaataaatttttgtaattgagaattataattctaaaacctattgctgataataatccctaattatttactacgaggcatataatgataaaagattaaataagtatctaattatatgttaattctcatttaagtgatcattatatatttagtttttaaaatttttgataaagactaacacaggctacaatcacaacatttaatgacacatataggggtgtgcataaatccatccaatccaatgagaaccgaccgatccaattacaaccgaccgccaaacattggatatccaattgtga

SEQ ID NO: 121510 - DNA, 1358 bp, Cannabis sativa
aaaaactacaatgtaaaattttaaactaatcttaaatatcaaacaatattatatgaataaaaaatgaaactatagtttcaaagataaaattaagtaaccaaaatatgtataaaatataacatggtctaaaagtgaatatttttctaccaaaaaaataattaatcaattggtgttgttatccgtgtttctaggtaagtaataggtgtacttccaggattcataagttaatggatcaacccaccagaggagtcggaccacgtctctaggtacaacaatgaaccaaatacagtcgttaaagagtcgggtcagtctgattttagaagggcatctcacccataagaaagaaggctcaacaaggcatatctgggtacccctagggtattcttggaaggacagttgaagaggtttgggagcacagtcttacgaggcacctctccgatacagaatctcaccaaatcgggggtcagtcctttgcgtcaaaccataagagtgcgcgcaccaccaagtgggacatgtcctctgtctaacatccactattctgacattactgtacactaagcgcgacacacacatgccacctgtcgctatcaaatggttcccttcgtacggacgactgttacctcacggattgggcctctcctactcaacacaatgtcaatattttattatatttaccccattggtggaccttgttttacatactaatcctaacaggtccagatctacccattcccgactctaatctataaaagaacattattccttcatgcaaatgcaaagggttcgagcaccattgttcatgcactaaagctaaaaatactcgggcaagacattcttatataatactcaaatgcttttctatctaataattaatattaatttatagattaagattcattaatgctcctaacacataaaaattcttattctttaatttatttattttttaaaataatatatttaataatcaattttcgaaaatctcagtatacaagtgtcatcataagtaatcttaaaattagtttttgaaaatggagaaaaaatagaaaacacacaatttcaggcttatttatattcaactatattagtttagtaattttgagccaaaaagttatattggtttagaaattaagtattgtttttaatgacatgataaagtaattttgttaataaagtttgtttaggcatattttataacaacttcatattttatgtatataaatgaagaaaaatctgaaaataaactataataaatgaagactaactagaatttttgccccctgaacttttaagatcgttcaaaatgtctcctgaactattgagattgttggatttaaggaattttgtctaatttcatt

SEQ ID NO: 121511 - DNA, 589 bp, Cannabis sativa
tgtaaagaaagatgaataaaatagcaaaattgaaatcctataggcccattaagtgttcggccaatgatggttaataaagccatttttttttatctttttttaattatatttaaattctaaacctaatcctaaaagctaccctataaatagaataagatggcttttatttttagaagacaatcagactccatggtcagaaaaatagaaaataaaaaagagccaccatcttttcgaaattctcttcttcttcctcttttatttttgaagccttagtgaattaaggtgttccccaaacaattcaaataaatacctagtatagtgaagaagattgtgtcaaaccaaatcgaagaagagaagatccaagttaagatcgttataatgctctgctatagacgcgaataaagggctagagattagaatggaataagtcatattattctgctgccatcaatgtaaggatttcttaatctattttgtgtttattttattattttcagaaattcatatttaggatgttagattatagaactataatcaacatacatgttagaaaatctagatcttagaaaaataacttccaacaactggt

SEQ ID NO: 121512 - DNA, 2580 bp, Cannabis sativa
  modified_base (1637)..(1651): a, c, t, g, unknown or other
  modified_base (2531)..(2535): a, c, t, g, unknown or other
tctagatcctggtaaaattattccaacatgcccttcttcaatatgaagtagaagcaacaacgaatttgagtggaaaaaggaatgtgaaactaaattccaagacctgaagaaataaattggctcggccacctgtgttgcctagatccctagacgaagaagagttaggcgtgcacccagcaatcacatgacatgttgtgagtgctaccctcacaagagaaaaagacagtgcatagcaccctatatactacatcaataaaagattgattgacactaagttggttctcacttgtggagaagctgacccacatcttactcttggcttccagaaagctaaggctacacttccagttacaccctataaaggtgtacaccgatcagcaattgcggtaggttctatagaaacctagagcatcagaccaactactcaagtgaaccattgaaactcaaccaacataaaagtacctcacaacagagcatggccaccaaaggccaagctctcaccagcttcatggctaatcatagaagtatgtctccccaaatctctcagagtttaggagaaaagtaggagttagagaagaagcaagaataagagcccaagaggcatgttgaccaccttttcgatacaagcatggcacccaaggcacctgggggcaactgatgcacgaggaaacaaagtcatttataaagcttctaacaatgaggctcaacatgaaactcaaaatgctagccctaggctagcacacgaagcatgggctaaccacctagacatgcaccacgattcttagctagtcgtaggttatgtctagggtgaatatgcatctcaatacaagaagatgatggcctaccaaagctgctaagatagctcaaaggctatactagaaggcaagcccccaaagacaacccaacaactaacgcactcgttcaactagcaagttgtgccttgacaaccaaggtaaatttggtacctgctcagttcattaatgaactaagttctatttcaaaaagaatagaatgccacagcaaatgcacttacccgcttagcgagcagtaccatagctgacaaagcaaacctagtgcccatctagttcctagaagaacctagcattattatccaagaggagttaaacatgatggatgacactccaacatggatgacacctatcgcagcttacctttaaacaaagaccttgttaaagagcagggattgggaggacggctacaaggtgcccaatcctgcacaacataacacacagaagttgtactctaacaccaccaaggagtgtttccaagaaagaagatagatagctaacgatagaagtgcacaaaggctctacatcaattacgctgggggaaagccaatcgaatgtagatgggatccagccacaacatcgatcgggcctttagaacgctggccgaccatgtcctcagtaagttggtcggccatagaatcgacattctggtcagccaccacctccacatgctggtcggccatggcctcatccaatcacccaggcaatgctcctttaatatggttggccacctggtcttgcactggctagcccgatccaccattagtctgcgctcatagctctggcctacattgaccaagaggtacacaacatcttgctagcaggatnnnnnnnnnnnnnnnaaagaagaagagaccaagccaacttaaagcagcatgcctgagcacaaggagttaccaagcccatcaacaaacagattgaggaaagaaattcttcacaagagaattactccttaaagaatattccttgacaacaaatcccctgcatcaagcatgtttggaccaaactaagaaggttcacaccatgttacaagataacagtaaaggtgcacacaagtctggcgagtaagacgagaacttgaagtcagaacttctacccaaactatgaaatagtgaacatctcgataagtactctcactggcaaacttgtcaattaagttcctctaacatttcatcgcataggaacccataaaagcgctagtacctagggccttcttggcgtgatctcctatcattcttcaacggtggcctttgcttcattaagctgcgcaggggtacccactatgtgatttcaaaagcaaacactaagctgtaagcttttgttacacgttagaccaactgtgtctaaaccacttgctcacaagactaacttcttaaagttactcttttagttccacatgcatactatggacaccaccccaaggaagaacccaagaaaagtctgtgaaaattggtgaataaaaaatgaccaagagacttacctgcatggtcgcttgggcggcacccataccatacaacgcattgaattgacacaatgaacttatgtagagaaattttaaggcttaaaataaactactaaactttcctctaagtcgtgcaggcatacttccgcttgataaagtaaatctagacccttacctatcaaggccataacaagacagccagtgtaaagcccgcttagttaatttggaaattagtagttgtttatgtttaattatgaaannnnntatagctatttaaataatttgttactgttatttatggaattcaga

SEQ ID NO: 121513 - DNA, 2961 bp, Cannabis sativa
agtggggggaagacttgcaaaatctaccgtttactaagtttcaaaatttgagtttatttatttcgagtttcgtggatatcgtctattcctttgtaattggtgttttaataatgattaatgaatatcttcactcttaaagttaaaaaaataataaaaagaaaaaaaagttgctacttagaaaattttctttcttaaaacttttggcctaaaacataggatgcttctaccttcaaaatggcatttctttgatattttcgacatccaaataatttaattttaattttttttttagattttacaaaaaatgttcttgagatttgttagagaaaaccatcatttatttatttatttattcaaatgtaaatttgacacgtcatggaaaattaactatttccattaattatttataattaaaaagtgagtttcattctattttaatttatattataaaaagatattatagagaatgtttgactttataactaaaaaattattttcaatttttaataataaaaaataacttttaaaaactattagggatcgtttgaccaaattttttaaaaattgagttttaaaaaactaaaaagtaaaaaatatcaaaacattgttttctgttttaaaaaaaaattgtctaacatattatattttatattttgctcacatacccagaatttggacctagatccctacttggaactagacacagaccccaactctcctagacctgggacgcgaatccccggccctgccccaaaccccaactcggacctgaaaacctgaccctggacccagaccccgacacggacccaaaactagatttgggtctagggtccaagttcgtgttggggtccggggcagggtccgggtccgaggtctgcgtcttgggtctagggactgggtccggggtccaggccaattacgtttcttaggttcgggtccaaatccgggttcggggtctaggacgaggtcaagggtctgggtcggggtccaaggcttggggtctgagttctaggtcgaggttaggggtctaggtcggggttcggggtctgggtcgaggtcaaaggttcagggtctaagtttgagtctagttctaggttcgggtctcgagtccggttcctagtttgggttggggtctgggtttgggatctaggtccatgtcgggatccgggcatgggtccgagtccacggtccacgtcccaagtcgggggtctgggtctagtgtccaaaatctagatctggggtccggggttcgggtctgattccaagttcgggtctgggtctgaggtctaggattcgagtcagggtccggggtctaaatccgggtctgggtccgagtttaggctaggtgcgggtttgggtctgaggttcgatccagagtaggagtggttcatgttatggtacggtgtataatattgaatttttatatatataaaaaaaaatctaacaatagttttaaaaattatgagtcaaataccattaaattttttaaaaattaaaaaataattttctattctttttaaaaactgaaaaataaaaatatcaccaaacaactccataggatcacaaaaaagaaagaaagaaaaaaaataactagcccacttcatcaaatcatattcatgtattaataggggcaaaaaagttctatgaacaagtcatgatttgattttatttttctagcaatattagaatacaagtttatatgatagagtacacgtacttaattaacacatcttttaaagttttgaaaattttggtataatttacaatttaaagagtaggattaaaatatttattttgctagtgtataaaataataataaaatatttgatttttattttgagtgtgctaatgtttttttttaaaaaagaacaacaagtttattaaatagaaagatagatgagaatcacatgggaaattccctctccttagacaacatcaacaccactgctacagactctagcaatttttgccaaaccatcaacaaaagacaacttactacgattaacataaaagaaatcataacagtaaaagtgcttagttaagtctaaaatagatagtgataagtttaggaaattccaattaaggatacatctcctgtaatccaaagtttgagtaaccaccttagagtcagacagcacatgaacctcctgccaaccttcctggaaagcccagttaagagccaactgaacagcttttgcctatgcttccatagttgaagtggcagtggtacgttctagcatgaaaccccacactgccacttcatgctagaacgtaccactacattcctatgtgtggggtttcatgctagaacgtaccactgccacttcagctatggaagcatacattcctacccacacaccagaagaaggattaaccactacagctactaaaccagcaactccctcaacccacgacgcatttttcatcaaaacaaatttagctgaaacagttcttccattagccaccataggcatcttcaaatttagtgtgctaaattattcttcaaaatttgcatatgtcttaaataattaaaatttgtaatataaatacagagatataaggtaaatttaataacactttaattttttgtttcttaaaattaaaacagtaaaaaaaaaaattaagatgattattctataaaactgttttcacttttaaaatttttaattaaaaattaaaattttgaaaaaaaaaatcacttttaaattttttttaaactttttttaattaatattttaaactatgactctaatatagactttggaattcgaacaacccagactccagcgccagactcggaccctaactccagcgccggatgcagacccaacgtcagtcctaacctcaatcctagatcgagacccaacttaattaaaaatcaacaaataaaaatgaaaaaaaaattgcaaaacatatttttttatttttaaaattgaaaaacaaaagttgttgaaaacataa

SEQ ID NO: 121514 - DNA, 742 bp, Cannabis sativa
agggcataaaacccaacacaagccacactggtaacccaacagacaccgacggtactaatggtctcctctcagtcgctgccattataggatcaattttcgaactagttcaccacctagcgtgaaggcaagcgaagcagttgtcggaagatagatctagcccttgcgccagcaccggcactggagtctctagctagatagggtccttacatttgacgacccatcctgaattagtcgtcgtaaccgtatcaggtagcagcttttatgcctggacccaatgccattctgctcgtgcatgtgatacggtgggggattctaattttaggatatcaatggtcgatcttacccccagagagttggctggctagatctgagcttttggggatgaaaatcagtgcagtaggtgttttgagggcacacacatctacttttcccatttttctagtgcggatgatggtgtcaggtcttattttgagcaacacgtctaatcggttcattttttgtcgttggctagacctcaataagagatcaggaggtcttcattcttttctagcacatacttgttttccgacaggctcacgctggtgaccaccgtgcatacctctttctttagctctcaatgaaatgacaaataagagaattttatgtggttcaggcgttaattatccttagtccatgagtctattttattaggctcatcgatcgatcattatttacacatatacaaatatattggacttttatg

SEQ ID NO: 121515 - DNA, 669 bp, Cannabis sativa
  modified_base (47)..(51): a, c, t, g, unknown or other
tcatatttagggtgttaatcaacacacttgtgagtagatctaagatnnnnntaaaataatttccaacagttttaacaacagagaaaaatttaggattttcaagccaaattctcaaaatgaaatctctttctaatccgaggaggaaaattggggctattgtcgttaagaatgagcttaagagcacgatggtcagaaccatagaaagaaagatggtgcaaaactgcattagaaaaaagattacaccaagaatccgaaccaatagcccaatcaatgcgttcacaaacaaatctattacgccaagtgaatttatttcccacaaaagaaagaggggaaagaagaaacttatcaataaagttagagaaattatccatatccttggtatcataataagtctaccaattttatcattgtaagaaaggaaactattaaagtctaccataattaaccaaggaaagttaggagcattataaaaagttttatcaagaaggttctaagctaaatgtctttgagaagaaataggagagccatagaaaccagtaaaatggaacattttattatcattaaaacataggttacaatcgatatgattacaataaaaggttaaaatattaacaaaaacattgtccttccacaaaagtaaaagtccccccccccccaaaatatttccta

SEQ ID NO: 121516 - DNA, 2819 bp, Cannabis sativa
tataccatatattattccatatatatcaaattacatatatataaagaagatgttttttttatgacttttcattaattctctctctttctctctctctattaattttttaaaaatgttattttgcagggcttatgatgggattaagtattattactacttttgtaaccatcttcttcatcctaatttctattgttaggacagtagatggacaattcgaagaagattttggtatctctagtaatacgatacacactattattattgtagctatttgtgtatttttatatatagtaatagcaggtctttattttttatatcagtactggattactaataaggagattgcttccaaaattgtaatgttcgagctaagtaaatatccatgcgaagggcataccatatttgcaaaccaatgctcaatatgtgcctatgaatttgagaatggtgaggaagtaagaattaccaaatgtggtcattgttttcacaacaaatgcactcgtgacatgatccagggaaaactcacccaatgccctatttgtagaatccctttatttactcagtaaacacttttattttataataattaattaataaaactgtgtttcttaattaattattgttggtttttatcatttctatgtatgtgtacgtagtattattaataatatagtacttaattataaacaatttgtaagattaatttgtaatatgttgcattttattattattaatttattatataatgtattttttatttaaatagtcttgaatattcaaattaattatcacagagatatattcgtgcacacaatctttactagctatggttatatatagaagcatgaattaagtaattaattcatgcaactgaacttaattttatcttttatagaagtgttaatataagtgtgagccacctataggagagtcaacatcttatccacggagagttatcaattttttttccctttgcttagtttgtaattctagccaaaaacaaaaagaaaattaatttgtaatatttattccttaatgacatatttgtatattaatacacaaattggtgatgagttcaattttcttaccatgacacttcggtggttcagccaatatatactacaactttataaaaagcaccacaccatatttataattaaggataaaagatcaaacataaataatatgaaactacaatcggccctcaatataaatctagggtttattgagagaaaatggagaaaataaattaacaaaggaaagagaaatttttacaacattattattattgttattggaaaaatattattcccaacatttaaacaaatccctttagagatagacttagcttttttatttcttcatacgtatattctttttaggctgattcttttcctctatttttgtttcctcttttttatgattgtacacaagcaattgtcaacaatatttgtttcattatcattttgtttagtttcataaacaacatttgtttcatcaccactttttaattttgtaagcaaaaattgcttgatcatcattttgtgtaattttacaaacgacatatgcttcatcacccttttacttagttataaacaatatttgcttcatcaactttttgctcagtttcgaaaacattcatcacccttttacttagtttcataaacaatatttgcttcatcattaaccttttactcagtttcgtaaacaacacttgcttcgttacccttttgcttatttttatgaagagcattcattaagtgataaacactattgataatatagatggctggaaagttatctgtaggaaatttacccttttgttctacacccaacagaaaattaaacaagttatccaaggtcaaaatcgatcttacacacaaagtcaaagctcggttgactccctgaagttaagaaccaaaacgacagtcttttaatccctactacaagtcattttgcaataaccccaaaaaagatcttgaaactattcagtcacacacacacgaaacccaaatatgaaaccctagcagagcttcgagtttcttctccagaaactcgaagtatgcacacaaccccagaaaacccagtttatcccttcaccgatcaatgaaaaataaagcaagagaaattagaaagagtgcaccagaaattttatagaggttccccaaatgttgttgggtacatcctcttcgagttcgcctcagaaaagctcgtttccactattggatcttcaagatcaaagagttacaaagctagattccaattcacaggtacgattggtaatcttttgagtttacaatgtttattttctttctcttttctctctgaatatgcattaatctcttcttcttcttcttcttcttcatgtgtgtaatgttttctcttggttttgggatctcccgagcccctaaccctagggctccaagacttaaccactgtaagtctcttcctctccaatttcctaatttgttctcatttgttatgagttgatttgcatatatatagcttgtagattagcagagagagctgagagttagttgcaatagttttaacaaactttgtaactaacttttgttctgtctgtaggttgtatgaggccgaaggccacttaggtttttactactttgtaattcttgttaagtgttgatctggacagcgtatgtggggatttatttcaacaatttccacctaaatccccatatgcaatgtgtattgttatctttgatgttttctgagggtcttagctcgaacccactaagggttttaccaacctgtgtcaatccccaataagcttaagcaaagcttaaacttattgagggaca

SEQ ID NO: 121517 - DNA, 910 bp, Cannabis sativa
atttcatatcgttttagaaattcatatttaggatattaataacatactggttagtaaatctaagatcctggtaaaataattccaacaataaagccctaagatttggagctttaactattgttttaacgaggctaactaatccaacatttttactttgacattacgttaaatttctacttatttatttcaattattagctcctcgaacattcaagaacatgattctatcaatctatttggaggatctccccctccatcaatagtaaaaattaattcacacagtatttgtcccacttggacatctcccattgttaaatcctccaaatgcttgaaggcattactgatcacaggtcctgaattcgaagccttttcttccctttttttgacaaccactttttgttggagaaacccattgatgtggttttctcatttcaactataagatattttcctgcatttcagaattgttgactgccattgtattagtgaaatcagcttcactcctctctgtaactgatgttgatggcatattccccttttcaacccaagttttctttgtaggcttccagcattattctttctcatggccatatcctgtccaaattaaacagaatgatggtttccattcataaagaacatcaatcgaaacaagctcacctacttcattcttaaaatctatattattagggaactcctaatttacgtccacctcaactaagattttggcatagataggtttatctcgatttgtcgtggctccattctgatgtagcaattctccaattatatcgactatcttcgccatatcacgtgtaccacatcatttaacatccaacccgtgaagttgctcttgcattttgtgccctaaataaaactcatttcaataaatcaaatttactaattaataaaaga

SEQ ID NO: 121518 - DNA, 2151 bp, Cannabis sativa
  modified_base (561)..(568): a, c, t, g, unknown or other
  modified_base (1470)..(1470): a, c, t, g, unknown or other
  modified_base (1611)..(1612): a, c, t, g, unknown or other
tgtctacacagtgaaaaataatcacgattatgtgattaaactaattagtctcatgatttatcagtacactagatttacactgatatgagaaatcaaaaatttggtttacttacactcgtacagtggaatgtcttttctaaggcattagcaaagtaagcttgtattgaatgtatggttatacattggactagaccgatattcacagtggaaaagatatcataaacttactgtaatatcttttctaggtaaatatcacttagttaatcttatatcaatgatctcaatcctaagatggttaggttcaagtttaagtgtattacatgtattctttgacttgttcgttgaagctaaccaattggattggcccaacacttacatcttaagaatacggtactgcaattgagtgggagagctaatcatagatatagaatctgtagcttctataaatacataaaaatgacatgatgatttccttagagcttggctaaacgagtttaaatggtggattacttattttagtaattatattagtttactggaatatcatttacaagtagctannnnnnnnaaggataaaatacattaaaggataaaatagtaaaattctccctactcgatgtaaatcatctatagaggatcattgattatttgaattgagacaatggataatttattgtgtatctgtacttagtatagagcgttctatataatcaagagtgcaattttgaatctatagtggagtcaggaggaattaataagatagagaatttactcggtaaattctagaactacttattgggagcttgattatataggcccatggtcctcacattaggtgagataatattgtcttgtagactcaattaattgattttattaatctataggcttatttgagaagaaaaagggaatttagggtttgtttattaattaagagactttgaaaggtctaattaataaataaattaaataaaaaaaattatttgataattaattataattaataaacaaatagaattgacatttatagagctagaattaaaagatggtatttgtgaaaagaaagataagtttcaataaaatggccaaattgaaactcattgggcccatgaagaattcaaccaatgaggtttaaataaagtcaattttgtcttttttttttattccattttaattcaaaacataaccctgatagctaccatatagctagaatattatagctcttattttcataacattaattgactctttttgtcagacaaagagaaaataaacagagctctctattattcgaattcttctctttttcttctcaagaattttgaaccctatagtgaatgggtaattgcccacaaaattcaaggcaatactcaagatagtgtggaagattgtgtagacttttgtcacctgaagggaaaaactaagttcaaatcttgatcgtactctgcaatagaaaggatcaagggttanagatctgaacggaaagagtcatattattccgatgtcattaatgtaaggttttctacaactttatgtgtttaattcattgtttttagaaaattcatatttagtatgttagattatagaattataatcaaacatacatgttannaaatctagatcctagtaaaatacttccaacaagccctccaagcaaatattttaacttttgggggaaatccaagacagttcgaaaagctaccatttgagactcattttggagacacccaccaaatttgtcattattggaaagaatttcattgaaatctccaatagttaaccaaggttagagtggatcaacatcagcaaagcattgaaaaagagtccaagaggcagacttattacttgtttcgggtgcaccctaaaaaccagtaaagtggaagctcgggctttcattaaacatcatatagcagtcaaagaaagtggagccatagtttaacaaagtaacataaatatcatcattccataagagcatgaggccaccactaagccccaccctaggagcttcaataccattcgagaaatgaaaagactgttggagacaagaaatcaaattaacacggagctttatttccatgagaaacaaaacatggggcgattgttgttgaacaagcaatcatagatgtctaaatgcactcgggttccccaaac

SEQ ID NO: 121519 - DNA, 944 bp, Cannabis sativa
  modified_base (901)..(919): a, c, t, g, unknown or other
aaaaaaaaaaaaaacattatattgagatgtgttattttatatttttctaaacaactaaagtgatatttcttctcacacttgaattcaaaagtaaaatttggtgtatatatttttatgaattaattgaatgagttaatttttttttaactgtttttttctttttgtacttgcattaagtaactatctattttgaattttcatgattttttagatcttgatatctacccactataattttgtgggtaataagtcatatatataaattcttttaagataattacatataacacaattattgataaaataattatattttttacatttaaatatttttttttaaatatttttacattttttttataaaaacaatacgaaaacaataaaaaaaatacataaaagtaacaagaaaataacatataaacaacaacaaaaaataacatacctataacgaaaaatagacaacaaattaataagagtacaacataaaaaaaattgtattttctgtagataaaattataaaaatcataaaattatttaaaattccgtacaaccgtatttttgtaatttattattgtttttgtgtatttgtaaaacactcccaatcctttttatgatttttcttaataaaagtatttagttaggttacaaattacattacatcaattttttgtgagattctttaaagtaaagtgagtatttttttttgtgatattcccgacacacaaaataatatattaccatcggtaaccaattatgtgtcttatatttttgctaataaattgctattttgagtaactaattacgtcattttagttaaccatttacttatattttaggtatccaagtacttatattttgggtaatcaagtaggtgttggacattattttaccaggatcttannnnnnnnnnnnnnnnnnnttattaacatcctaaataagaactt

SEQ ID NO: 121520 - DNA, 708 bp, Cannabis sativa
cctcactccctcactgaacaagctgcattggagtaaggaggtttgggctcgattaaatgcacctaaacactattttatcctatggatggctatgcatagcaggttgaagacaaatgatagactggtgaaatttggaatccaaattgaagagaaatgttgtctctgtcaagaagagaaggaatcggcaaagcacctattttttaaatgtaaatactcagaggagtatctccaaaggatcaatgattggctgaattggaaagcaaggagtaactgcttctcttagctgatcaggtggattggcaaattcagaaccagtaaccttaaaaagcaaattctggctgcagcttgtgcttcaatggtttacaacatttagaaagccagaaatgctagaatttggaaggaagagcagctattactgagcagattattagttggggagacaaaagagagtctaaaactacgaattacaatgttctagcctaagaaaatcaaccatgaagacaaagagtgggtgcaatcattgtaaatatatgggtagtaataataactatactttgaagatcaaaagatgtaaatagtgatgatatgtttcttagggcctctagttgaggtgcctctaggttgtacaaaattggtcatgtgcaatacaatttcttgagttataaaaaaatgtatttttagttacaatacttgttgtgactaaaacta

SEQ ID NO: 121521 - DNA, 1251 bp, Cannabis sativa
caactcacaccactcttgttgtagagaaaccaaatcgcaacctacaccacaattcacaccactctcgctgcagagaaactagaatcgcaagccaccctacggacgttttagttgtgaagaaaccagaattccaacctacaccacaactcacaacactttcgttataaagaaaccagaattgcaacccacccaacaactcacgtgactattgttgcaaagaaaccataatcacaacctacactgcaaccgttctatttatggaaaaactagaatcacatcctgatctgcaactcacactgctttggttatagagaaactagaaattacaacccaccttgcattcataccactctagttgtgatgaaattagaattgcaactcacactgctctagttgtggagaaaacagaattacaacccactccgcaactcacaacactctagtttctttgaggaaaaatcggaatcccaatccaccccacaactcatagacacacaccatttctgttgcaaactcatagacacacaaaaatcggaatctcttaaaaacatctttgagctatcttttctttaatatttatttttttttctataaatttacttgttttgctggaagtcataaaattaattaaaaaaattttaagatacataaaagtaaataacacatgtcaaaacattaaaaagtttttaataattgtatatataaaaaaaggctcactattataaaaatgagctttattttttatatttttgctggtgtatcttcggttgaaaaaaatctcgttattgaagagaattaaggtgaagatgtaagtcccgaaaagataggtccaaagacataggtccgcgatatttttatttctttttcttcttacttttatcttcaagttttatattttgtattataaaaaattaaagatatacaacagttttctaatagtagttaataaggatttttatctctcgaattttgatatgtaccaaatcatgttttctgaacttttttaggctactaaaaatttctcgtaaacaattcaaattgtttgatttaaggactttcgtctaatttacttagggaagtctgacatagataaaagttcaagaaacataatttggtatatattaaagtgtaggggcataatttgataaagactaattagcaatttttacccccgaactttgatatgtactaaatcatgcttcctgaactttttttgccattaaaaattctccctaaactattaagattgtt

SEQ ID NO: 121522 - DNA, 1592 bp, Cannabis sativa
aaaaaaaaaaaaaaataagagatagaggagaaaaacttagacataaaaatagaaaatttaggagtgttatacctaatttttgtaaaaaaaaaaaagcctaagatagacaccaaagtcaaccttaagactttggccaatacttacaaatgtcaaatgaagttaagacatcctatttgagagggtctcatgacacgtctgcatgtgaaactcatgaaaactattatacctaaatttcgatcagcaataagaagacacgtgtatcaagactgaaatatgaatcagttcaaattgtgccttattaaatgcacattaaataactcgccttaggaattatagttaataaaaatattcgaactcgccgcaatacatgcaatagcgagatatgagtaataactattgactaatgaaactagggagacaaataggttcattttaggataaacagtatacatataaaagcttttcaaaacgagtaaacaaagagattgtaactcattgatccacatactcatgagtaaaagcttaccgctcattgagccacatactcatgagtatgtttaaggaatgaaaataacttcaacatttattcacctcgcttttaacgcattgaagtaactaccttgctaatacatttctcaacgacaaaggagaaccgcgagatgcattgtaactcaacacttaatattttttcctacaaagatagttaagaaagataacatgtacacgacgagaaccatccaacacagtcagcataactgattatggataaagacaaagagcgattgaacaattatttaatattatcccatgtgcacaaagatgaaacgtggagaatatccacttttcatgaacgattactaatgattaaatcccaagagaataactgtcaccctgtgcatctataaatagggacagaactcagggtaaaaggaatgaccaattttgagagaaaagagataatattgttaaatcgtatcattttattctatattcaaatacatttatccctaataatatgaactcttggattataaagatttaacttcaaaatcatgttaaaaccttcttgttatttattatttattagaaaattaattatataatcaattctgtagtttatttattacaaaaaggctaagattttagttaactaaaatttgtgttaacagtttaatactttcattgagagcctttgtaataaaactcaaaaaaataacctcctcaaaaatacaactctaaatttgcattcacgatagacgatactccacgtaatataatgaagaaaatcagcaagaagagacaacccatcgtccaagaaaggagcctcaggcttcgcaaagaactaacactattgaaactcccccttctggaagaaatgttggagattttaatcaaattggtgaacaaatcccaaaaaggcaaagcaagaatgcttatgattcaaccagctacgttccactagtggaattagaaaataggcaacttcggcaatgcttggctgaatcaaactggaggaatgccatgttagaaggcgaaggggtagcagcaagggctgcacgaggagagtgttggttattattttaccaggatct

SEQ ID NO: 121523 - DNA, 2023 bp, Cannabis sativa
agagagagagagagagagacttatgggataagaagggtttgtgtaagtcttggatgacgacgatcttcttggttgatgtacaccaacagccacgcttgattcagagacacaaccaatagaaaatggaagaagtacaagtctttccattctctctctcatttttgttctttctaagatatataatcaaagagaatgaaagaaaaagaggctagatcagaagatgatcagttaggctcggaaagaaagagaaaagaaaaaagaaaaatatatggtgttttggttgatgaaacgcaaactcagaagtgggaattggtttgttataatatataaggtacatataactcatatatggctttgatatcaagttacaataattttacgtataaaaagtcaagctacaaacacaagctagttaggtggaagatagagataacacaaaaacacaactaactaaagggtatgttcggacgtagaatatattatatatatatacatgtctttgtataatgaagtttaacctaacatgcaatcatcaaattccaaacccacgtgtctacattgaacgtacataaaatgacataaagaatataatataagtatgataattagttaataaaaatccactgctactttgagttcacttaagttttctctatacggtggggtcactacttcacttacttctcttgtatagaaagcctatatctcttaatttaaaattttgttgttttttgtttacttagtttgaactcaacacacgaacaacattgaagaagtatatgctaagctatcttgaaatattttgttgggtgttttaaaattactttgagctctcatggcattgtagactgaattgggtatttcttcaattcaaagaaggagaggatatgatgaggatgatgagttgaaggaatagaaaatgattgtacaattatatattattattattttgttgaggcagctatatagcttacattacattacaggtagaataatagtacccactgccactagctacgaatattatttatttataacccccaaaacacataaattaaacggataataatattggtaccccactaccttatattctcttcatatgttcatgtgttattagaacaaatccccaacaacctccaaaaaaaaaattagtaataaaaataaaaataaaaaattatgtggttaattcataataagtgacttaataataattaggggttttttcataaatatggaaaaatgtagtagagtttatttttaggggttttttcatttttacacttcaaaacaattttgtttatatttttacggaattctacatagaaactcctattgcaactaatggagcaatctaaatcgcaacaaaaatctgtatagaaacccacatataaaccaccggagaaaccaccttagaaacccaaaccgtaaatttgaaaaaaaaataaaaaataatgtatgaggtaatttcccttacttttatatggcataaataaataatacaaaaaaaatatgggattaaaaaataattatattttaaaatatggggaaaaaataataaataaaaagttagtggggtacagaaaaaaattttcggaaatttttttttagttgctgaaaaagtcgtcggtgacagaaaaatcgctaaaaaagttagtgtcactggaaaagtcaccgggaaagttaccggataagtcaccatcgtcgaaaaagtcactgaaaaagtaattgtcgccgaaaaaagtcactgaaaaagtcaccaaaagtaaatgtctcaaatataaacaaaaaatagaaccaattctataatataatgaataaaaacatataattcaaacaagttataattgaaatataacttgttctgtaacataataaaataaaaacaaataacacgaaataactcaaatcagttataattaaaataaactcgttctatataacagtgttataatgaataaaaacaaataacatgaaataactcaaaccggttataactaaaatagaactggttatataacat

SEQ ID NO: 121524 - DNA, 593 bp, Cannabis sativa
tttttttttttgccaatttttttttttttttttttttttcaactgatggaccaatctcagcccatataatgtaaaatgaaatatttttctaattaaataaaaaaattaatcataaaaactcaaaattttctaatactactcatttatgggtaatacccattaagagtccacacattaggaatagtacttttataatactttttcacattaatttatcatattacatataattcaaccatacaatatatttcaattattaataatatagctaaatatcatcagaagttataaatttaaaggtaatcatattttttttaatttaatatattttaattaattaaattattttgaactcaccttacaaaacttaaataatgagcattgctattgtacacttggtacttagcacgtttaggcatgtcgtcttgagattagctagcgatactccttaaaagttattaccactacaaaaaaaaaatcttacttttagtcacagcaaaacttgtaacttaaagtgaaaaaattgtgactaattataaattataatttctatgtacgtgattaaaagaaccgtggctaaaagtattagtcac

SEQ ID NO: 121525 - DNA, 2486 bp, Cannabis sativa
  modified_base (827)..(837): a, c, t, g, unknown or other
caaacttacagatcattaaagattccatcaaacaaagtcaatttcctaacattcttagtcataaaattttaaggtaatacaaagaaaggagatggaaattacttcagagcaatgtttaatgacatgaattggttatgttcaaacaccaaccaccgagcgtgaaacaaagaatagggcaaaattagataccgaccttgtaacttaatttatgagttatatgtgaagttttatagaaaaaataatgcataaagtaaagatagatcaaacgcaagagttttgacattaccaaaaaaaatcccttttgttcacaattgctctcgttctaggtgacttcaatttcttctttcctctgggtttctctctaacacaccaatcaaacttaagaagaaccttcattttggatatagactcctccaagtctagcatctattatttcaatccaaacaacgtaaacatgagcaaatttgagctcaaatacataattcaaactattaaatccaaaaactaaagaaaaatatttgaattattcaacttccattaataattcacacttagtcaagaaataaggaaaaaaaacaaaacttacctttatataatcaaatatcagttcgaatctatccccattattgctctgtacgactgcaaaaagaaaaaaaaaacaaaacttacctttatataactaaatatcagttcaaatctagttattgctcttatcggttcacgtggctagcacaaagggaaaagttattcatagataatatttttgtgatattaatgggatttgttttatttttattttttattatatataaataaaaagtcacccnnnnnnnnnnnataaaccaagaattcagttatatatgcacactttatattgaatagatatttgtagaaggaataccaatagtttttatatgttacaaaatgaatgtgcatattaatagtttttttttaatgttacaaaattaatgcaaacacacttttattttatttttgttggagaaaatgttaagccctaaaaaattagaataaaaaagatagagaatgccacctaaatcttttgatgctttcctttatgtatatatatattgactaggcatcaaagtatgtccttcgtgcgacagtttaaatatttaatttagctattatttattgagaatttttaaaacttaattaattaaaaattaagctaaggaaagatatttttaaagtaaaggagacaaagatttttacatggttgggacattaataaaccttagtccacgagtcaatattattgaagctctttggctatggattattttacacaaatgttcttgccaaatctcagtagagtttctagccaagattcataaccctttgcatgaagggatagaaccctatttataggctgaaaatagttcttgggtgaatacgaacccattagggttttatacatgaaagcccactaatggggtaaaatacattataatactgactttgggctaggtaggtaagacctgatttaagagataattgtcgtttgtacggagtggtaccatttgatggtgacaggtggacatgcgccaccgacgatgtacagtaaatgtcagagtagtgggtgttgcacaaaaaagtatgtagctttttgtgttgtgtgcctttcacatggttgacgtaggggacaaacccctgattttgtgggattgtgttagaagggtgacacataggacaacatccatgcacctcttcgactgcctgttcaagattaccccatgagggcatccacatatgttccattaagtctttccttctctagacgagtttccctttcgagaccaaaagggcccagccttatagagattatacttggcttgcaattaaatctggagccgtggttgaactgtatcatgggttgactcgctggcttaattgggcctgtgaattggcccatcttgcttgatttggggaccttaaaagtacacgtgtcactcatccagaaacacatttacccccaagccttcggggcttaatagtcgcccaagcttgcaactgtcctctagacctgtctttgtgcgtgggaccatgaacagttcatgcccttcaaaattctagggcagtgggtcacaaatggttgtgaacctttcattttccatgagtggagtacacatgttgccaacctattatgcctgtgcacatcacgaggatcaaggaagcatatgaaatcttgtattgtgaaacgatggctagtcacgtcagtgagacttctgaggtgaatattatcattaataatcctcgatcctgtacctgacatttaatggaaaccattggtattttcgggtggatggttcttgataactgtgttttctcaggtgcgatttgagccattagatcatgagcaagtgaatcaccaccttgtatataaatggggcaaaggttatctagttaccaccttttccattttgaaattcctcctcaaatttcccgagagagagagagagagagag

SEQ ID NO: 121526 - DNA, 1391 bp, Cannabis sativa
gttctcccttctataatggctaacttgttggattaaaatctctaatgtgggctcatatgtatttgtgtgtattgctatttaaagtttgacccaaataaagtgatcgttttagtaactgtgggtcattgagtattaaagtgcatgggctaaatgtgtagataccataagtgatttttctaatacattgaggggctaaattagaaatacttaaaattaataacctagctatgaggttataaataggcagtggtccccaagaaacaagagccaatttttattctcatctttccccatcaagagagaaaattagaaaaccctaaatcttgttttcttggaagatcattacccaaattcaccacaaagattatctatgcaagatgaattaagatcatcactatctatggattaaagtacgattccgctatttgagttcttttctttgaatcaacaaaggtattctttagatctatgattatacacttataattatatgtaatatgtttatctatggagttgaatattgttattccatattttatgagtgataaataattttaataagtggtatcagaaccacctttgattgatcctttgagaatttaaggttcgtgtttcaaaaatttgggaacttttaaaaatttaaaaaattaggttttgttcttctattgtagccattgttgtatttaaatgccagggatgaaattatttttcgtttttttttctttttgaaattgacaacatcagtaggtgttgtatgtttaatgcttatacataccgataaatatatatacacattgatgtgttttaagttttagattattattgtatctttttaactacgtgatgttgataatattatggatgaccattagacaaagtgactaaagtagcaacaatattatgatcgaaggcagtaaaatatctaatattattgctggtgtgtaacaccactatcaataatccaaaaagtagagaaaaaatcagagttaccgaacacattaaaggcactcggaggaacatctctagaaatagatggttgctggagctgctagctcaggagttgaataagttgttggctgagctgcagctgcgaggtagtgtcctgtcccgtaataatagagactgaagcttgattggacttggttgaatcgggttgtttgcatttgtcaccatatccatgagggaaaccacggagaaaataacatttctcaaccaaatgattaggtttgaggcaatgagaaccagtagggctagggtttcttgctccgagaaggattggcgctgttgttatgggttgaaggaggacgactagatgaagcaatagcagccataacatttggaggagcaagagaacgttgacgctcttgctgaaactgttgggttttatgccc

SEQ ID NO: 121527 - DNA, 739 bp, Cannabis sativa
  modified_base (69)..(71): a, c, t, g, unknown or other
  modified_base (113)..(115): a, c, t, g, unknown or other
attttagggatattctaaaatgtgtcatatcccacaaatattacatgttatgtgtttaaaaaaaaaatnnnaaatgttatgtgttttaaaaaaaaatattaagtatatgtaannntagaaaatcaaatttcccttgtctattggtacattaactgtcctttagtatttttacattagtgtctaatttctacttgacttcattgagtatttatatttatacaattcactacttattaagcttctctactttatttttcaaaatatgtaaaaaaaaattattttacctcacatattttatattttatattatagtatacattaatttctttatatatttatttttatcatttaaatgttatatttataaatatcatttattcatttaaataaaagattttttcatttttacacttaaaagcaattttttttttacattttacggaaattcacatagcaactaacggagcaacttaaatcacaattaaaattcacatgtaaaaccgcaataaccaaaactataaatttaaaaaatattaaaaaataatatatgagataattttcctaataatagtatatattaattattacaaaagtcttttttaaaaaaaaaagaaaataaaataccagctaaaagattttttttttgaaattaaagcgtatatatattagaaggaaacaaatagtcagacttcacggtcattatagaaaaaattactcggaatagtagagacttctacca

SEQ ID NO: 121528 - DNA, 1278 bp, Cannabis sativa
gtaccgtgtgggacacggggatagggttatgatcgggtgtatgggcgccaggttataacccaggatcttagtatgttatatgttaagcttttcttactaagtctgtcgactcactgtgctatttccatgtgtaggtaagggcaaggcaaaagctgtggagctgtgagagcgagcacgtgaagattgtacatgtggcggcggttaggcctggagcgtacaatctttgagacattgaggcttttgctgtatagtcgtttggccacaaaacttttgtatatgaatagcaaacttttataaatttattttctaaacgggatcctgagattttatatacgtaatactttaagtttctaaataaataagaaaattttaattaatcacgatttttaataacctcattgattagcaacgagctgcacagtacgtaaaaatcacgccaacacacctatattagttagggtgttataatttggtatcagagctgccaggttgccttccgaagatcatcatgacatgtacaatcatcatcagcagttagctcgtttcataattcattaagcttatattgctttagtagtttattcctatagtatgatttacgaaaagcctattaggaagcaagttagtagcttgatactagaataggcgcatgtttttaatttccaaataagcggtagtagtaagtttttctttgatcccaatctgaccagaatagctcttggctacgcaagcagttctaattagtatggacgctaggtgaaatagcaggagccagggaaattcggttggatccagtggtggtcagggagctcagattcccctaaatatctgtggccatggtagaggtcccaggggcagggcacgtggccggggtgatgctaacccgccacaggttgcccaagctgccaaagatcgggaaaatagctttgcagcaatgcaagccaggatcaatgagcaagatgaagggatttggtagttgagatagcagggtgctcctgcagttcctgctctagaaagaccaatagctcctgcccttgctgtgcaggccgaacctgtagttgcagtaaaccagatggaacccctgtatgaaaggttccgtaagtaggcacctctagtttttctgggatgtcgcgatgtcatgaaagttgagcaatgactaactatgataaccaaaatccttaattttatgggcatcaccggtaatgatagggtggtctgtgccactttccaatttcaagaagacgctctagtttggtgggacatggtgtctatgattca

SEQ ID NO: 121529 - DNA, 1030 bp, Cannabis sativa
actacaataaagattcgtgcgcttgcgagttgataaatgtaaaacgtaccatttcggtatacaacaccggttcaaaaataaaacaaacttagaacattagaaaaaaaatgataaacacaataaaaaaaaaatgatacatactcaaatcaaaatagagaaaaaaactaaaatgaccggttccattaaagcaacatgagccaatataataaaatagaaccaattccattaataaacaacaacaacaaaaagaaatcaattcggggatttcaggtagttggatgggagctgtgggacctgagattgccaaggttatcggggtgaaagaagcgttgagttggatcaaatgcaaagggtggattggggtggaaattgagacggataagctagtggtggtgcaggcggttcttggctcagtttcaatgccatctcaatttggtttcttggttcaagattgtcggtctttaatttcgtctcttaattgtgtgtttatattttgttaaacggtctgctaaaatttaataaaaaataaataatacaaaaaatagaacaacaattaaatgtatgaactaaataaccaaaaaattaaaaaaaaaatggactacaacttactacaatgaacttaaacaaagcagggatgaaatgatgatcaatacttcaaaaccgcaacaatctcaaacactttcaaccgattacaagaaaaaagaagagaaaataaataatgcacaagaaaaaaccacgaaaaatacagaacaaaaaaaatttaaagaaaaaaagtttaaaaaataatcgaaccactttaatggagcaacgataaagaagaagatgaagataaaacaaaatgaaaagaaaagaaaatgaaaaggaaaaaagtcttccagccctaaacatgcactaaagatgaaaatgatgatgaataggaaaagaaacaagaagaagagattgatgatggcagcagtgacgaagccagaaatttagttgagtgatggcttaaataaatattaagtcaaaactaataaaaataactgataaa

SEQ ID NO: 121530 - DNA, 935 bp, Cannabis sativa
atatgacaaacttttttcatgccctagctaggttgacattgttaaacgtgccttccaccatataattgagtatatataaataattacattcaaatgacacactaatgtaataatagttaaataaaaattctcaaagatcaaaagctcactctatttcaaaaattaaaaaaaaaatacatattacttaattaaaaaaatttacatacatgtattgcacttaacatcatctaattgaacctaattaaaaaaaattaattatacttgcattgcacgtaatatcaacctagtatgaataaatagatatatatttatatatagagatataaattcacatatttatatatttcataacaaagtgtattattagaattacatttaaatagatgagttatgctttttttcttttattgaactttgtattttaatatcattttattggtcataaaatagttttttttcaaaagtgataaaagtagtttttaaaattattattagaattacaacatttgaaattggaattggaagatttatatgagtataatattaaattattattagattgttttgaaatgagaaaaatattaattaattagactaaaaattatgaaatataattatattagaataacaatcacattgaataataaatctatatgtttggacttctatctaaaggttaaatatatataagctcttcttttcactacacttttatactaattattttgaatatattaaaaaattatataaataatttgcaacaataactatgactaaattgaattaattaataaaaaagtaaaaagtattagaaggcaaataataagatatataaatatactagatgagagttacgtggcttgccacgtaaatattagttttattttaagttcttgtgatttttgtttaagaatttagtgactaattgtaaatta

SEQ ID NO: 121531 - DNA, 660 bp, Cannabis sativa
aataataataaatatttatttatcataatactaaatatttaaattttaacaattataattattattttatatgatggtgagtaattattattgataaattatataaaagtaactgaagttaccaaaacacacatttagtttagtagttagcttattatacttgtaataaaaaataaaaataaaatagcatgaatataaaatatttggaatgacacaacttgacttatattttttatgttttaacgcaacacgacttatattattttatattcttttcaaaatttgggttacgacgacatgacacacacatatttacaattttatttagtaggaagaaattatttttttttcataaaattaaaataaaataaatattataaatgagaaatgtaattgtattttgtttgccatccccttcacagtcacatatcctattattcaaaactttgatttttattaaaaaaaaaaaaaagagaattatattttacggaatacttacaacctcatggatcaccaactaagaaaagacccaaaagccactaccttcagttcactcagcagatctcgtgttcaagtccaaaaaggatggttcaatcgaaatatccttcccaaagaatgaaacaactccaagagttttctcaactcaatacatgatgtcga

SEQ ID NO: 121532 - DNA, 908 bp, Cannabis sativa
atattggtctcctgaaatttaattttagcttttttcctgttcggaattttttttacacatcgattgattaattggacacatctgtatatgatgagcattgttattagacataagtacgctataaaatgttgttttatagatagttaccagtggtgtttataaccattatgagatgatattttactaataattagtaatattttataaaaaattattacattaaattatttagaacttgatacttaattacatcaacaacaataaaacataccttaagtggtgctagacacaatgctaccttttagcatttctagatatgcaatagttctaaaattacaattttggtcttaacgggagtaataaggatctaaaggttaggtgaaattaaagagcactcaagatggaatttcgggccataattaacacaatatggtaatcaaggcatgcaggcaaaaaagatagatgtgcctgcctaccatccaattaataatccatggcttctaaaactttttgggtagctttaaattttaaatcaaaacaaaatattatttcattataaatattgctaatcattcatgatcatcactatgttctaataagcctttctttccctctttggtttttaataaataaataatatcatcatggaggtctcatcagtttgcaccttttcatttcaaactaattatcatactttattaaaccctcacaataagaatcccaaaaactcattattatcttatcaacaccccaaaacaccaataattaaatcctcttatgataattttccctctaaatattgcttaaccaagaacttccatttacttggactcaattcacacaacagaataagctcacaatcaaggtccattagggtaagtatgtgtgtataatatatatatatatat

SEQ ID NO: 121533 - DNA, 571 bp, Cannabis sativa
aggtgattgcagatgggaagatcagattagacaagattgccacagctatatcacaaaataactaaatttggagaccgggaggtaagccaggtaccaaactttagacacatttaaagataaagcaacacaagtaaaaaaaatgagctataacattatgagaccgattagagagaaataaatatccatgaaagaaagagatttcttttaatatcatgcacaatgatactaaactcggaagactgcttatcattaattactaaaaataacttgcactaactgaagacaatcaaagaacaccaaaacttgcctaaccaagttgcaaacaaagaagaagggccatgcaacaaagccacagctaggagtgttaaggggtcaggtcggatctgatccggctatgatctaacctgatccaaatcatgtaaggatctgccccgtctcgccctgccccgctagatcaaatactcaaatccgacagatctgacccaacttattcagatcaagagtgctacttgtgttctttaagttgttagtcaaagcctaccatttggttcgggtcacttgtgttctttaa

SEQ ID NO: 121534 - DNA, 1577 bp, Cannabis sativa
  modified_base (559)..(565): a, c, t, g, unknown or other
  modified_base (1510)..(1540): a, c, t, g, unknown or other
aattcaaataggtaaatatcccctctaaaatagggaaaataacctctttctatcttatatataaattacaaaaaagatacttagatccctagaatattggatagtatcttgagggaatatccctatctttgtgagttgttggatatgtcccgcaactaaaatgtagcttgacaatcttccaaaaggttcgttgtggaccccaccattcattcagcctctcttcgaggctatctacatgtgctagctggccagccctatttttagtgcctcgccgacacatgggacttcattggccagctaggtatgttccggccaaagttccctggctagccattttcttcttgcttggccttgcttgatttccttagaacccttaaaaattgatatgtcgtgcaaggtgactttgtccagttattgacagactgtattctacgtggtttcaattttgtctatgtggacatgccacgccagctgggcaaaaaattaggataacatatatgacatggactgatatgtaattaatctatctttatcaaacatgtcgtttactataaagacnnnnnnnatatcataatgatgatcaattgtagatcaacctggaacttgagtaatcatgatctctaattcacgtaattaatttctttgattcactcattaaagtttctcagagaagatgattcttagaatttttattttgggaatcgaataatatggatggctgggaacatgatctacaaatcatagaatctgacttttttaacggatcgaatgttgattccctttaaatgttaattctggaactgaaaacttgtacacaaatttagattggatctaaattatactttcagtaatgtagtaacggtactaaaggataaagaagtaattagaagaataaaatagtaatttgaccaaaactaattatgaactgacacaaggagggctaatcactggaatcgattatatcaatggatattgtaataaactcagtaaatataattctataattactaagagttaaattctatatttatagtggagtaatcatggaattaataaataagattattcagttaatgagattcaataaataatctaatttattggagcttagtattatagattcatagtcctcagatcgccaccttgcaacactgtcaaggatatgggtaaagctaaataatgatgttcagaaaatttattttgaattagaagaatagtaataatttattttgtaataaataatttattttaaatttaatatttaaataaattgggaaaaagataaagtgttgtcaggacaaagacgtcaccattatctaattaagacaataatggcgtcagtcactatgtaatgacacagtgataagcgcatatgagataggatggacccactatatttatttttggattaattaattaattcaaaaaataaatatttatctaaatttgaatttaaaagtagttacagatatatgtggtagttgagattgttggatatattttaccaggnnnnnnnnnnnnnnnnnnnnnnnnnnnnnnnacatcctaatatgaattctaaaacgatgaaataaaca

SEQ ID NO: 121535 - DNA, 548 bp, Cannabis sativa
attatttttatataattttttaacgttagtagagtttgagtaattacttttaaatcaaacactatatatatatataaattatatagttttagttttacattagtaattttaattatataattattattcgtaattttggataaaggacaagggggccttcacagaagcctagtatggatatcagacctttcccttggcccaaaattataagttactcggcccatccatcgagaacaggcaaaatcggatcaatagtctgattctcgcatcactcctcggtgataaattaggacaacaagtcctcgataataattttacgcttagcagatgaacaatgtgaactcaaggaggatacactcaggggtcatttagaaacgaaatataaaagggcatctgagatcacttagtgtcccgaaagttgcccattatgtggcactcttctaacataatctcgaaaaatgtgacaatcccctgtgtgaggccttggaaaagcacacatcaaaaagaaaattacctttttgggcagacactctttagtttggcattcc

SEQ ID NO: 121536 - DNA, 613 bp, Cannabis sativa
  modified_base (587)..(587): a, c, t, g, unknown or other
gcttaagggtgcaagacttcctgcgaataactatgatcgctaccgaacggactttagcaaaggcaatgtctggcctcttactactaggcttgctcgacgggcactcaccaccactttgcctacactcccctctcgctcttcacttgcccctgccattctttttgaaggagaatcatccacccctatgcagcctttgcaaagatcatctcactcccctgctagtccgaatctcatctcaccatctacaaatcccactatcatctcacatagtgcatctccaactactactcacccattaaactcccccactatcacccctgtgcatagccgacctgcctcctccaatgtaatacataatccaactccacaaactacttctaaattgccaccatcaacttccaaccctgcacctgactcttttaatcaatctaacccaactgttacagacttatcccatgtatacataccttttgcgggtcctactcctttggcccctagtctctttgcaacttacccccctgccataaattcccagaccatgattccacctacaacaccacttacttctgttaggttttatgccctanataaaactctttacaatctgattagt

SEQ ID NO: 121537 - DNA, 1259 bp, Cannabis sativa
aggttactttgtgtaactagctcaacactacatgcaccaagttacgtttagaagcaaacctaaatctcaaacttcaactaccagattactttttcaaaataacaaggttctttgttaacaaatgcagtcacaacttaacaaactgtgactcaaccatatttagagatacaattatcatgtaacttttagaataaaatcaagccaaaaataaactcgtatgttactttttttcaaattaagatggtactttatgtaagaatgcaataaaaacacaaaaaactatacaaaaattaaagataaagataccaagttactttctgaaacaaaaacaaaacataaaattcaacaatcggtttacttttttaaactaacgcgttactttgtgcaatcacaactcaacaaacaatacaatatttacacatacatgtaccaagttacttttagaagaaaaaataaagcaataaatttaactatcaggttactttttcaaagtaataagttctttgttaaaaaaatacagccacaactcaacatactcaactatatttagagatataagattacttttagaaataaaaagaaagcctataattcaactacaaagttacttttttcactattcttttattatttaattaagtcttaatatatttaatcaataaaaaataaaggtggtaggttactttaacaaagaggaaaaattaacaaaaaggttacctttctttttactaccaaggttccagtggtccttttttaccaaaattaattaaggcttaatatataggtagggctaattcattaagttaaacaagatacttttttaccactaaattacttttaatagtttgatgagcaaaaaaagattggttatgaaaaattattgtttcagttaccaccttaaaactaaatattaattatattggtggttgtgggtgataaattacatttccatatgtcgtaactaactcaacattcacacaagtatatatatatttgagttacaattgatttaatcaaatacgatttgattaaatctgagttttgtttggcgtagcatatggactgctcaatcacttgttcagctagaggctcactggattgttggtacgggtgatgatgtcaatatcttaaaccatccatggttatgtggggcagaagattcctatgttaccacaacacatcctggccttgtcaataaaaatgttatgtctttgttcactgaaattccgtattttaatattcccagtttgattatttaa

SEQ ID NO: 121538 - DNA, 576 bp, Cannabis sativa
taatattattgtataaacttaaagtattaaccttccactactatattagcaaacaatttgaaaaattaatgaaatacaattggaatagatgtgtttacaatatttttttataattcaaggagcattttggccagacaaaaagagtttaggagaattaattttggtcaaataaaaaagtttgggggacaaaataaaaaagaatttatttcaatactaatagtgggttgatcacctatagcaaaagacactctatgtaataaagcggatgctccagatcttgcttgtggaatagccaagccatttcacttattatactaaagtcaataattgacactaatccattcaccaagaaaaagaagcactactacaaaattaatttttagagacactctacagtgactcgcacaaaaagtgcgtgtcactaagtattttagagaatttttagtgacgagcattaaacgaccttaaaattttaatattgctaacccacaatacgtgtcaataaatgtaacgccctaatgctaaggcacgctatagtgctttttcaattattgtgcaatctttgctaatcacaga

SEQ ID NO: 121539 - DNA, 2431 bp, Cannabis sativa
  modified_base (2404)..(2404): a, c, t, g, unknown or other
agtcacaaaatcatgaatagattcatgctgtataaatcacttgtctcattcaagataagtaaattatatgtgtagcggtagcgctgatcggccgatacaataataatctgtccgcatccaaacacataaaacaacaaatatccacatttcattggagcttctcaaactcatgaaaccgaaagaaattacctttaacgtaagatgtatcatatcatcatcatttgataataattagcacaaagcaagctgtataaagaataatttagcattttcacaaatgtctcttgctataatccatgataatgcaggaaacacacatatatatattatacgcatattggtcgtaaatcatcactcggacgtagtactacttgagaatataacatacaacttttgttgaagttcatgtggatcaatatattcactcatattatgggcaacctgaaaaattatatgaagtgttgattaatagagaaataattatatataaaattaaaaggttgataagaaattgagtaattatttcaatattacagccgtatagtttctattaattacctcagactttagagtgtgaataagccttccattgactttggtagaataacactcttcaatgctaagtccttgttggagcaacacttgcagaacttttgacaggggcaaatggctactaattacaatctctagaattcctcctaagcatgggcgaactataatattattaatgttaactaacaaattatagttctgcgatttacaattttggacattgctactaatttcgcaatcaatgttttgatgagtaatgctcgaattaaggaaacaactacttttgagatcatctcttctgactcttgaagcttcaatcttagtcttcatgtaatttatataattcacagcctcatgcatgtgatcggtgattgagcgctttccctgcaattattttcatgacaaaagaaaaccctaaaatataatcttgatcacaggatgagaagacatttactaattgcgtataaatacatatatacaacctagatctagacatgataatagggttaaattgatcatcattggatcgatcgagtttatttaatagtaaagtaatagctatatatataaatattaagggtattcaattgacctgaattaactcttgaggaagtagagatcgaagtgatgctgttaggaaagtcatatgtagccttctttgtctttcattgtctctacggaagatcttcttttcactattattgtggtgatcgtggtgtcgttgtggttgcggataattaatgttgtcgcgggtacagaatatcgtattatgggtctgccctcctaccatatctatggtatctattccaaccagatcttgttggtggggatttgaagagatttggggtaccaaatcatgatcatagctactttggtggttaggaaacattgtacaagatcggctaagattttcgataagctccttctgatcacttaaattcgtataataatacaattagactccttcccactctcttcttttgttctttatggatataattaaacataactaaattgatgtccatatatattttataggaaaagactttagattccttttatataggaaacgaggtttaaattaggaacttcaatataaaagctcataattataattccaaactaatgccgtcctagttagtcaagccacaatatagaaactttaaaatttcacatattacgacgtgctttattaccctttcactgaaccaataattgcggctctttcacaccaatcatatatgtatattgccaaggatactaaatagtactgtccagcaccatatagtaccaagtagcacattcatatacattggtatacatatctcatcactgctacaaaaacaacttttagagacggttttttacagctttcagcgttggtattggtaaattcgttatcgatactgattagggcgacgctgtaggatttaatttaactgacaccatatatacccctatgacgttggttattagctaggaactgacatcataggggtatatatagcgtcggttcctagcaataaccgacgccgtatatggcgtaaaaaccgacgctatatatacccaaattttaatttttttaatttatttaaattatatatttattaatttatatattattttatttaatttaaatttaaataacatatttatttttttaaaaggtaaataaaatattattgaaatcaattttagaattggccaaaataaataatttcatttcatagaagtaattaaatattacacaaatattgcaaaattagtccaagtgttaactagataataaatctaactacaagttaacctaaaaaaataacctagggaagaaaaattcttgggcctttcagcntcaatcgtcatcgtgaatcaccgccat

SEQ ID NO: 121540 - DNA, 826 bp, Cannabis sativa
gggtccaaatgtgcagccctaattgcaagaatggatacattttccctattagcgattgttctttaagcacaagaatgtactagatctttagcttcaagaatacttcgccagatgaaacactactgatattccagtcatattgaacaactaaagccagcatcattctgatagtttacatttttaccactgtagagaatatttctaaataatctacaccttccacttaagtgtagccttgaactaccagtcatgctttgtacatctttggttcatcatctgtcatgcattctttaattcaaaaaatctatttgcaaccaattactacatgttctccaagcttaagaactacaattcaagtcctgtttttcttcaatgataccatctctaaattcatagttgcattctacttcttagcttgtttgttgttgattacttcatttggcgaaacaacattttttatcatttttatctcctagctaaataatttaccttttcacatcatatgctttaacatagagattctctaaaatatttaaagaactaaactaaaaacacactatatcagatgctctaaacttcttctctattttaaagcttctttaaaattcactgagcactattcattaagacaaacaacatgtaaaaatagctaagagtactcacatcagatgctctatagttgagaatctttaaaaaatttaaagaattaaaccagggccggcccaagcattttgggggccttgtgcgaaattttaaaattgggccctttagaaaaaaaaaaaaaaccatgtacattaaaactacaattttgttagtagcttttttt

SEQ ID NO: 121541 - DNA, 2545 bp, Cannabis sativa
  modified_base (2516)..(2519): a, c, t, g, unknown or other
ggatcggatgcccacccctattcacaacaatactaattgtatcacatacaatgtactatgcaatacaatatacttttcttacctcaagtttcgatttagggatgttggccaacctacttggagtacgattgatgatctcagtccttatgtcataacaataataaactaataagtgtttatcccaaaattttgcttaacagttacaaaggacaacataatgtttcctaccaaatctcgtagctcaaatacactaaaatataacctatatattggctttaaaacatacaccatatggtaaagctcatggcaagcttcaaaataaaatatagaacgtccaaaacagacacccgagtataaagttatggtaaaaatatgattctcgagtttcaagactgcccagtttcggtaaaccggttggttaggggcaaaaattaaatatgattttacaagtttacgcactcactgaaatgctaccgaaacttttccaaactatccaaacttcataggacacatatataccatacatactaccatacttacgtaatagaaactaaaatcaagctctcaattggcaaatgccaccaatatttggacttaagctataaaaagttctaaacttattttttaacctaaaatcaccttaaatccaacaagaaaatatcggaactagtcccatgactatccgagaataatcctataaggtcggaacctttataactattctaatttacaaaatccctacacgaaactaattttttttaaacttaaaacgaaattaaacattaccttaagctttcccgctttgagaattcactatcccactactaccagagcttagatcgctagatttcgggttgaaaatcgaataaaataaatatagaggggagagggttttgtcgaaaggggatgacgagggttcgtctgtttagtttactgatataaacttataacattatatatataataatatatcaataatcataatataatatattaataatattaaataatgcatgattaggaaattgatttaggcattatttgaattgattgtgcctttcaagctccctgtaattttattttagttacctttttttttaagccttaacctattatttatttctacacatattgagcctaaataagataaaccaattaatatctaaaatttgaccctaattataccataagtggatctttaatttacgagaattcagatgggaagtttgttatttgtgtgtggaaaaattactattttgatctctatttttaagccaaaattgtttcacacattttttcaaaaagattcacgctaatctaatacttcataaaaattcttcttaggttcattagactgtctagttgacagatcatctattttgtgttgaagcttctgcaactcagcatgatactttttaatgataattttaaaagagccagcaattttatttctccactttgacagcatatccgaacacaagttaatctccccaaaaaaattcatctccattatcccaacaatccacaaataaaacaaaaaatgggtagatcctcgtacttaaaggttgcataacatgtcaggcctccttcaatttcaagtttcactttgcgtttaagcaagacatccacacagattcttactctaattcgtaagtaatcacgccaaacacccgaaaaattattagggtctgatttgacaaacattccaatgtaatcaccattaccctagaccacctaatccaacactttgtttcacacatattttccaaaaagattcacgctaatctaacacttcataaaaaaatttcttagcttcattaaactgtctaattgatagatcatctattttgtgttgaagcttctgcaactcagcacgatactttttaatgaaaattttaaaagagccaacaattttatttccccattttgacagcatatccgaacacaagttaatcttcccaaaaaaaatcatctccattatcccagcaattcacaaataaaacaaaaggtgggtagatccttgtacttgaaggttgcataacatgtcaagcctccttcaatttcaagtttcactttgcgtttcaacaagacatccacacagagtcttactctaatgcgtaagtaatcacgccaaacacccgaaaaattgttagggtctgatttgataaacattccaatgtaatcaccaataccccagaccacttgtgaagacaagaaccccactgtcatgttatacaattgaacccacatctcaaagcgattaagcagaacaagtttgggattttgacttgattagaggtctttcaaaaatcaaaggaaccctatcaaaggtccacagactaccttcaattactctttcgatatctacttcatggaagaactgaaaaagaaaaagatttagttccaattcctttaggtgcactccacggcccaattgccaaagcggtgccattttgtgatgcattgtttgagaatcgatagttcgatttgttagaaaactgttgggttttatgccnnnnataaaactctttacaatctgattagt

SEQ ID NO: 121542 - DNA, 2027 bp, Cannabis sativa
ggaagattggttcgaactgctttggatccttggatacctagccatgactctttctttcctattcgttatgcagggccttcaactagggttgttgcaaacttgataactaaagatcatcaatggaatgtccccattctacaacaatggttttctccacaagatgttgatcgaattctaactttgcccttaagtttcttccataatgatgattctcttatttggcaccaccatttttcgggtagctacacactccaaacatgataccacttggccacaactattgctgaagctcaacatctccatcttcgtggtggaatttttttttgctccttgccagctgccacaaaaggtgaaaatttttgcttggcgagttcttcatgacgctctaccagtggcaacatctttggttaggcgaaaaatcatcactgattctacttgttcagcctgtaaacaagtttgggagtccattagacatgcgctttttaggtgcaaatatgcccgatcgtgtggcaaaatacacagttgagtttcaattggattaagtcgtccgatatgcataaaggtgattatttggtgtatctctcaactgttaacaacagagaagagatggagaaaattatttgtacactctagtctatttggatagaaagaaactgagttattcatggaaatagaactaaccatctaatgttcttgcttcttttgatgttaactacttgcaaaatttcagagctgccacaatcaagtatcatccgacggttagcccaaccccaaacctctccccactggttgtagtttaagctccatggaagccgcttgttgaaggatttttgaaggtgaatgtggatgccgctctcaatgccaatcgaaatattataagagttggggttgttgttaaggattcacaaggccaggtgattgctgcactcgccaagcctttaattggaaatttgtcatctcatgaagtggaggcaaagactatgttttatagtctaaattggatcctacatatgcaattgcctattgcataagtgagaacgaatgctttaatggtctcaaatgccttgagaactcctctgtctgatattacttctttcaaaaatttaatcgtagacatttcgagtcttttattctttttccctcaagtaatgtagttcatatcaagcatttagccaatatggttgctcatagtttggctaaatttgcgttaaggatggatgaagcttacttttggttggaagatatacacccacctatttaatctattattataattgacttatctcattaatttataataacaagtatttattctaaaaataaaagatcgacattggataacaggagaaactacgattaatattccaaaataagaaatatgtcctttttgtgagcctagtcacctagtaaaataagtgacaagtcctaatttccatacaaagtttaaatttatcggaagccaatcataccaaaaccattgcacattgtgagattaatatctttggaataagagttctaatgaacatttaaatttcttctatttgtggggaatttagatttgtgaggaatataacaaatatacaaaaccacaaatatattatgggaaaatggtagagtcacaaaaaaaatatctgtatatacaaatatatatatttttttcattatgtgtcactctcatttttaatactaatgtttaattaattcctcttatattatttttttaataattttgtgatattaatatgagaaaaattacttattctcaaaaaaaaattaaatattaaatatatgatacacccctaataactctaaaaagaattaaaaaaaaacaaaataataatagtgcattgtaatttatcctctctaaagaaaaactctaaataaaattttttaataataaataaagaaaacaaagataaattacaatacactattacatcaatagatatatatatatatatgtgatagcgtacaccgagatagtttattttcttgctgaaactagtgtctgacaagaagaatttatt

SEQ ID NO: 121543 - DNA, 1007 bp, Cannabis sativa
tattaattttaagtaaaaaaaaaaataaataaataaataaaaaaaaaacttatcacaaggtgacaacatcaatcaatcaaataaaaactttatacatatttttatctttatcattattaatttttaataaaaatgaaaaaaaattatattaaaaaaaacatttaaaaaaattgaaaatgccgctaaaagtgatagctcaagtcaccatcaaaagtttatatatgaaaaagtttaaaaatggcagtatactgccgtataaagtattgaaattatacagtataaatgtaatttataccgcatgacagtataaaagtaaaaaataggcaaaagatagtacattgtgtaattttccctttttctttctaccactttgcctaaatttataaaataactcaaaaattaaagtaaattaaatatttctatttaaataaattttaccattaaaaataaggaatatttaatttatattaattatatatgcataaataaagatttaaaatgtacaaatttaagccttaatcacaacctccaactagcttattgctagtctctagcaatctaagcgaacaaaaagaatgtcaacatgatattttcaggttaattttttttttaaaaaaaatgacaaaaatattcaagcaaaatgttagtaataagccaataagaactataccgaattaccttgaataaatctagagttgtgagtatgtgtacaaaacttgaacatttcttaccgtaaaccacaacacatagatgctttcgaaaaatttaccaagtgaaagtctcaactctattatcctcacatgttttttttgaaaatatttatttatggctaaggatttcactcatggagttggaaagataaaagtaagcactcggaatggatagatcaatttaggataatcatttaaataaacattgaaacgaagataggttatgaattatttggacaaaccaccataagagtaccactgttgtgaaaaattgtatacgcaagtgtacacaatcgt

SEQ ID NO: 121544 - DNA, 640 bp, Cannabis sativa
gacaatatccacaacaacatttaatacttttaagtctattcagatctaatccaattatatattagatgttagattttaccattcaatttgatccaattaattttagccatccattagatgttggattagatcggttatattcattgaatgtatttcatgcatatgtattggtttaatttgtttatctaatattttaagcctagtagtttttggattggatcagatctattcgtttatatatatttttacttataacaacataaaatttaattactcatctaaactaaataaaaatattaattagttcaattggatgttgaatgtgttggatttttagatactccatccaacatccaatccatgagctcttgtgctcagaggaataaaataagaataagaagagagtgtctaaaagaggaggcagaggttcttcacgtgatatatagctatgctcaggtttcacttaaagaaaagagagttcagtctacaagaagctggcagagatttagctattggactacatccatctatgctacccaaactggcatatcacatttggatcatatccaattggcaatgtatttggcgttgattttgtaaaatgggtttacctttgtaacgcccttacttacgtaaaata

SEQ ID NO: 121545 - DNA, 939 bp, Cannabis sativa
cttccctttctttgtttttggatttagcatgggaggagtggctagaggtttgggcagtttaggcctttcaatgctcgcccctatagagcccttggacggggcaaccgcgaattaagacttcgagttcttcttggccagcgggactgggtcagaatccactaccttaggaacctctaaggcaagaacagtcaaactcctctcacatgtcacctgatgagtcttagtgcttagggcaatgctttttggcagagtatcatccaccttgggacgtttcattggagacttttggccgaaggcatcactcgacctcttctttagcgcacgcaacattctttgacacataactgcacacaagtaaaagaaaaaaagagatatgtcaggaaagcataaataaagcaagtgcaaacaaagttaagggagattaatctaccctgcatgtgtacaggggcaccctcccaaacaagtaaggaatgggcatcctcatcagaaaagtcttcttcttcctacttgaccacaatggttttttcctttccttccgattggacggaaggatgagtagctcccttggaaccatccctaatcctgataggctgttcaataggtacttggtcaccttggggagctttcttatgtttcttcttctttagagcttccaatttaggcataacgtcctcttattggccaaacacagactctcctactacatgcttggccccttgtccatcatcaattagatagagtttatacttgataaaattagcctcaatagccaaaagagaaatattccaagcatccaagggaagtttaagtatttcttgggccctcttcctaagtcccagcatgaaaggagactgacagtacgagggaatgtgttaaaaacttgtgtgattagtgtccatgcatttgacaaaatagtagtcctccataaaaccaccaatc

SEQ ID NO: 121546 - DNA, 1454 bp, Cannabis sativa
ttttagttttctgatttgtattaatcttgtttgcttgttatgttgttgttgttcttgttgttaattggcactgatttggccaagtattgagggtgtttttcaccacaaacatatataagatgcatgagctactctgaccgagtatatgacatttgaatatatgagaaaaaccaattgcaagagcctttaggtatgcaagagagactagccaagacattgcatacccttctaattcaccttaatctcttatattctaatttcttctcaatcaccatttaatctcttgtatcctattctactaacttggggcttatcatacactactcctaagcaattggttctgagataaaaccctatacatcttatcatacatctcctagcccatatttcatattcatattcatattcatgccttttgcctccatcagtaggagggtctttgtagacaaaaagtgaagacatgtgaagataattttacttagtaggtacaaagaatggagagatgtacatacagtttagtaatgtggcagagagaaccattgttgaaagtgcagtcgcatttaataaagggattcaatgaatcattgtcttcgatgtcgatggagtcatctatggcggaaccactgcatggttctccacttatgttccactttttagtgtctgcctttatcttccattgctcaaacatagagttcaaagctctcactgcaacaaaagtactattttcataattaaggacactttttttatgtgaattttgtgataatacaaatcacaaagtagaaaaattaacaaaatacataaattgagagagacttaagatagagaaggagaccttcagagggatctgtagtggactgatcatgaattctattctgagctgttgttagagaagcattgataatagcaaacaacacaacataaatagtgaaaatactagtaaagattgataataatgatgatgaacctcctgacatggtcatcatcttatcacatctaaatatgagttaaagattttcaatatggttaagaaataaaaatcatatatgtatgtatataatatagagatatgaagtagagttagatattgaccaccatagcattaccatctcaacaagtccaagttgcaaccacagtctacagtataggtaattaatgttggtgtcaatttgagggaggtcttcattgatgcactgatggatccggccctacatattaaaatttgccacccatattgtttagcaacaataattttttattttttaaaacaatgaatatattgttgaataaaattaaaatgttttaacaacctataaccaataaactaatcatccctccccatggttgggatatactcttatgtgcgtttggaaagccacaatgtaattagatttgtgtgtaattgaaagtaattacacaatttggcatgtttgtctgaccatgtaattacactg

SEQ ID NO: 121547 - DNA, 1145 bp, Cannabis sativa
attattatatgcagtatgataattcatgtggtgttctatgtttagtaccaagaatttatttgatctgctgaaaatagtagttaccgagtttgatcttctttttcaattctctcttcaatctatgatcatctccttcaatgagaatctacacagactcgtgtggttttctgcaacaaggtattttgacgctcaagccagtaatttatcacaataattgctcagtgaaatctatagaaaaattaggtggtgtttggttggaagaaatgaaaacataagaataataatggaaatgagaatagaattaggaatagaatggaatcaaacttaacatgctttaaaaaaattgataattttttttaaaaaaaaaaaaaaaaaaaagaaattctcatcttgcattggaatggtcatttcatcaatttcaaaatagaagtcattccaccaaaataataaaaaaaaattattccatgagaataacattccaatactttaatagcatgtttactaaaggagaatgagaatcaattatattgggttgattaccattaatttgtttactaaattttagaatgagagaaactactagtaggacccacacaaattaaagaaaaaataaaagaaaagattccccaattttcataagagcattgctattgagcatttggtgctcactgctcaacaccttctataggtggcgcctcacgattggttagtaatattctttaaaacctattttcttaagttatgtgggatcagatacttaattacaccaataacaatatgacactaagaaaaatgtctttttagcagttctcttttcatacagaatacatttctatttctttaactactttatattaattatatttttattaattaaaaataaaataaactaaatatgcccttcaaaaatataaaaataaaaaataattacatgatctaataatgacaattcaattaaattaaagcattctaatttttttttttttaattatgtaaacaaaataaaatgattttaatttccttattatattttaaattgattgtcttccattgattgttcttattccaagtacaatttatgaatgcaacaaaataaaaggaatgaaataaataatatttttttttttattccattccatttcatt

SEQ ID NO: 121548 - DNA, 607 bp, Cannabis sativa
gaaaaagaagaagaagaagattttattgaaattttaacaacaattaatatcaatttcaaagaacaaaaactcattagataatatttaaattaaaaaaatattgaatttattaaaattttatcaacaatgacaattttttttttaaaaaaagcatctgatgctaaaatttaatataaattattgaagattacatactaataatatataatacattaaatttagaattattacactaaataaatctacttgatgaaattaaaaaaaaaaaaagaaaaaggaaaattgatagttgaaattagagtataattaactatatatttggtcaattaaaagaaagataaatccgtaaatacatctctttctttgtatatctcttattcgattgctacacataaattataatctcttcgagctttttagtagaaagtactgcaataacaataataacaatgaattataatttattaatacgacaataaagaaaattaaaatagaaggagaataataacataatactgtattacatgtctttttcatgatcatattgtcaatcaaaattagcaatatggatatttttcaaaaaaaaaaaaaagaaaggaaaagaaaa

SEQ ID NO: 121549 - DNA, 1908 bp, Cannabis sativa
tttgatagttattagcattttctatcattgtaatatatgtgattaactacatatatattaaaggaaaattttcacaaattaaggggggcagggccactccaccaattcaagtacatccgcccctgtacatagtgtagatgaagggtgtagaataagaagaaatgggaggagagtaacaattccctttatacgatgttgggtaggagggagggagagataggtagacagaaagaggtggagggagggtggtggaacgagaggagaggagaaaaaagagagatggaatgagacattttttttccaaactttaaaaatttaattccactgtaaccctgatacttaggcgtgctacaataattttccaaataacaaactaccttgctagtaaaaggttttcttcaaaaatggtgtcaagttaaaactttaaataaaattaataaactttataaacatacatatgtatatatattacataattgagatctcgtgtctaaatttttataaacattttgaaaatatttttacaacttgtcacacaacgactacaaaatatatctcaagatgtctcgagaccgaacacttcaagtcgcgttgtctcaacatgtacaatcatcacccgaactcagatcctcactcctattcagttttcgcattttcattacctacacatgaaagtagaatctgtgagtcaaatgactcaataagaaaaagatacaacagatactataatatcgacttgcatttaggcgcccatacacctatttgcaaggctatcagatatttaagaacgttcttaacagttggtaatattgaccatgatatcacccactaccagcactataatcgcactgcgagatcgacactatgtttgtaccgctatgatagcatcaatagcacccgaaagtacaattggccaagatatcactcttaacaagtacgatgtctgtacggccaaaccgacacaatggttgtcccgctataatagcgccaattaatactttttggggtgaatatcactattaaccaatacggtgcctgtagagccaaaccgactcaatagttggctgctatgatatcacccaaaacatatacaatcacaaacataacatgcatatataatacgttctatgcttatcttatctcgtctctgaatttaagtgagttggtcgacctaaatagaaaatctcgcattgaatggatgctctagtcacatatacgtaaataggtaaataactttgagtagacttttctcgaaaccttaaacttataaccaatggtagccttaaagacaaacaacctaatattgcactaaacttcgagtaaaatatggaaactagggttctgggcctacaagaaccggcagaccgaaattcccaaactggtgagtggttttccagcctacctgggaatcggttaaccgattctgtaaaatcggttaaccgattctcctgcaggttatacccaactccacaaaaatgccaccaattcaatcccaaattcaaccatattctccaggatacttgtaatatcattctaagacaaactccaagtgaaagcagtaagaacaacacactaaaacacattatgccatagttgagccaagttgagttccaagaactcaagcttgctcaaacttacaatcagccaacaacaatagtttaatcaagcttagaatatcaaacctaactagcaaaaactaattccaattgaaaccctaacaaaacagtagctaaatcataatttaaacataactttcaaaacttagagaaaagattagttctagggctcaccatagcttccctcttccaaagcttccttttaatccttgaattcctactagaattagcaaggtaagatagaaataacccttggttcttggctgctacagcacgagagagagagagagag

SEQ ID NO: 121550 - DNA, 974 bp, Cannabis sativa
  modified_base (644)..(644): a, c, t, g, unknown or other
aaaaaaaaaaaaaaaggaaaaatacaaaaatatagttgtacggatttttaaacattttaaatatttttaccgtttttaagattttatttacataaaatataattttttaatgaaattttatattgtactcttattattttgttgttgattttttgttatttatgtattattatttttttttatgtttttttgattgttttcctatagctttcatgttatttttcttgtgtctttataaaataccataaaaatgtaaaaaataaaataaaaaataaacttaaatttttttacaaaaaataacaatttatataattttctataaaggaaaaaactcaatttctcttcttgaataactaattcgttcaattgaaactttaaacttgatgtgcagcttaaaaattggagcattgttactaattgggtactattcgacactttctataagtggcatcttacgattaattagtgatatttcttaaaaattatttttaagttatatagaatttgatacttaattacactaatagcggtatgacaataaagagagtattaggcaccagtggtatttttttagcaatttttacctaaaattgctattgagacattctagggctgcattacttacttttttattattattattnttattattattattattataagttacttcagtttaatatatccttaaaactatatataggtcattaaatggatgatataagtgtacgtatgtagcttttcacttttgatgtgttttaactctttacataatcacaaaacactcaatagtacaacaaaaatagtatatacaagtgtcaataattcttcatctattaacactctttactataacccctactaattagggctgtacagaaattttcgtaaaccgcccaacccgaataacccgactaaaccaaaccgacaaaaccgaaaaaaaatacaaaccgacataacttgacaaaattcta

SEQ ID NO: 121551 - DNA, 1655 bp, Cannabis sativa
ctcataatctttctaccaacaggggttttaattagaattcaagtcttgtttcttctaagggaattaatttcatcatccattgcagacttccacattttactatcattgcatctcatggcctcttcataagtcttggtttcaaagtcacctaggtctgcaatgttcaatgcatagagcaccacatctgcaaagtcatatctcagtggtggcttaaatgccctcctcttatgatctctgaccaactcatagtccatgtggttgtcttcatcaggttcagattcactatctactacctcttgttctcccttatccacaatttcttctattgcaacatggatgatataatctgttctttcaggcggcaccaccttaaactgaacaccctcaacattcttactttttgatttagcatgggattctaatgtatccttacacattttattttctttaaacacaacatctccactgacaaagtactttcggtggtcacctggttcaatgctccataatttgtatccttttacaccctctgcgtatccaattattatgcactttgtttctctaggctctagcttaccctgcctcatacatgagcataagccacacatccaaatattcttaggtgtccatagggtgcattttgtcctatccatacctctatagggattttaaagtcaatagcagatgaaggacatctattgattaggtagctagctgttactatagctttaccctaaaaatttttgggtagaccagaactaatgatcatgcatcttaccctctcaagtaaaaacttgttcattctttttgccaacccattctattatggtgttctcataactgagagatgtcttccaatcccttcttgcttgcaaaaacccttaaacatatctgtacagaacttcaggccattgtcaatcttgagttttttaattccttttctagtttgattttcaagcagtgatttgaattacttaaacttaggaaaggcttcatcattagttttcaggacatacacccaaactcttctagaaaaatcaataaaggaaatgaagtacatggctccacctctggaaactattttggatggcccccacaggtctgactgcatgtagtccacaatccccttggtattgtgttgaccaactccaaatttcacgctggtggactttccaagcacacaatgttcacaaaactccaactcttgaatgttatctttaccaaagaccccattctggtgcaagaccttaagcccttctgacttatgtgaccaagtcattgctacattcttaatgtccttgattttagcattgatttggttcttcatagtgtttcctttcataacataaattacactcattgatgatcccttaatcactaccatggatcctttcattacttacatcataccatgctccatcttcactaaacagcctgaatgatccatcattgcaacagaaattaaatttcttttaatctcaagtacatgtctaacctgtttcaaatccatctttgaacctccatctagaatttacttgactgttccaatcctagatatatggcatgatctattgtccccaagcttcacataacctagtttaatctcttaataatcatggaattggcttctgtctagaaatacatggaatgaacaa

SEQ ID NO: 121552 - DNA, 1265 bp, Cannabis sativa
  modified_base (995)..(1001): a, c, t, g, unknown or other
  modified_base (1205)..(1218): a, c, t, g, unknown or other
tggaggcttgaagcggggacgttacatataattatttacatttttaagtaaataattgaatatcttactagttttaagtataaaaagaatgttaattataactttttagttaatttctacgtccaaaattacatgttgtagtatatattttttatagcagtatttgctataatttaaatatattttttttttttgtaatttttttaaaattctgaatagtttacagtacaaagttcatgatattttagtttactacgcgtgtttaaaattttaaatctttacaaaacttttttggctgatgttgtgactaaaacgaacactgtcttgaaaatagtccttcaatatgtgtttttggacacagagtttaactaaaaagttataacaggaggctgacggcagcactcttctttaagtaaatatcttactagttttatctttactatgtctaaaatagaataataatcgattgaagccaagacccctaaattattaatagaaagttgatattgtatttaatatctattataatagggccaacccaagtggtttgaagcggagcgaaaaattaaaattcagtcgtttattaaaaaaaaattatcaattaatacatcataaatttattattataaaaaaaaatacttcataaatttataaatgttatcaatttttttaagtgtatatttgtcgttatgaacatttattatttatactatatattataaaaaatatttattatattatgtataaaatgaaagaataattacataaaacacaattttttataaaaaaaattacattttatatttttttaagatttattttttatatttttacagttttttttttataaaaacaacacgaaaataataagaaaactacataaaaataataggaaaataacatcaaaacaacaacaaaaaataatatacggatacaaaaaatcaacaaattaaaaatagtacaatattaaaagatcatattttttgtaaataaannnnnnnaaatcgtaaaaatatttaaatttctgtacaaccgtacatttgtaattttttttgttatttttgtgtatttgtgaagtaatccctaaaatgaatgataaaaaaattacgccttttaatatagaggtcattgtgcaatgatctaagttgtcatatgtttgggccaaccctgattatataattacataaggcaccattttttgtaannnnnnnnnnnnnntacgttcaaagaatatttttttacatttttacggttttccaaaaaat

SEQ ID NO: 121553 - DNA, 1633 bp, Cannabis sativa
taagtgacattgacttagaaaatacataacgataagtttatgatatctttttcactatcaatatcgatccagtccgatgtatagttgatacggctgatacttgcttcttactttgctaatgacttcttgaaaaggacattctacttatacaagtgtaagtaaatcacattactgattatcacgttagtgtaaatccagtgcattaaaaaaaacatagaaaaatgaattattccactatctatttcacatgagtagtaatagaaataaataattatgtttctctagggcagcattttgccaagctcttgtcatctataaaattacctaatgctaccgaggctattgtgaagagcctcacttgaatatcaagttcgtttgttgtctactaggcatgaaccttgcttgagagtaacattatatttagtaggaaggagaaataggagtggatgaagaggagaggagggatatgggagaatataacaagtcaaagagatagtttgttggagagcaattctttttaaattctcaattctttttgtgtgtaattcacatgtttgttagttcatgtaattacattgaaattgtataattagaggtaatggcagggtccaaccttaaagatatatgagtctaaacaaattaaatttttggatccccactcttaaatatatatatataaaaaaattattgagaataagtgtcatgagattcgaactcataacatgtgtgatatgtcatacactctaacaaattaagctatggatatttattgtttaaaatacatttaattttagttaaataaaagcctaataaaatcttttatttttattttgggctcaaaaagtgtgggtcttaggcacgagtcgtcgagtctagtctgcctatgcttaaggctgaccctagggaatggaggagttccaattatactctccaattctcatgaactccgtgagaattgagtgtaattactaaaaactttattattttctcgtgtaattactaactgtttagtcaaacaaaatattagaaattcaaatgtaattaccacctcatatccaacacactttgtattttaaaatataatgtaattattagattgtgtaattatcactttagtaattatactatctaataattatacaattactttcaaacacactcttaatagttacacaatataattattaattacactcagttctcctaaaaaaccatacgaattgaaaagtgtaattaaaactccttaattacatctaattaaacaattaccatgtaattacttaatcactaccaaacacacctaaaataaagtcatattcaaataacaccatttggagtttggacaaaaacacctcaagatgaaaaagcttaaatcaactcatccctatcattagcttggttgggagtgttgtgaggattggttcctccataaacaacaaacaaacaacattagttgttcttcttagttaggtacccaaaaacaaaaaatcaaccctaacattctctttctttttcctttttcccctaaacactttattattattctctttcactccctataatacatatatataaatacccaaaaaaaaaaaaaaacatttcacttaatatctaaagagcatactataaggca

SEQ ID NO: 121554 - DNA, 2086 bp, Cannabis sativa
  modified_base (26)..(54): a, c, t, g, unknown or other
ctctttctctcttcatcttcttcttnnnnnnnnnnnnnnnnnnnnnnnnnnnnnatattattttataacaatatttattttattgtgatattgattcattttttatgaaagatttttataaattaattaaagttcattcgcgaagaaaaaaaatagtcatgattattaatataacatgtgaagaataatatgcaattaatataaaaaaaaattaataataatttaaaattaatttgtgtgaaaaataaaatctcaataaatcttaataaaattaataattttgttaaaattagataatttaatttttgtctaaggccttatacaagtttgtttgagacggcgctgctccccatgttgaagataatgtcaaaaataacactcttcgttttagagcaaccattgatctgaataaacctctattctttgtttttttttttttgcgccgagaagtcataaaaaatctatggctacaatataggtatgaaaaactacacaaattgtatttcaaatttggacttcttaaatgtgagcagaagtattgttttaaagcatctatagtggtgaagggtgagaaaatttcttacttcccaatgtatggaacttgggtaaaattggtgatgcgcctgagcaatcatcattcagatttatgctacagtagtttctagagtggatgttcaagaaatgcttaggcaaggatcctatttttcgacaaaagtgagaaatcccaaaatcaattagacaaggggaagagtcgaagaagcgagaacttcggatgtaacttatggtgaaacggaggattgtagtggatgaggaggacaagatgaaagattccaatgaagtaggcatcacccaactttcgcttattgacctgttgggcattgaagaatttttttcctttttgggacaacacaaaaaaggtggatgtacttcaactaaagaagttaagagaagctacctctgctagaaaggagaaggagaagtagataaattaccttgataatgcgtaaggtagaaaagtaatcacagacacctctactacaaacatcaactcatgtgatataacctctcactcccaaccttttctaggggaagcaaatattggaaaataatcatatgcgtaatggaatgcgtgatgggcctcatggtgggcagagcacatatcaaaaaaaaattctaccatatataaacaatttatatattttaagaatgcataatcttattaatatattatattgttaatcatgcaaagtatatatctgcccatacatagctatatacattttttttatcccaaaacagacactaatgacgtggacatcattgtttgacacttggtaagaaggaaaatattcatagcgttaatcatcctaagtcatagcagtcaactctaggaagtgtccctagccctgcccccaggttaacttcgggagctccaaaatggatatttggatcccgtaaagttgtttccaagtcaccatccttcaatatcctgaaccaacaaggcaagaagacttcaagttgcgaacttgggaatcggaagatgttaatttggcatcttggtagccaacttgagtgcctagagtttcaatttttagctttgtcttagtttatattgctcaaactttatacttagacatgaaaaagacttgtcacaagcatgttagagccatctaaatcgatttcagaatgcttcctatttgaagcatctcggcactcagcgccgaggttgacctggcgatgcacccaacacccaggttgaaatgtttcctgggcattttttctatgttcgtcccaaatgaagatacaagtgctttcagaaaacaaacagaccaacttagaggctagatgtaacaccctaactaattaggcatgttaacgtgattaattaaagctttcttattaattaataaacttaaagtattacatatataaaattttgggatcctgttacaaaatacaattacaaaagtttactatttatatatttaagttttgtcaccaagcgacaaatcagcaaaagcacttatgtcctaaagatcgtacgctccaggcctaagtgcctcgacatgtacaatcttttgggttt

SEQ ID NO: 121555 - DNA, 1002 bp, Cannabis sativa
aacacgtgcgtttattggttatcatcccccctcaaacgaaaaggtgtacaaagaactttgagtttgcttttaagataaagaaatctttctttagggagagactttgtaaggatatcagctatctgatcaacactagggacatggcgaactgatatttctttcctcagaatttgctctctaacaaaaaaaatgtaaatcgatctcgatatatatgtttgcatctagcatggaaaataggattggctgcaagagcagctgcaccctgattatccacccagattatgggaacatcaggtgaggaaatgtgtagctcagacagcaatgaacatagccatttgatttctgctgctgcattagccaatgctctgaattcagattcagtagaggaacgggcaacgacttgttgctttttggctgaccaagagatcaaatttggtccaagaaaggctgcataaccacctgtggaacgcctgtcatcaatggaacttgcccagtcagcatcggagtatacttgcagagatagccgagatgctggttgcaaaattaatccctcattaatggtccctttcaaatatctgagtagccttttacatgcatcccagtgcacagtagttggtgcatgaataaattgagacaatttatttatgataaaggccacatccggtcgagtaagggtcaggtattgcaaagcacccaatgtgcttctgtataaagtctgatcttcaagagcagtaccttcatagagagaaagcttgtgagcagtactagtgggattggaacatggcttagccccatctagattaactttaacaagtaaatctgagatatatttgctttgagacaaataaaagccttctttggttctacagacttcaacaccaagaaaatagtgaataggaccgaggtctttgagttcaaaacactgatttagatcagctattaacttggttattaaagtagtattgggaccagtaataagtatatcatccacatatactagaa

SEQ ID NO: 121556 - DNA, 640 bp, Cannabis sativa
  modified_base (74)..(75): a, c, t, g, unknown or other
  modified_base (568)..(601): a, c, t, g, unknown or other
aaagacttagcaaataattcaagtatttaggatgtttgatccacgtgtccctgttcggttggtccacgtatatnnggcaaaatcaggggcaacaattattatgtgataatatatattgagatatttgtaaataatatatattgagatatttttaaataaattatataacttataatttatttaacctacatattgtaacatagaaaggagttacaactatgtaacacatttaactcttttttcagttgatcacaaattatgtataattaaaagagttgttacacaaatttattgtgggactcaaaactatcatcatatagctaatgggggtttacaatatttattaagtgattaaaataagttggaaacgttgagaattgaagaagagtcgaaaggagttacaagactccatttttgagcatgttaaaactgtgtctggcgacatgtcgcataaagtggttttcaacttaaaacgttccaaacgttttggtcataatggtttaataccaactttatttctcaatgcccataatttctcactagaaaaaatcttacttttagtcacaannnnnnnnnnnnnnnnnnnnnnnnnnnnnnnnnntaattataaattattattcatatgttgtgactaaaatgt

SEQ ID NO: 121557 - DNA, 1928 bp, Cannabis sativa
acaatacctgcatatatttaaactatagctgaggatatatgtagatatgtgaaaataaggacacgaaaaaattggaaattttctcccaaaaaaatacaaataaaaagagagaaagaagatcgaagagcatagtatgtaaagtcatcagtatattcccttaaacaaataacagaaaggtaaatagtatatatttttgttggttttcgcctattgttatttgtcttcttgttgggattttatttttaaattttaaggcctggtatttgatttgaaagatcattattcccaataatctttataaaaaattatttgagttttagcatgattcgagcttgggtttggttgaaaagacatttagataatcattctattaatttaaattaattgtaggtaatgccttttgtacacatttttctttgtctttaatcaatggactatgtaaatgtattgtcggtcaagtaaagtaccagtcaaattcgcttaatccactttattaattaataacatatggttttggccttccaattaataattatgatgttaattaagatcttattttatttatcatgaatttttattcttcaacatggaatgttattaaaagttatgaaaagggttaataaaagagcaagactagagagtactaccggagtgacttagctggaaatatatatgtctcattttcgacactggtagtaatgttcaaatttatagaatgaatatttttttcttctcaaaatatattaaatatatatttttaatgtatattactttactattaaaaaaaatgtatattacccttaaaatatattaggctatttcattatgtttaagtcggccatgtggccatgtgtacaatgaatgttatcataataagaagttaaatgagaaattaaataataacaaaataagaaaatatatatttaggtcgcattttaggtagaggtatttatctttatatataaaatataattatctaacagtttttgtgggtttaatagaatattttaaatatataaaaatattttgttaaatttaacggtgttagtagagttagttttataaatatatataaatataaatatattatttattttagattaatttaaatatatataaaaataaatattatttattttaagttaactaaacttatactaattttaaattaatttaaatatataaatattaatatattattggtaatattattatttttttatttttatttttaatattgagagtatgttgaattttaatattcttaaactttatatttattttcaaatatttaaatattgtctttttttaaaaaaaattaataagttgtttccttttatttataaaatttaaaaatacacataaaaaattaaaattaaaaatataactaaatatacgtgcaatgcacgtaacaataacttagtatatatataatatatgtatattacttatacctctaccgtaaaggttgtagaagtgctattaattttttcatataacagtatatatagttatattcggatcgttttcgaaatattttgaataatttacgacataaataatagtcattattgcatgcttataaaataattattaaaaaaaacacactgcaaccaattatttgaattttatttttaatatattgaattatttaaaatttctcaaaaattgaagatgtctactataattatactatattccgccttataaaattttcactttatagattttctatattcttaaaacaagaaaagtctcgtaatggcaaaaatgatactcctacttacaaaaaatttcctataaatttatatgtgcatgtttacttgtacctaatcgaaatcttggctaacagaatctggccggtgcttcctagattgatatgccccactcaagcgacgtttgtgccaggccgtagcatcaatgacaat

SEQ ID NO: 121558 - DNA, 885 bp, Cannabis sativa
tttgccagcctaggggcaaataaatacaaataattgtatgagaaatgctaagcacagattggtagctagcacctttttacatgtgaatattattattagtgcaattaagtatcaaatctcgtataatttaatgtattaacatttagagagtattgctaactaattacaaaagtaatacgtttagaaagtactaatcacctgggtgttgaataccaatgttcttattgcattattattgtaatagttatatgtaattgaaaatagatatattttgagttttgtaccattatccgcatgatagaaaaggcaagatataattcccaatgacttttgtttgtgaaaagtggacttttaaatatagtctttaattattaaagcctaataattaatacagtttgagttagtttgtgttagttattagttgaggtcttttgtataattagctagttagtttgtctattttgttattttgttagttagtttttactcaccttgatttgtaacaaaattccttcaactaccttggcagctgctcctgcaaccagggccggtcctgggcataagcggactaggttcgcgcttagggcccactcattttaagagctcaaatcaaaaaatttcttttaaaaaattatacatattttttttaataatttttaaaaatattatatatcttcatagtaagagcccaaaaaaaaattttttgcctatagtcaatttcaactcaggatcggccctgcttgcaactctgaccaacaatgtggtctcaactcaacaatggaaccccattttcgattctctcacatgttctctcaccctctgttgctaaatttataattactacgcaagtgcacgcaatcaagtagtatactcacgcaagtgagg

SEQ ID NO: 121559 - DNA, 2164 bp, Cannabis sativa
  modified_base (85)..(88): a, c, t, g, unknown or other
tattttattattttattaaatatatataaataaaaagtcacccatgaatttttcataaactaagaattcagttatataggcacannnnatatagaatagatatattatataacagtaaattttattttttattttgtttagaaaaaaaatattttttaaaggaaaaaaaatgagatatagattaatgaacataaataaagaccaattaaatttaaaatatattttaaaaataaataatttttctcataaatcataccaaacataatctttatccatttaataataaataattataacatttctgataaaaaaaattataaatacatttagtcacttttagtaaaaagttatactctaatattatattatatgcttagatacaaacttgaagcaacaaaaattctaattaataaaaagcaaaacacaaacattccaagcttattcatagtctatcacaaacacaaagccaactccaactaacaactatatacacatgatctctttattcctcttaggataagatttcccaaccatttcaacaattttattataagacgaatcgtatggagcactacaattacaaccataactccagcccaaattaatattaagtaagagatcaaatacttaacaatattgttgatatctttctctggagcggcaacccatatggcgactacatatgtaagggtcatagctgttaaagtgatccaaagagtcactgttagaatccacatccagaatctgcgacagaaaggcaagcctctgacgagtagcaagattatactcaatgatccaacaaaccccaccgtgttacaaaataagtaaatatggtacagaatttttttatcatgataactagctattattgcttctcctgcgagatgatcgaatacagaaggagaatcagctataatcctgtctatgatcgtgtcgtgttgtgtgacctgagatattgattgcgagggactactttcttgccagagaccacctggaggagttgttccagcttggaaagccattgtagcaataagggatgcaacaatcattagcgattctcgctttctacttagccagctttcagacttttttgctgttttatcttcttgattttctttttggttgttactattaccatgatgatgatgatgatgatgatgaatatgtttctttgtaagtaaagattgatctatggtttgtgaagctcctactgatcgaagagactctgaaatgtcaaagtctttctcacttcgttgactctgtgctaagatgtcaattgttgtgaatttgtttgtgttggtggcattcacttcaactctagtatttgttaccaaaaacttaactgtctggttaataaaaggtaagaaaaatattagtactagccaactttgattagtgaaataaatcatgcatatagttgaatgtataattttgaatcttccaaactttttatacaattaattaggaggggtcgctctaaacttcagtagcccaaggaaaaataagaggaaattatactttatactcactttttattttaatttttactttacttttatttttctttaatttatacccggtttcataggtcatattctcaataagtggaaattttaattttgataagttatgtaaggttatatttggtaatttgattataaaagagaatatttattaattaaaattattttagagttatatttggttaatgtgtaataaaaatgagtagtttttaacttatctcaaaaaataatcaatttgggcctttattgaaattatgtatttttaaaattagtaaaaaaaaaaatatgtgtatttttaaaagaaaaattatttttttgggcctcgagactaattgggccctagtacgggcctgcaaacccaaaagttttatcaatgagagcaaaaattcaaaaaaatattaaaagacagcataaatattaaaatatgggtactaaattgtaaaatatagaaagatataaatatcaaaataaagtatgaaaaatgactaacctaaaaaaaatatatatatttatatattaaactttcatgcacataaaaaatatacttataaataggagtgtacagaaagtcatttaattcaattacaaccgaccgatccaatctcaaccgatccaatagaatcggatattcaatcataatt

SEQ ID NO: 121560 - DNA, 1289 bp, Cannabis sativa
agaagtagtaggattgtcggaggaattattcttaatatcttcagttttcttttcgcccttatgtgcattactggacaaggacctccatgcaagtaacaatgtttattcataagcacgtaattcaacgtccgacttgtctatgttggaggagttccaattgttaacaataaattggttgcaaagctgaaaaaactgaaggttcagctacagggaatgttggatctaaaatttacaagaccgagtacctcaccttggggtgcaccagttttgttcgtaaagaagaaagacgaaactttacggatgtgtattgattaccgagagttaaacaatttgacaatgaaaaacaagtattctctcccaaggatagatgatctgtttgaccaattacagggaaagaccctcttctccaagatcgatctttgatctggttatcaccagttgaggattcaggaagaggattttccaaagatagcttttttttacatggtatggacactatgaatttttagtaatgtccttcggattaacaaacggcccggcgacatttatggacttgatgaatcgagtgttcaaagactttttggatgattttgttattgtctttattgatgatattctaatcttttctgactcggaagagactcacaagagacatctttagatggtgttgcaatgccttagggagcacaaattatatgctaagtttaagaaatgcaaatgttggttgcctcaggtgagtttcttaaggcatggggtgaataaagatgatatcttggtggattcgatgacaattgaagcgctacgggactggcctcgacctaagtcagcaactgaggctagatgttccttgggattagtagggtattacagaagatttgttgagggctttgcttagatttctatgcccttagcagaactgattcaaaagaactagaagtttgtttggactgataagtgtgaaaatagtttccaggaactgaagcaaagattaattaccgctcttgtgctaactttaccagtcagtggtgaaaagtttgtgatttattacgatgcatcaaaataggggttaggttgtgttctcatgtagtctgggaaagtgattgcttattgttgtcgagcaaaattcgcaacaccaaaagtatataataatactaataataagaggaaattgtttgaaggacaaatgccagtattcaacctaaaatggcgagtactcgagctgggaatgtaaatacttaacaaaaactggaaataacaagaagacaaaggattatagtggttcagtcaga

SEQ ID NO: 121561 - DNA, 769 bp, Cannabis sativa
tcggggtagaattggtgtcgttcgaccaagccgtttcaaccgccgacttcatttctctccacatgcctctcactcctaccacatctaaactctttaatgatgacactttttctaaagtgaaaaagggtgttaggattattaatgttgcaagaggtggtgttattgatgaagaggctttggttagagcccttgatgctggagttgttgctcaggttgaaaattatggtcattttttgtttagtgtcttaattatttgactattataggattatttacagtgaaaccttcttatatttatttttcttcgtaaatttaaggtatcagctggatattatcgttaaataccaactagattattactgtattagtttcgaagtcttactttcacgtatacacaagtgtatacagtgatcatccagttggtatttaacggtgatatttaactgatacttcaaatttataaaaaaaaaataaacataataaaagaatcatatcactaaataaaataaagagttaagtgtataatttaagaaataaagggatttcgctgttaattactctttatatatttatatatatatatctataactaattttgttttgtataaatttggagaaaaatacaggctgcacttgatgtgttcacagaagagcctccacctaaggatagtaagctagtgcaacatgaaaatgtcattgttacacctcatcttggagctagtacaaaagaagcacaggtattaatatatgatttattataaatatatat

SEQ ID NO: 121562 - DNA, 1976 bp, Cannabis sativa
  modified_base (43)..(79): a, c, t, g, unknown or other
atatgtgtttatttataattattttagaagttcatatttaggnnnnnnnnnnnnnnnnnnnnnnnnnnnnnnnnnnnnntggtaaaataatttccaatacataggacccgagatcgtcgagcatctttccacttaggtcggcccctacacctgactttgaatttgaggtaagaaaagtcaattgcattgcttagtatgtcaaaatgagatacggtaattaccgttgttaagaatgagttattactcccttttgaaattgatgttaggtttgttatttatcggttgctgaattaagcaatgatagtaacattagatactcgttggtaacgagggttaaggatgcttataaagtatcgagtttgatttatcttatcagatgaacatttatttaataatatttgattacgatttgaataattgcttaagctatatgttgcaatgtatgttctatgttataaaaattgttgtgttatatgtgatgttgtgtgtaaccttcttttcttactgagtctttgcacgagtgttttgtggtgcaggtaaggttaaggggaaactggaccagccataagtcaaaggtctcccgacaatgtacatatcaacccgccatgttttggttcttagtggacaaaatcttcctttggttctgttttgaagatgtaataatattttgtaataagctgattttgtagtatttagtaaaagtttataattaacgggttccttgaatttcagtcgtattttgaaagaaaggtttaagttatgattttaataattttactaaaagttttaattaaaccatatttttcttaaattgttagtttattattataaattaatcaataaaagcacacatgtgtcgtccttggagatcagggagttacaaccaactactagtggttagagcagcatagctccaccaatcatcatctttcaaataaatactatgaactcatttcacccacaaattatcctccttaatggtaattgcctaaataaacttaccaatagcacacttattccataatgcaaaatctccaaagctaaggcctccttgagttttagtcttacaaatctctatccaagatacattacctagtccatcataatcagacttctctttctaaggaaaagctcgacaaatctaattaattcttttaataaaactttttggaaaaataataatttaagaaaagtaagtgtttatagggaacaatataaaattaattagaacacaccttctagcaaaagaaggttatgagatctcaagatacaaatatgttgcatcatgttgtccactatacattcacaatcagactttgagattctcttgttattgatattcatccccaagtaattaaaagatgttatctgtgtttctgagagggtgaaacaagtaatttaatttgttcctaatcagctaatgggcccactcgctaggcccaagcaaattgatgggctggcccatgaaaaaaacaagacaggaagtccaaattcaaccatagctaagtcatatagatccaaaaggttaattcgaatcaacgagtaatcaaagaaatgtggatatagaccctcatgggtcatttgaaaagagtattcaaaaatatgttagagagtgcctaccgtttgagaccaatcttacgtgccacgtccccaaaaaggatcccaaagaatcagcgggtttgttccctgtgtgagatcttgggaacacgcacagtaaaaaggaaaccacctttttacctaatgcacactattccgacattgaatcctcacaagcgacgacacacacccaattgtcattatcaaatagtaacatcccgtatggatggcggttacacccagaatttagtctcacctactcaacctagtagtcaatattcaaatgtatttacctcatcagtgagctcaatttctcatagaaatgttgggctttgtgccctaaataaaactatatttcaatgtaattttttctattcaat

SEQ ID NO: 121563 - DNA, 1969 bp, Cannabis sativa
gcgacctggagtgttcggtcttgagacatctggggttattattttgtagtcgttgtgcgacctagttatgtattttgtgtattttgtataaaattttaaaatcgggatcccagtacttgtaaatgattttgtgaagttatgaagtttaatatttagtataaaagttttaatttgacacgatttcgagtaagttctttgattagcaaagttagcactataattgaaaaatcactgtaacgtgccttagcattagggcgttacaaattatatcataccaaaaatattgaaagttagaaaataattgatggtccacaacaatatggccctaagattgaatgcttctgtaacaccctgatacttaagcgcactacagtgattttctaattattgtgtctgcctttgctaatcaaagagttatcttaacaagcatgccaaattaaactttggctaaaactttaatcttttattatgatatacatatatttacatataatctggatcccgttttaaattttacattcaaaataacatttataaacatgtcgcaccgcaactacaaaatgaatcctagatcgtcacgagaccgaacactccaggtcgcaccgtctccacatgtacagtcatcccctaagttaagaactcactgatgttcagttttagccttttcgttacctacacatgaaagtaatatctgagagtcaacagactcagtaagaaaagcacataatatacaatatattaccgacttgtatctaggcgcccataggtcaataggtccatttatggacttaagaaggcttctttctcttagaacaaaaggtttgatgaaataatcaaaacctacgactttcaccaaaatgaagatgaaccttgtgtttaccaactcaatgataatcaagtggtagtatttttggtcctttatgttgatgacattttcattattagtaacaatatcaagaaaatgactgacattaaggaatggcttaacactcaattcaaactgaaagatttgggtgaagctagttatgttcttggtattcaaattattagaaattggaagaacagatcacttgctctctcgcaagcatcttacattgataaggtgctagagcgattcgcaatgagtaacaccagagaggcaattatgccttctagacctggtatccgtctatctaaggaacattgtcccactaatccccaagagatagaagacgtgagaaaggttccttatgcttcattagttggaagtctaatgtatgttatgttatgcactagaccagacatttgctatgcagtaggaattgtgagcaggtatcagacaaacccaggagaggaacattggactgcagttaagcatattctaaaatatttgaaaagtgcaaggcattacgtgttagtctacaagggtggtgctttaaatcccgtaggttgtaccgactcagatttccaagcttgtcttgttgacaggaagtctacatctgggatggtatttactcttggaggtggagcagttgtttggagaagtgtcaaggaattcgtaatatcagactctaccatggaggtcgaatacataactgccgttgaggctgctaaggaactagttctgctaagaaagttcttcacggaacttggtgttgttcctgaaattgaaaaaccactgttcttactttataataacactggtgcaatagccaatagtaaaaagcctcaagcataagagaagaaaacacattgagataaaataccacatcatcatggaatatatagcaaaaggggatgtactggtggagaaagttgatactgaagacaacttagctgatccattaaccaagattttgacagtcactaatttgaaaagcacggaatgaatctaggattgtttgaaatgtactgattgttttatgttagtgcaagtgggagtttgttgggttaattttgtgccttaaataaaactatatttcaatgtaat

SEQ ID NO: 121564 - DNA, 648 bp, Cannabis sativa
tgctctttatctctcacaggcggagatcaattgccattggtagcaacttaggcggagtccaccatcactcaagtgtacgtctttttttcctcttaggttctgcattttgatttggctgtgatattgggtttagattttgtttgtggttttggattttgatttggtttgtgatctagggttaagctattctgatggtatgcctttaggaatctctggtactttcaatttcatgattgtattccaagctgagcacaacattcttatgcacccattttacatgttaggcgtagctggtgtattcggcgattccttattcagtgctatgcatggttccttgtaacctctaggttttatttgtggtttcagtgttcaaaatttatggtggatgtttgaatgagttagatctagtttgtggtagtggtgatttgtttttgattttggtggtagcgagtggcgggtggtagttgtggtggcttgggtgatagtgaggaggaaaatatgagtttgtgatattaggttattgtggtggttgtggtgattttaatttttttattttacggttcaggttaggagtgtgcataaatcgatccaatccaatgacaaccgaccgatccaattacaacagaccgctaaacattggatatccaa

SEQ ID NO: 121565 - DNA, 1105 bp, Cannabis sativa
agtagaactcaattaaggattaatatatacttagtatcttctccgcaatttccttgtcgtaatcagtgacaagttttgttctcttggtctaagatttgatgcaaacacggtggcgtgggggatcttaaacgtcgagatcctttttctacattattttataacaattaaatgagtacaaattatattttaaagcacattattagaattaaaaagcattactagctggtactggaatagaattgttaaagtaaaggatgaggtgaagctgctaacaactccagatcagttctcttcatcagatttcaaaatagcaaccatgtacaagatgttaagtcaagaacaaagagcctttcatgtcagcaagcaagtatggagcagattaaatgtcccaaaacatagctttttcctttggttagcagtgctgaatcgattgaaaacaaaggagagattgaaaaaaatgcaggttgtgaatgatactacctgcattctgtgtaataatgcagcagagaatacattgcacctgttttttaattgcaggtatacacaatgttgcttgcaagaaattaaagcatggttgaattggaggattaaagctgagtctctgcccaatattctgagatggatcaatcgaacaaagctgagcaatttcaaggtctgctgctacacaacaagtattgcggctttggtgtgtaaaatattgcaagctaggaatcacaaattatggtcccaagagtcaacacaacagcaaccactggtgcaggatataaaatggctagttaaaaatagaatttctagtgtaatgaaaaaatgtatagatcaaaaagagttggaatggttccaagatttataagaaaatgttagttttttatttttgtgttacagataaatgtatagatggttgctcttctatgagctataggttgtaatataaaaggttattgtgcaatgaaactcctgattcatcaaaaaaaaaaaaaaaaattaagcattacttaccacagcttcctgtacgttcaccattccactatgaccacttcaatgtctatattagatttttggcgaacgttccctttgcaccttactcaattcctacaatgccaaaaaa

SEQ ID NO: 121566 - DNA, 519 bp, Cannabis sativa
caacaatagtaatctttttacctttctttatgaggctataaataccccaactataatctgaagaaggggtcaaaaaaaaatatcctgtaaaaacataaactttttgtttgggtattttagaaataatctcttgttgacttcgcttttagccaacaatactgaatcaattaaaacgacaagattgtaaataattatcaaacaaaattaagcaaataagagtaccaaaatgtatagaggttcgaccctgtaattatggtaatagcctactccttttttactcgtattacttcaaagaattattaacattataaggagctgaccaagtgagtttcttaataacccttaagaaaaagcttacaattatttgatagcataagagctttcaagagcatataattttgggtccctacactatgtaacgactctactatttattgaaaaaaaatacattaattaaggtgccgtttggtaacaattatgttttctaattttttaatcacaaaaatgaagtagaatttt

SEQ ID NO: 121567 - DNA, 796 bp, Cannabis sativa
gaaaaatttaacacgagaaaaacatgatttaaacagatgcaagactcttttattttatagcatgtgaactagattgtttgaaccctattttcaatgtgttaaatttttttaaatttcttaaaattttacagaatgtcctaaataactacaacatagacaaacatgaaaaaaaaaattaaactaatttttcttttcaaatgtcgaaacatataaggagtatgttatcctatttttactcacctgaagtagcagtacagctttccaacaatagggtcaagctatctactcagcacttcaaccaacgaggggtcctggtactcaggcgggacgacgaagtgacgaattaccagctacctcaaaggggctggccgatcacccttggccgcgctattgccagcataggtcgtctagcttctgaacatctcatggcttgccaacatgcactctacaggtgcatggctgatcagcctttgacttaacaggatttttgtgtgcatgttttatacgtggacagtaagacaaaccacgaattgggccataataggccacaaaaatagagaaaaaatatctattttcgagaggtattttagtcatttgtattttattaatttaatatgcaaataatagcttattttaactatttgaaaaggatttgaagggtgaaagctctcctatataattatagagccttactcaattcctaaaaccctaagtcattaagtctaaaccataagctttaagtttgataacttatcacccattactcttctcttacttgagattttccaactctgat

SEQ ID NO: 121568 - DNA, 712 bp, Cannabis sativa
tacatgtcaaagttcagggggcatgatttgacacatatcaaagatgttaatatccctattttgaagggatatctttacctatttgaattaagatattttgtaaatcctacactacataaaagacattagatcacatgaaaaggacccccaatcctaagtctcacacacctatagttccccctctcttaaaccttacacccattttagggtttttagactttaagtgtactttcttcataagttcttcacaatatctcacaagttctttatctgcaacacattgtttttacaattgtagtattgaagagaaccatatttaggaatcacaagattttaatctgtgatctgcatggtattatcttaagagtgaatacaacataaaagaaagtagctcattactcgttcattaagggggccgaacctctttaaattcatgtgttatttttactatatattatttttatttacatgtggtgataattattaattaataaggctctgttgtcaattggctaaatttcaaatcaacaccctataaatttcaatccctcaaaaaatagaggaatcaacaaaaatacaaaaatattatataaaatgtatattttttatcttttaaaaaaggctaattagcatttttttcccctgaactttgacatgaactaaattgtgccccctgaacttttttgggcgttaaaaattctccctaaactat

SEQ ID NO: 121569 - DNA, 1515 bp, Cannabis sativa
  modified_base (88)..(89): a, c, t, g, unknown or other
ttctgtgttgaattatcatcgtgaggctcaaatttggttaacgaaaatatgcgttaacactagcctatttctctctctctctctctcnntctctctctctctctctcaaaatgtgttttaaaggtgaatcgagtatcaactcacactattcaaggtggtacttagacctttgtagaagattatgaagaactgttgcttttcaggttaaggaaggtgatctaggttctgtacttggtgataatctgcaacatgaaggaacaaggattagagtactgaacgaaaggcgtcatattatttctgctgcaaccaatgtaaggtttcttatactttttatgtttatttatcgtattaggattattcatatttaggatgttagattatagacttacaatcaaacatacaagttagtaaattaagatcctagttaaataaattccaacactagcctcagatccatggtaattatttactttcataaaaatatggatttaaaacgatttggacagttcatgttaagtttatgtgaaattacatgtaattttatgaaaaataatttttacttacatattttgtgattaaagttattctagaattaaatttggttaaattttaagcaattacaaattttacgaaattgaattcgggtcaaaattgaacacaaaatttggtttttaggttactggccgtacaaagtcgaggttggccgagaatttcagcctagaactcattctgcgcgcgcaacctcatcttagggcctcatgcatgcgtatatcgtgcttgatgcacatgatccatctgcgttcgcccaagagaaagaacgactgagaatctcaatctctcccgaagtttctacacgcttctcgggattgcagggtttctccgtgcacgtgagcaagtaaccaaggaattcaaacaagttaactagttacctgtccccttttggttacaaatcaattcaaatccaaatatcatgggatctttttgtattttttttgactaaaaattcattttttaattaaattaaagtccaaaaattgtagaaatttatatttttcatatttgagcctaaatatcagtttaaaattgataatttttaatagattattatctattgagattttcagaaaccaattaaataagagcttaataaattaaataagtaaataagtgatggagatagagatttttacgtagttcgggagttaattaaccctatttattggttgaaaggctttgatgtattacaatggagtcttacaagttgaagaaccctagcttcttgctatagtattttccctttggttttcctaacttagagaaaaagagagcttaagagggaaggtgaaccgttcgtcccccttacatgaaggtataaagggatatttataggcttggatttggatccaggcatacccatgactcgctagtagggttgtacatcggtcggtttgggcggtttatcctatatattttctaacccaatctaaagttcaggttgctaaaatttaagtgcaa

SEQ ID NO: 121570 - DNA, 1739 bp, Cannabis sativa
tttttctgtttgggttatgtttttgtgtgttgatatatatgtgtagttatttaaacttgttcaatgattatttatttatttattatttttttaggggtcaataattattattattatgttaaggaaaggtttgccagtttttgtggaagaccattattattattaggtattttaaggtgtttaaaactatattaatgtgtctttcaaaaaaaaaaaaaaaactatattaatgtgggacgttgtaaatatttaatagctttttatcttatttactgaatcaaaatgtagtgtgtgaaatctgatattaaattacataataacagtatatcatttttataatacttagttaattttaaagtgtcccttaatatttttctatgtgaaaaacaaaattaatacaattataaaattaataaatttggattcactttgggaggagagagagatagagagaaaccaattaaattcaatgaattaccaatagtggtattacttatacagtatgtaagtgttattctttactgctttttttagctaagcaactgagatggggttcaaatgtattatggatataaatatgtatgtttatgtgtgtatatatataatagatgttgtactgtgtactatttagtggtaaatatataaaagaaaattaagttggtataaggattgaccttataattaatatatatcacatcatattataagtgcaaacaccggtgtgcaaatacataatgaacaatttatgttttgagaaagagaaatgttaaaaagtatgtgtaatatatttttttatatcatattactattggtgtaattaagtatcaaaattatatataaaacactacttctaaatagtactagacactactaatactcaataataataatatttaagaaattagcaattttgggatacacatttgctaaatttgagtatctttgatgttaagagaaaagttgtaaaagtgtccttacaattttgctcgagtgaatttttgggttgggtcgtgtagctcaaaatctatcgatcaacctttgattgtaatagatttgaatgattcatatatagtagaacctctcatggatgagctggagtatgccaatttattaactgatttatttatgatattttttaaaaaaataacttaaattacttgatttaaaacatttattctttgacatgtagtatgcatctatatattttatttatggaataagcctagaaaaaggggttactaacataaaactaattgtcaaaaaataaatttaactgtgttgaattttctttgagttgtgttatatatatatagagagagttatatatgtggactaagatgtatacactttatcatctcatctgacggttctgtatcataattgtgtttgatcaaataattattttttttaaagaaagagaaaaaaaatttaattgaaaaaaaaaaagctgatataaatgtataacgtactagtgtgtcaggatatggagcacactgcatgcaattaatagagttttaaataagtcatagtaaattattggcttaattaattaataatgctaatatttttttttgttttggggagtgaatgaaaagtgtattgaattctcaatggaatgaaaagaattgaattagtttttaaatacaacacttagaatctagaagagctaaacacagaattagttagaacaattaactgaaaaactaactctgttagcagtaactgaaaaactaactctg

SEQ ID NO: 121571 - DNA, 856 bp, Cannabis sativa
gcataaaacccaacaattatttggttgatgaaattcaataaataatctagtttattgaagcatagaattataggtccatggttctcgaatggctacctcaaaacagtgtcaagagtagggatagaagttgtatattgatgtttggaaaaatttattttgatttgtcaaaattgtaattttatattttgtaattaataatttattttcaaatttattaattaaataaaaacaaacggaaagacaaagtattatctgaacaaagacatcaccattgtatgcttaagatattggtggcaccacattcactgtgttaagacatattataagatatggtggccccactagatttatttttgggttaattaataaattaatttaaaagatgaatatttatttaaatttgaataagaaagttagttatagatgtttaagttggttgagatatttcctcaaattagttgaggaattttccccaagtggttgagagattctctcagttggttattaaatatttaattcaaacctaaatatcaaataaatatttataacaaaaatttaattatatatttattcaaataattaaatataatttaatttaaatatttatctaaataaactttttattagttttaatttatatatacaataaacttaaaaacagatacatatcatttttagaaagcgtaaaaagaattaatctaataaaatctttttccatcatcacttccaagatttcttgctcatgtgctaagaataaacaagaacagaatataaaatatatatcctaatagcccacactatttcttgtgtgtggtggaagattcagaagactatgtgttgtgatattttgcacacg

SEQ ID NO: 121572 - DNA, 991 bp, Cannabis sativa
  modified_base (942)..(949): a, c, t, g, unknown or other
actaaatcatgctccctagactttgatatctaccaaatcatacccttcgaactttgacatatattaaatcatgtctcctgaacttacatcatgttagatgttagatattttcttactaaaatttaaaattgaaattggataaaaatccttaaatttaacaatttcaatagttcataaggcatttttaacgaccttaaaagtttaggaagcatgatttagtatatgtcaaaattcaaaagtacaaatcctaattagtcttaattaaaagaacttttcttttttgcatgtgcctttgagagcacctaatatgcattatattgtttatagtacatttgatttgcattaaatgtaaatttcatattttgaattcaatggaatcaatatttttttttcgacatcaccaaaatcacttaaatataaagcataaaatatttattttttaattatttaacaacaagataaaataaattgttgttgtatctcgatactctaacagcaaattaaaataaataaacaaaaaataacatgaaaaaaaattgtatataaaaataaaaaattagttataattttaaattatatttttttcttcatacaatatatacatttcatatattaagttttgataaatatatgtaccatgtattaattttattttattacattaaaatattaataatatatttgttatttttaaaatgaagataaataaatatatagattagattggattggattgcatcgagtattttatgaacacccttagtaattatatttggaaaaaaaaaagtgtgaacgtatggtagaatgcttagcctatcctgctcctcaaagtaacactgaaagggagagcttctgatgattaacttctaaaactaaataaaataatagggctaattagcaatttttccccccgaacattgacatataccaaatcatgccccnnnnnnnnttttggccgttaaaaattccccatgaactattgacattgtta

SEQ ID NO: 121573 - DNA, 1326 bp, Cannabis sativa
gcaaatgggtatcgacagtggcgagcatatggatccagactacgagtggcttgctctaaactttctctatctactctcaggctctcaagactacacaacacgacgaccagtcaatgctcgacatcgccgtcttcaaacacatcgctgtcaattgcagcctcctctctggtcttctctattcctatgctacttgtgatactgctactacgtacctccttctctcgtcgtgggccttggcttgtcctccctgctggggcgggccagtgctttttgggctatttccttatgtgggctgttgtctccggcctcatttcccggcctgacgtaccgatcatgtgccttttcatgctcctggcggcccatgcttagtccttcttcaatagtgacatttattttttttcaatagtttcttggttttaaaaatttaaaaataaattacatcacataatgacaattatgagattttaattggagttagtgctttgtagaattaatagggtttttcctctgttgcaaattctgctctttagatggatttgtcttttccgtattaattagtaacatggaatgcatgttagttgtattagagttactgttaccgaattattaatttatataatattaataaaactaaatccaatactattcaattatattttttaaatatataaaatttaatttagtgtaaaatttgtttataaaaatatatctaactaattttattaaataataaaataagtaaattagtttaatttttttaaataatataactaataaatttattttgaagtatgatttattaattgaattaacgtctaatttaaatttaaattaaaatttatataaaaaaataattatctaatttgattgatacttttaaattaaatttaaatatttaaaactattcttttttcaaaaaataaaataattaatttattgatttaaaagtattaattttaacggttatttttaatataaaataatattaagccaacaatttctattagatagccttccatctcttttctttcattaagatgggtgaccggtgttgcgttcagttcgaaaggcatgatttttagtatgcctctaaataagctatatttaatacacaaatatatatatatatattagtcatggaggacgtgtcataggcacgtaactcccgtcaaaatctgtaggttataatcatgtatctagggatgcacattttctccaacggggatggtgccccgcgagaacccgcccttaatggggcggggattccccgtctaaatgaggaacggggcgggaacggggatcaaattttgtcctcgaatgttaaac

SEQ ID NO: 121574 - DNA, 811 bp, Cannabis sativa
cctctccacttcttggagtttccagcccttggccagcctccactttctgcccagaatcgatcgtagaagaccattgaagaccgatttagtgggatacattttcgccaccaccaatttctcgattgcctccactcctaactctgggttgtcttcgagagaaatcttgaaatcctccagcccacagagttccatctgtgactcgactgagttatcctccatagcagaaaccttttccaacagaaacaaaaaccggtgcagcccaatgaacggaaacaggatgaaaaaaggaaacagcctataaggagatagcgctacagctcaaagaaaaccaggcacccaagcagccaactctgaaaaacttttcggtgtatacagaaaacgatacaggagggatattaggaaaaaccctagatcacacaacggatcagaaagaatttcgcataaaacgacagtcgtttcactgaaattcatatacgacacctatctttttcaaaatcggtcatgcacaatacacatgtccagagagcattttccccacatgtacggagagcattttttttttccattaattaatttgtggggggtttttgcttggacagtggtgattcgtcaggggttgggcttcacggtggaaatctgaggtgcttctcctcttagtggtaggattgatttacgtaattgtggcaacaccctaattttttatgtgttggtgtttagtgatcctattaatattctttggtgtttttattttccttctttattttttagtgcttgtttattttattgtattatgcttttaataatagtggtt

SEQ ID NO: 121575 - DNA, 1113 bp, Cannabis sativa
taccaaaaatctttggtggattggattttggagatggtacaaattggaacaaagctatgcttggtaagtacatttgggctattagtcatcaacaagatactttgtgggttaaatggattagttctatatatttaaaaggccgaaatttctggagctaccaacttaatcttgattcaagttggtattggcgcaaattgtaccattttcgagagcatttttctcagcatgccattgacactgctggtcatggtgggaagtttaaaattggtcggttttactcgaatcaaattgagcttgaaaaggtcaaaaatcataactttgtttggaacaattttagtgtgccaaaacatcgtttcattgtttggcaggctatctatggcaagcttctcacaagggataacttgcgattggtgattcctagtgtggaaggcgactgtcctgtttgtgaggagatggctgagaaccattgccatttatttctcagatgtgagttctccctcagagttgtgaagctggttcaagactggttaggtcgatcttggcctctcgattatgaagcttggaagctttggattgaaagcttggacaaaggtttttctgcaaaagttgttgctgctagctgctctgccgtcatctaccatatttggcttaataggaatgtttgtgtttttaacagctactcttatattgtatataagattataaataggataaaaaaggaagtgatatatagagttaatacttactctcatttgaattggaaagacaaggataggaagcttttctatttgttagagttcttttaagcgtttatatattacaatcatgttttatttgggattcgaactcaagacctccaacacacccacccacctatggccacttgaactagcctcaagtaattttatttgttagagttttgtagctagcgtttttgcttactggtgctgtttgtggttttgttgtaagtttgtgattaatagatttacttcttttaataaaaaaaagataatataaataataaataatctaaaaggatcattttgctataaattttgaaagggaaatttgaatttatatccatctttcatacctaaattaattttttaaact

SEQ ID NO: 121576 - DNA, 1055 bp, Cannabis sativa
gtattctaaccgaggctacaagactatcttgcagccttggcgggtctcccgagtcacctgatctttttcaggtgactcgggagtgttattatgtgaaaatgtctcagagaaattccaaaaaattggaaggcgcagacaatcgacatggcatcatttcagaccgcccgtctgcttaatctcatcattgaaaaaaaaaatcataaatatcttaaacaataggcatcagaaattagagagaattttttatctacatatgaatattttcagtgtgtagtataagtgattgtattttttttcttcacttgccttgatagattaacaaatttgaaaactaaaactcgattggcatcagaccataagcaaaagtatgaatcaacacaaaataatcagaatatcaataagcggtttgttaatgatcatcaactgccattattaagtgattatgaaatacttaatcgaaaaaaataaataaattgttgaaaactgtaagatttacagagaaatatgggtttgaacctttgagagcggcgaagctaaatggagagactggaaatgtttgaaggttcttcgagggttttggtataaataggaggcttgcacgaaaattagggttttaaatttactattttgccctatgcagactcaatctctattgtcgttttgtttccttataaacgacaggtcgtttactttctttccaaacttcctaaaagtgtagtaaattaaagataaagagtgataattacaactttctattacaaccttttagtccacttttacgtctgaaattacatgctgaaatattttttttcatagcgatattcgttatagctatagtatcatcatgtaattttttgagaaattctgaatagtttacaatactgaaaacagagttccaatttaccacgtgtgttcaaaaaacttcaaacatatttttggcactttaagctattcgaaatttttcaaaaatttacaggataatgttgtaagcataacaaacactgccgtgaaaaaaaatattctgacatacgttttcaggtgtggaggttgactaa

SEQ ID NO: 121577 - DNA, 2302 bp, Cannabis sativa
caagagaatgggaaactcttctcaacccccgactcaaataaaccatcacctctaaagaagcaatatgctttcttccaatctcaattgtcagccttagttaaacaagttacaaatggttttttcctagtgcgacaaacaaatagcattctacccttctcttttttatgctctttatcgtagtaacatttcataaaaattatggggtctactataataccaaaatttttagtaaaatgttcaaggctcaggagcaacctccaactgttgggtataagtttcccatgagatattccataaaaattgagtatctcagtcaccaaaggagtgaaagaaaaccgaaatccacaatcaaaatttgctttgtaaagagaaacccaatctcccatatcctagttggctctctcataagactttggcagtctcatttctacatttgaaggtatgtcataagcaattctccatttttttgaaatcaacattcgtcaaaatacattcagggttcacattaaggaaaccggtaggctcaccagagcactcatcttgacatacgtcctgaccctcatctgatggaccaatcaggtaacctattgtctctgggtcttctttgttcactatgactatttcacccacgtttatgttgtcgcactcaggatttaacacaagagttacttgctcaaatgggactcccacagggatctcatcactctcaagatcctcaatcaaacaatctggcaaagagcttttactattctctactgaactatccatgttttccatagcatgagaacccctctacataggagagtctaaaacctttgactcaaagctctacatgaactactagcaagaactcaatacttggacttggacatattttgctccacccaacctaaaaaaattaacaaaagataaagaccagtcaacctccatggctaactatcatgcatggatataactcaattcaaaaaatgtaagtggactccaagaatcaattcacaagcaaataatattcacggtcaattctcactcccacaagcaaaaactatttacggccaattttcactcccacaagaaaaaaaatatctaccatcaattctcacttccacaagcaaaaaatatccactcccacaagcaaaaatatttacggtcaattttcactcccacaagcaaaaaatatctacgatcaattctcactcccacaagcaaacgatatctatagtcaattctcactcccacatgcaaaaaaatatttactgtcaattctcactcccacaagcaaaaagtatctacaatcaactttacaagtaaggtatagctagcatttagttttatagtgataacatcaataaaatataacatacaattaatttctactagcacttaactcactagaatacaaagccaccaatttaccaaaatcatttatattcaaatactaggcccacaaataggcccatgtggtcatcacaaaatcaaattggatcataaagcaaaactttattttcaagcttaaagaacaaactcaaaatttaatttgggacaaatatcaacacagtgattcaaacaataaagatgaatctctcaaatgtcaaactttcaaaaaaatatgtgcaactaagtttgtgtttatcaataattttttcaaagaaacaatactcactacatttgacacattgttcgctattttttctacaatctttttataagttgagctgctacttttttcatcttcttttattcaaataattactaaaagttatttgattgatacctatgccatgagtcataagttgactccacctatttatcaatctccttgagcggaacatcaagagataaataatgactcctatgagtcctacatattgactgtggcaatttgtattttatctattttacaaatgaagacttatttcgttgaatgactgctactttctctataacataactataatttgagtgctatctctttctacatttttttgtacacattgagtgctatctatttttaagtttcctagtaaattgagtgctattcactcttatatttttaagtgaattgagtgttgtatacaatttcatgaattgactgctatttatttaattacttttggtaaattgattgatactccaataatgatatttttataactttaatgtcatttcttttatagattttattaatactgaaaaattaagtttttgtaaatgccaataattaatacagaaatatactgtatataaaactgtatacgtctgcagcagcagaaagtaattctgatactgcagaaatcaattttgc

SEQ ID NO: 121578 - DNA, 896 bp, Cannabis sativa
  modified_base (259)..(266): a, c, t, g, unknown or other
  modified_base (430)..(440): a, c, t, g, unknown or other
tttttgtagtgatcatgggtctatattgtttacaatttagttgggattttttttgtagtgatcatgggtctatttaatacctatattataccattttgagtaacattttaaaattaattgatttttttaattttgtattataatgcactacaaaaaaaaaaataactatatttagtgacacttttttagttacaacaaaatttttatataactaaaagtgactttttattagttacaacaaaaaattacttgtgactannnnnnnntatttagatacaagttgtcactaaattagttttaatcataacaagtattgtgaccaaaaacacatttagtcacaacaaattttaatttttgtaattaatacttttagtcactgaccttttattagtcacaacatgcataagaattatgatttataattagtcannnnnnnnnnnacttttagtcacaaattttgttgttactaaaagtaaatttttttgtagtgatcatgggtctattttgtttacaatttagttgagattttgattttgattttttatgctgggagtgattcagtttattagcatgttattttgtgattattttggttttttttatttgatttagtttatttatcatatagtgtatattgtattttttttatatttgttttagtttattgatttggtgattaaaataaatttgaaaattattacaacgaatattaaatataaactatatgagtgactctcaataaaataaactagatgaataactaaaaaagtctattaatatataatatacttaatagtaacctttctaactttcaatatatatatagggatattggcggctaaaccacctgaactttacggtttgtaacacttaaccacaaaaaccgaatttttggc

SEQ ID NO: 121579 - DNA, 776 bp, Cannabis sativa
  modified_base (727)..(751): a, c, t, g, unknown or other
taaaattcatgcaaacatcaatcagttcaaatttcttatattgataactaataagattgtaaagagttttatttagggcataaaacccaacagctctaacattcttcaggccaaatggcattaccttgtagtagtacacacctttatctgcctgaaagttggtgtgttcttcactagttatatgcattttgatctgattatatcttgaatacgcattaatgaagcttagcaactggtacccagaggtggcatctaacatctggtctattcgcgaaagagggaaccaatcttttggacagaccttgttgaggtccatgaagttaatacacatcctccatgtgccattgggattagggaacaaaattggattagccaaccaaataggatacaaggcttcccaaaggaagtcattcgtggtcagcttatccacttccactttcagtgcatctacccttaccagatgaaagggtcttcgcttctggcaaactgttgttgcatcttcgttaatgttcaaagcatggtagatggtatttcgattgacacctatcatgtcaaaatggctccatattagcacatcctaatttcttttgacagtacttatattgcagctttcaccattgaggcaagcttcttcctaccttggtagttttggtggggtcatcattgtaaatgctgacctcttctacatgttggaatatgttttacctggatctagatttactaacannnnnnnnnnnnnnnnnnnnnnnnntgaatttctaaaacaatgaaattaa

SEQ ID NO: 121580 - DNA, 3789 bp, Cannabis sativa
aaattgtaagaaaaaaaaaattaatacatagataaagtgttaaataagaagaaaatataacaaaaattgtttggtgtagtggtaaaaggtcttacttaaaactaagagatcataggatcaattcccaacctttactttttaattttttttaaaaatatttaatgtgtagttatgagggattgaacatttgacctcttaagcgttttttttaaattttaccattacactaagcactagaactatcatatttataatagttaaactatatatataggggccccaaaatttgattttgccttaggtcccatataccttaggaccgaccctgatgataagtagtgagtttaaaattggactttctatgggtttagggttaggaagaaggtaagatccagttcggttgggttggaggtagaagagaaagagggttaatgagacaggtttgtgacttgctgaagatgacgatgattgtcgtgacctcgttgaaagctctgtcaatggactcgatcaagatgagttttggtgtgttatgaattcctacccaaaatttccatacgagaacattgcgaggatcaaagagtccacacaagttcaaattgtctcggtaaccaaacagattttgttattatgtgaacttacattgtggtttagatgataagtagtgagtttaaaattggactttctatgggtttagggttaggaagaaggtaagatccagttcggttgggttggaggcagaagagaaagagggttaatgagataggtttagggtaactagggttattattattattattgttcttgttgttgttttatttatttagtaaaaaaaaatatggaaaataataaatttaagaagaatattttcttgccactttatattctttttaattttgaaattatttttatatttttcaaataaggtgtactaattggaatgtgccacatgtacaagagtatacacataagcagtacatgttggtacttaattgtggtaaatagatgccaccttaaatttactaacggtttatagtagttcggaaggttttaccaccgaaatttaagtttgaggattaaatgcaagtaaaataatagttcgaagggtttagccgcaaaaaactcaataaataaacccaagatacttcttgaaataaataaaaaaaatcaagataaaactttgtatataatctagaacacaataatactagggataattatataaaacactaattttgtcaaatttttaattttttttttaatatatttttacggtattctataaaaatacaagaaaacaacatgaaagtaacaaaacaacaacaacaaaataacataaaaaaatatatacaaataacaaaaaataaacaacaaataataagagtacagtataacaatacactaaaagactgtattttatgtaaataaaatctaaaaagctgtaaaaatattggacattccgtacaaattgtatttttgtattttttttttattgtttttgtatttttttttttgaaattatcccataataatagataagaattaagtatatataaatttagttagactggcctgataatcaaagtcttcacttaattggaaaatttcatacttctgctttagactttacacacaaatgttaaactcattaactattgatcactaacaatatgagccaacacactaagaaactatccaacaactcaagttttaacaaaaacaataaaaattaatgtagatccaaataaaaagtctaacactcacaataagtgttaccaattttcctcaaataaacaataaaacctatagagattaattataatcaaaatgagtaaaaataaaaaataaagatggtttttaactattaattatatagtattattagatgtgaattctctcactataaatttttttacttttagtcacaataaaacttgtgacttaaagtaaaaaagttgtgactaattatttattaattaccattcttatattgtgactaaaagatccataactaaggctatgtttggtaggaaggagggagagttggatggatggagaatataagggagggagaagagagtaataatccttttatattgtttggtatgaatagataattattaaattataaaattactattttatccttataattatttttttataataattgttgagggtatttatgtaatttataataattgaagaaggagagttccaatccttccattattagagagattacaaattagagatttgagtggatttgctatcctctcacctctcctttctctccttcaatccctcttgccaaacaaagggatttgttatctcctcccacttctctcccttctctcctctccatcccttcacttctccctcctaccaaacatagtgtaaatgtattagtcacaaaaattacaatttgttgtgactaaatgtggttttattgtgactaaaagtaaattagtgatgacttgtgtttaaatattatgttttaattacaagtagttttttgttgtgatcaaaagtcacatttagtcacaaaaaatttatgttgtaactaaaaaattatcatcaaaagtaattttattttgtagtttcttttcattgtgatttagatttcaaggctctctaatcgcaaatataaatttttgctcctttttttagtgatcgcgggaggtaatgccctttgtttattaccttttgttttggttttataaaatttacttatttatatataaaaaaatatatatatacatatacagtactattatacttttacaaaaaaatatggttttaaaaaaattaataaaaaaagaattgagcaatgcatatcaaatctgtatttctttaatattttatttaataggatggtaagttaatgacttgtgatagtagagtgatgttgctcataaacttactttcataaaaatatgcatatatatatatatgtgtgttgttttccaatacaaaattgggggaacctaataattatttatttattaatttatagcttatctttgttcatttgtgactaagtatctaaccttttatttttcttctgtaataattgatgatagaaaaatccttttttaatatgtttttgttttgtattataatgagtggaaaactgagaacataaatgaacaccaagtttaggaacttgattaaaaaattcaataattatgcatataataatatacacacatagctcatgccaacatcatttggcaattaatattccaattagatcaacctgattttgtggggactcttaattataaaatttgattagttctttgagatccactgataatttattaatggggtggtggaattaattctccatgaatgaacaaaaattccaaatatatataaatttaaaaatgttttgtctctataaaatcagcaattagtacctctttttgtttgagtagaaaagaacaaaaaaatttaggttagatacaaacgataacaaaactcattgtgatcgattcaaaaacgagcagcttagaacatgtttggtattgttttttgttttttatttttacaaaattatttttaaaaatgagaacaaaaaatagtttttgaagtttttaaaacacaagtcatgtttggttaaggttttttaaaaataatattaaccaaaagtaaattagtttttaaaacagaaaataatattttgttattttcaaaattcttgttttttgtaattttgttttctgaaaactgttttaaaaaaagaaggctaaacaaactaaattatttttaaaaaacaattttctgttt

SEQ ID NO: 121581 - DNA, 1065 bp, Cannabis sativa
tggaggcttgaagcggggacgttacaaaatgtatgtcccagatcaagaacacataagcttcattaataacatggggttgtattgttacaaagttatactattttgactaaagaatgctggagcaatgtaccaatacctctagaagggtatgtttgaaaactagatagattggaacatagaagcttatgtggacgatatgttagtaaattcaatcaagagcgaggatgatgcataagacctcgcaaaatgcttctcaatattgaaaaaaaatcaatatgaagttgaatcccaagaaatcttcattcgagatttcatcaaggaaattccttggttttttagttaacacgagaggaatggaggctaaccttgagaagataaacgcactgctcgacatgccttcaccaaaaaattcaaaggaagttcaaacgctaatcgaaagaatggcagccttaaacaaattcatctcaaagtctactgataaatgtctccaattctttaatgttttgccaggtaataagaaatttgaatgaactgaggagtgtgagcacgccttccaagaaatcaagaaacacctatccacaccatttataatggcaacaccaataactagcgaggtgttatatatctatctagtcgtctcgaagaattccataagtgcagttttagtacaagagaagggaaaaatctagcaacgaatttactatataagtaaacaattactgatggcagaattgatatattccccacttaaaaaactcacaattattttggtgcacgcctcgagaaagatgcgatcttattttttagtacatccaatcagagtgttgacaaaccagccattgcgacaggtattatcaaaacttgatgcatcgggaagattgataaagtggtcaattgaattagggtagtttgaaattacataccatcctcaagccgctattaaaggtcaagcattagcagatttcctagaagaaggaataagctttaatgaagcactcaaagaagaaacagattatgttagtttttatgccctaaataaaactccatttcaatgtaatctatttt

SEQ ID NO: 121582 - DNA, 1580 bp, Cannabis sativa
ccttctgaatcgtgttccttatataggaatgaaaggtgtgcctccaattgggaaaaaaatctgaattaggtaaaaaattgcgttttccgtggtcctcatcctcatagtcggtgagggctgcactttgtttcttgaccaattttgtcagagcaaaaaatttctcttctaatcttttggtgtcattgtccaggagatctcttctccaaaccttgtcatttagatggtttctgaggtcattaccacgtggcctcgctgttatacccaaaattcgtctagcacatcagaggaaaacacgtgtcaggctgggaagaacacaaaccaaggcacgtaatgataattacacttgagatggaataactcgttaaaagcataattaacagagtatatttacaactcagctaattgaatagtcttatgcgagagaaaaatatacaaattgttgccttgcgcatcgacgagaaaccatgtaacttcaggtgtacaagacgaggcactaaccttgttacgtggaggggatataacgacagtaaaaacacttagcatataatttatagtatacgaactaagtatagcaaacaggtgaaccaaatcaactgatagcgaggtgtccacctcgccacaagaagacatgctcatgttaaagatcacctcgtcactaaagcctgcgattgtcaaagagggtgttaggcttccagagtaaaagcgatgagattcgcattatcaaccttggaaaggaatatgacaagctccagctcgctatcaaggttgcctctgctctattccccaacgagacattccaaaataatacggtttacaacgtgtttaatacacgtttattttggttaacgtgtttacaacttttactctggaagcctaaaaccatcaaaaatctaataagattgactcaaggacaatgcagaattttagtactgaaaaaccacgtaaaagatcttgtgtgttcatattttccttttctttaccgtctttatttttatagtgcaattttaccagttaggctcaaattttggttaatgaaaatctgcgttaacactcaccttttcactttttattttttcatacttggggtccaaactatttttgagatctgctgtggaccagtttgttgggattttatgccctaaataaaacccattctcaatcaaatctgatttgttatcaataaaagatttgaagtcatttatatttccatgtagttttcatgtttatggtttaatgtgcgcaaaatctgttaagtccataaaatatagttatttacaattacagtgattcaacacaatggaattaattgtgattatatgcttcaaaagataatgtccctgattcattagtgcactggatttacactgatgtatggagtatacattggactcgaaccgatcttggtaaagtatacttacaccttgcataagtgttgtgttctttccatgatattggcaaagtatgctagttttttatgtatggagtatatattggactcggaccgatcttggtaaagatataataatcttactgttgtatgtttctaagtaaatatcactagttgatattagatcaaaaga

SEQ ID NO: 121583 - DNA, 1095 bp, Cannabis sativa
  modified_base (478)..(493): a, c, t, g, unknown or other
tctcatttttatatcatatgagctgacattattccatcggtaaaaaaaaaattaaaaaaaaaagttttttagcaagaaaaataagactggaatgactctttgctgtaaacaaaaataaaaagaactatgaaaaaaaaaaaagaggtagatccatttatggatcttcatgaccctcgtaaagcttgaagaatgaccttgaaaatgcagtttttttttcttttctcaaaatttttttctttgttttactcttacgtatcaatttcttgccaaaaatttttttgaaaaaaaaaattctttaaatgttcggccctctatcgctttaatttcccccctttattattattattattattattattattattattatgttgataaacccacttaatgtaaaagtaaaagtggtggaggtggagaaaatatctccttaatttacttttttttactgactcattaccatttattattattattattnnnnnnnnnnnnnnnnttattattattattattataatcaaatatttcatttaaattttaactgaaaggaatattcatatacaaaaagaataataataattaaattttgtcgttcaactagaggtttttgaagtggttagaaatgctcccaacattcaaaaatgcacacaatggtacgcttaaaaaaatagtaatttgttactagtgaccaattttctcagttttggttaatttttctccaaaatgttctaaaccactctttcttgattttgaaccatttatactttttataaatgataaaatcaagtcgttaattatcaactatattttcaatagctatcattcataattaaataattaataatatttttttactaatttaagagtgataaaggtgatgaaagttacatatttatgtgattatcaaattaatgaatttaactcttattttgtgatcattatctatacatttggtaattttataatacatgtgacaaatttaatagtttttactttatttttttgatgaaatttttacttaattacttaatccatatattattgtaaagtctttttttggcaagttaggtgacaaaataatttttcctttttatggta

SEQ ID NO: 121584 - DNA, 1136 bp, Cannabis sativa
catacttatctatttttataatatctcatcacttaaaaataataatgagaaatgttaagggccaagcaccttataaagctaacatgcaccataattagtgacaattttaatttaatagtatcatatattttaatttaataattaatattaaaaatatgatagcaatactctaaaataatatatctctaatttatatctgtatatatatctaaaattaattatacatgtgtgtatgtctaccataattcaaactcagtatttttatatacatggaataatgtgaggaagcaatcatgcaaaccttaccaatatatacatagaataatgtgaggatgcaatcatgcaagccttaccaatatggcaatatcttatacatttactatacatacatagaaaaatacgtagtagacttgttaattcggcatttaaaaaattcttttaattaaatttttttataaacacataagttatagttatttaaaataatttgtaattttttaaaaaatttcaaataatttacagagctgaaaacaataattatttaccacacatataagaaaaacaatcgtacgtgcaataacagaatatgtaaatcttattttcggtatagaaaccctacttaaaattttttgaaaattgaccttatataactataacgtacataatcatgaaaaaaaatattagaataaaaagctctcatttacaataaaatagataaaaaatctactaataaaacacatctttaatgagaaagtgctctgtaaacttaccctaaatatattatatatataggtcacgtatgttttttttttggtctcaatacactaatcgtttgatgtgtagacattttgcaggctaatgatctagcggttattaaattatacaattaaataataatacactttaattttagaaatttttacaccaaaaatacaaaatactaactttattacatatatacaacaacacggttacatcaatatttttaccttctctcttaattttattacacatataccacttgcatatcaaatccatgcatctatcaaccatcaatcaactctcaatgtaatatcctgaaaaataaataatatttaaatagacatattttattaaatatgtaattattttagtaa

SEQ ID NO: 121585 - DNA, 586 bp, Cannabis sativa
  modified_base (542)..(543): a, c, t, g, unknown or other
tttggatggaccagatccaccatgaacggtggagcaacagagggatgcatgccactagagttctctagaaccaagagagagaaagccattgtagttatattttttctctttcttaatttgattagggcttaattagtttttttttaattcatttggaaaataattttacaaactaggaaatgttaaacaaatgggacccactaaaaccatttggcagttgtctttttagaccaataatttcatttccaaaaataagtaccaaattagaagcgtaatattttttttttcttatttttattttggaaacaactaataaatttttttatcatatcataattattttttttttaaataaaagaacattattattaagccaatgtccaaataactctaaagacttaaataaattcatgtaaccttagtcactaaattcttatctcatcaagaaaaagattaaattttacaagattataaactatgaaattcgcagaactattgcaaaataaaaacttgaaaatattaaggtgtcgtttggtaacacnnttattttttaattttttaattacaaaatgaaagtaaaattttt

SEQ ID NO: 121586 - DNA, 808 bp, Cannabis sativa
  modified_base (35)..(38): a, c, t, g, unknown or other
tcaaaattcgatagtttgatatttttaaaattaannnntatagttaaatttgtttagtaaccattcatgaataatactcattaaaaagtgttatatatatatatatatatataaattggaacgtatatacaaattggcacaaggtgatttaaatttggaactttcttctagtaattgaaaaaattctctgaatttctttgacagaatattaagtatatcaatgtctctcattaagattttcatttataaccaaatatcttacaagaaaaaggaaaactagaatgtctttttcttaacaattttataacgccatatcctataagaacataagaacatcacgtgtctaattttataaactagtttaatactaataaaataattaattattaaaatcggtgataatattaaaaactttattaaaataaaatataaaaaacgatcataacgacactaaaattgtgtttcgggaatccctattattaatattttacaaaaagattatatactatgacaagtcaaaatacaaaatcaaaatacatagtaaatatagcccaaaacaactcttggcaactcggcacacaaattggtaggatcaatatgtacattgttagagaagattgtcacattatggctgctctaacttttatttgcctttacctgcaccacagagcatctgtgagtcacaatgactcaacaagaaaagtaatagaagaaaatactgttagaaaaattaataattaacccaagatctatttgtatataacatagaacacaataataagatataataattaggtatgtgtacctg

SEQ ID NO: 121587 - DNA, 645 bp, Cannabis sativa
tttttttaataataactcaaaaatatttaaaaggacataaaaactaaactatacaagagtttagggtgttttttagggattttttttaattagggtctatgaaaaaataataaagaacaagtaaaaataaaatttaaatattatattattgtatatataataactataatatatttttttaatatatattatatgtatttggtatagatctatttttaattggattttgaaagtgtaactcaataactaatttaattaattggaattcaactatttagatccatttggattcaattgtaataagatattcaacttttttttttataattggattgatttagattggttcattgtaattggattgatttgaatgttgtctactccttgtatagtattaaaatggagatcataataaaagagcatgaggcaacaaagtgtctagcaccactataagtgataagtataaacaagtgtttttttatgatatttatttcaccataattacatttttctaaataatatgaatagtgtccttgtacacaccatttacaattggattttagcccattggaccctatacactcaatagtccaataagggctcgtttggtacaccgtattacattgtattgtattgtataatatt

SEQ ID NO: 121588 - DNA, 667 bp, Cannabis sativa
aaaaaaaaaaaacaatttttaaaatttttttaaaacaattttctttttttaaaaaataaaataaaagtatagtctatttgtgttgtttttgatcaatattcgaaccttgactcgggttggccccaacctagacccaatccccactctcggatcctaatctctagccctaatcttagacctcagatgaacctaaaccccgatcccagtcttggccctaaatctggaccctatattcgtgaagcattatcctatttcatgtgcataaatattagttacattcctagatcaagaaactctttatcacattttaagcaaaaaagaaactcattatagcacatataatttggctaagtatgccttgtagttggattccaagttctgatgcaatacctatcaatatcaagtgaaagaatcttatcacaaaaaataaaatgataaaagaaacctatacgtataagttagaattatccacataggtgtggaacatgatggagctgcaaagtagagacaaattgtactacctagtctcaataaaaagaatacattttggaagataatatcgaaaagggttatttgcggcaaaatctccttaagtggtcaggtttttacaactaacccccaattttaaaattttggtggtaaaacctcctaaactcgtgttctgtta

SEQ ID NO: 121589 - DNA, 684 bp, Cannabis sativa
aacaatataacaaaatattaaatactattttgatgacttttaacaattctttttatttaactatctattcggaaccatttttcatcttaacccgcaaaaataacccattttattcaaatttgacatttcaactcaacacaaatttcaaaaattaataatttgaggatatatggtgtggcagaattttataggccaatatttatgaatggtatattacttcactcaaacacaaagacgtgagcaatgatcgttgtaaaacatcaataaattaaattatctcaaccaatcaaaacataatacatgtataaattattatcttgagcacaataacttagaattttttacaaaagatatggtagaaaataaaaggaaccattatcatgttacaccaaactcttcctcactaccttggtttggtcaaatttctcatgcataccaatccaacgtaaaacaactttctctttctcttcacccacccactttgaaaacctcaccttagtccaataacttctatataagataaggattctcaaaacttctccttacacttcaaaccaaatcccattaatataaagtcttcatacaattaataaaacttcttattacttctctttattactacaaatggagagtttgtgcaagactactaagccagcaccaatcgtctctaatgacccacttaac

SEQ ID NO: 121590 - DNA, 1626 bp, Cannabis sativa
  modified_base (1374)..(1375): a, c, t, g, unknown or other
tttaccaacgaaatgtcctcattgatgagtaatactaacgaaaatgggggtttttaccaacgaaatttgtcctcattaatactcatttttcttgtagtgtgccgtgtgaacattgacttgatacttaacagtcagatcatacaaacagaagttcgagatatataacttatgtattattacggtcaaaaattaaatttaggtatttatttatagtcggaagttaaatttaagtatttatgctgtaaattattttttaaaaatatttgaataactgaattgataactaatttttttaaaaaaatttattatttatattctatcttcatagaataatatttatttaaaaatatatttttttattaattattttattagggtttatcacatttctttttatatgtaaatatgtgtatattaatattaaaaaagataaaatttttgtgatgtattataaaaaaaattaatatatgatataaagaaaataaaattttagtgatatattttgaaattataaattatagaaactaataagaatgttatgagcattgctaataaatattagtggtgtccaacgtcattagaaaataacattgtacaaggggcaaataattgtcaaattaaaatacataaatttgatattaaattatactaataataataagatacttttaattagtgtttagttctctttaacatatttctttttaaatagggtgtgtgtttgaaagtaactgtataattattagttactgtaatttttaccttagtaatagacatcacagtaaatatactgtatttaaatatcaattagtaattgcatatgaatttttattttcatgtttggcaaataaatgtggcctgtaatgacttagtttaataatattaatcagctaaaaataaattactttgaattacactcacttcgagttacatagtagtttttcacacttctctagtgttattcatattttggaagtgttattagggagtgagatttgaaaaaataaattattgtggcgtatcgtaaatacttaagtttaacttttgggtgcagataaataccgaaatttattttttttgtggtaataatacataagttatatttcttgaatttcggtaagtacctgaccgttaattgtcaagtcattatttaggtgtcattttcttattaatcttcttctgtaggtatattaattttaaataaaaacaaaaatttaatgacctagactaatcaatgattagtcattgacttgacacttaaagtaaacgattataattacggaagttttaaaaatataacttagatattattaccataaaaattaaactaaaatattcacctacaactgatggagttaaacttaagtatttatnncgcaaattactcttaattaaataaagagattacaagctataaatagtacgtaggactagtttacatagagtaaaatttgtcaaactaataatatgaataataaaatttataaaataacctcacttaatttattctatgcgactatgataatcgctgtaaagaccgcctatgaataatactttgtattattaattatttaaggtttatgtattaataattatggaatgcatattttagaaatatattttata

SEQ ID NO: 121591 - DNA, 961 bp, Cannabis sativa
aagtttatattttttttaataatggggtgtacttatcattttgtggggtgtaaatagaactccccttttttgaattttttatattgaaaaattaaaagacatatataccctctaattatgtatgaatttagttttatatatttatgagttaattttaaaataaataaataaaaaaataaatattttctgtgaagggtaatttagtccatctaaattgttctgattacctttcttaatcatttaaataaaacaaaatttatctaattttatttctagtcaatttagtgaacaatataataaaatattaattctgtttgtttaatattttattccttttcatgtcactaattctgttattctgattttaactacagtttagtaaacgtgctattaacgaaataaagagttgtcaagcgaaaacaaaatcacacagatcttaaaagaaatgactggctatgaattcattgaaaaaattctcatcaacattggcaataaattctgaaattgtgatattggtaagactcatatggagaacttggtgaatcaattgtggaaattgtgagttaagtgaatgaaagattgaaatttggtatttttggtttgatccctttttttacacaaaaacaaattttagaatttgatttttggttttcatgattataattcgaaaactgaccgacaattatataaatgtaagaaaaaattaacaattttgatttatgatttggttggtttaagccgaccaaatcgagcttcatcatttttttttcaaaaaataaatctttaaatttgctataattatttggaaactaagaatataaaataatataaaaactttattaattaaacaaattatataaaacaattttttttaaaatttgctcaaattatttgtactactagtatagtaataagttatattatgaaatttttacaccaaaaatctgttttgcacatttta

SEQ ID NO: 121592 - DNA, 753 bp, Cannabis sativa
tcttatcaaaagacaacagtacccgattatcaagaaaaaaaaccgaccttcatttgttcttactcattgagtacgtatgatataaatatataatatgtaggcttctcaaaaacaagagctgatgatagtttcttatacctgaattggaaaaaattgcgagcccgaatgaactttctgattatgggtttccggcattatgttgtagtacaattgatgcaataaaacatggggatttatacatttggggttatccccaggccctaaatttccaaagatcctcaccaacaaaatattgtattttattctgcaaaatacaaaaataaatattcaaataaacaatcaaaaatcagccactctattacttgatcaaacaaagcaaaataaatcctttcatattatacttagtactaactgcaaacatcattgatcaaacaaaacagagaagagaaaagcaatcatataatagagaacttactgcctagttgagatcgctagagagggagagagaagaagggtgccattgtggtgccctggtgcgacttcgagttcgagataggacgggaagagagatacagataaagttagggtttttttttatttaaaataaataaataaataataatattttatattttttttgacgtcatattgtatattttataaggaaattactccatttactattttttttaattttttttttcaaatttactgtttggatttctaaagtagttggagcgctagttgcaatag

SEQ ID NO: 121593 - DNA, 1328 bp, Cannabis sativa
ggagggtattgttgggattaaagatgtttggagggtattatttttatatttttttaaaaatcatataaaaacaatttatacttttttaagtatattatgtcaaatttcccttaattaatagctattatggaaaaatatgattttattatcagtatcattaagtattggatctaatactatttaattaagtgctattatagaaaaatatgttttttctatcacgttcaatctcactccaaaaaaaaaaaaaaatcatttactaaattcttactatgatactcttataacaatactctaataataataataatataataataataatgataaatataaaatctttatatagtataagatttttataatacacctttaaatgagtgttctagtagactcatgtctatttcgtatcttgaaaagttttttttttcttttttgtctttcttgtttataattgcatatgttgtagctatttggatcacttttaaattttcaaaaaaatctgaatagcttatagagaataaggttgaaataattacttaccacacatataaaaaaaatagtcgtgcgtacaataaaataattaaatcttatttttggcattataaagtactcaaaaaattttgaaaatttacaggtgattcttaataaatataatgtacacgataaaaaaaaatggattaaacaactcttctaaatatcgaaatagatagagagcccacaaaacaactctttaaaggggtgtactataaatatcccctctaattaatatatagtccatctttatttctcacttttgtttgttaagcttttgggcttttcacctttttagggctgttgttattaatattgacatgggtatgaggagttcgcggtactcagtttagattcctaaaaaaatagaatgattattgggaaacttacacaactattataaaataggagaaagtttacaaaattaacacatggattttattttacttttattgtacaaattttaaaacaatactgtttaaaattacaaaaataccgtgttttaataaaaaaaataaaaaacaactaaaaacaatcctataacaacttaataaacaatatgaaaataactattaaacaacaaaaataaaagtataaagcaaaaaaaaaaaaataacaaaacgttgacctaattgcaataagtaaaatactataactcctcaatatgtttgtgtattatgaattattttacttagttttgacaacttgatttatctttttgtaatattacattattttttttttcatagaatttgttgttacaactttattctttttattttttttttctcttt

SEQ ID NO: 121594 - DNA, 1402 bp, Cannabis sativa
agagagagagagagagagggctgagattgagaaattgtattgagcaatattatcgattatgttcgctcaggttagtgagttaatgaatattgagggagtacatcatggatgacttactgattattttcttgtagctcctaaaattgatatctctaattctcattatcaataaagattggtggcaatagttttaaactggagtatgaccaagttcacattgaacttaagatcagagccagtataaatctcgtgtgttgatgtgtctgaaagctatctagatttatctgtgttatttttctggtttaatgtgtttgctggttgttttgttcttgatttgtttattttgatttaacatttatttgtttaagtgtgatcttgaagctggaattacagaggttaattcctatgtatcagagctaaatttcttacaaatcagagcttggttcttcgatcatcaagggagattgaaagatcacttgctttcgcaccaagaactcatcaagaattcacaaagaattgtacaagaacacaaattgaaggagggcgttgatggctaggttcaaactagagaagttcgatggttcaacaaattttgcactatggcaagagagtttgaagggtgttcttgtgcaccaaaaggtggcaaaagtactcggagataaaaaagttactggctgcgaagaagccaggggagattgcagaaatggaggagatggcatactacaccatcatcatgtacctgtccaatggagttagaagaaagctaatccaaaaaaaaaaagctgtaaaaggattgtggaacaaactagagcaactgtacatggcaccattaatctcgagcaaaattaatcttcttaaaagattatacaggtttagttagaactcttctctttccttagatgataatattgataaatttaatgaaataattgttggtttagctaacaattatcataaggtagacgaagaaagtcaagcaattatattgctcagatcattgctgatggcatatcaagaagttaaagcaacaatcaagtatggcaggaatgtgatctttttggaggtgttcatgtggcattaaagtcaaaggactttaaattgaaacttgagaaggagactaggaaagaagaagcctatcttgcaagaggaagaagtccaaagagaggaacatcaaagaacagccaatcaccatcaagatcgaagtcgaagatcaaagacaatcgacaatgttaccaatgtgggtagattgggcacattaaaagattctgtagtcaattgaagatgcaatatggtttcagatcaaactatgatgacaagagatacaacagaaaccatatccagtactcaaaatctaatgatcatggaaatcaaagaaaagactctgcaactatggctgagagca

SEQ ID NO: 121595 - DNA, 2880 bp, Cannabis sativa
aaaactgatctcagcgtgaatcttagtgcataaatcttagcattttatattgattgacaaaactaatccattgaaagataattaaaatcaagtaaatacttcctaagcttggcataaatatatagaagtttaaaccccatttctaacatcaattttaccctcatttgcaaaatatcttggtccataaatatatatatatatttatatgtctaactaaacctgttcttgatcaaaacgttggcatctttaactagtttcctaacaacttcaccatttggtaaaatctccttaattagacctacaccttggccaacatgcatggacatactttttatgtcacctgttgttgtcgaatttagaacaatgcctccaagtcgacgaatctctctctcctacaagataaaaaaaaagtgaaaccaaaacaagatgagctcatcatgaaaattattactatagcatagctttctagccttattattaccattccatgtattgttgatctacctagaataaatgggtttgcttcattttcatgaggaagaatagatttccattcattgaagaaatgcatttcaagaacacgttgtgcattaggccatcttgctcgccaaaatatatcggtgtactcggtcctgtcaaattcaactaacttcttcgtgtaaatgggatgagcattactttccttagttgcaacaaatttgaaaaaaaaaaatagtaataatgtcatgacttcaaatgtaagatacaatgctatagaaactattgctaatcaaaccaatacaaatcaatttatgtgttcatattgacatgacaatatctcttagtattgattatcattcatttctaaatatgataaaacgattcttattctcattctctttctggttaattttagtgaacagcataatacgaatactagtttattataattctaattataatttagtaaatatgtcattgaatgggacacaacatgttataggagtacagaacatattattgcatacccaaaccaaaccaaacaaaagcaaagccaaaacaataaaaatagcataagaaagccattacagcttcaatccaatggaaagccaatttttgtgctttggcatctttacaaaaaccctttccaacctggtcaaaaaaattaaaatttcataaatattactcactccaaaactcatcattgtcgactttttgtaaaagtaacagtagcctaatgaccaaaaaaattcaaaacccacaaatatattccctcgaatttttctttttaatcgttccaaacccaatatatagctttgacaaaataaataaatcatgccttagaatcatttagctaacacgattctaccttttagtagcggtttcaggtttcgagaaattgaagaacaaaatcttactgtgattcagtctaacgtagccaaagcttgccacctcaaaagaacttaacatttctctttaataaatttctattttaactgaaaagagagagagggagagagagagaagataaagttggggtatcttttgggtttcttcaatctcaatgacatatagattaccattaacatttctttgaaacataactgaaaaaaggtgtagaaatctgtcaaaaataaaataaactaaattttttggaccatcttatacatattgatacaacaaacattcttatcctgtcctgcaacacagtacttactaaaatcaaaagaataataacaacattaaatactatagtacattcaaataacgtatatggaaaagaagaaaaaagaatcattactactattcacctgctggtaatatgacgtgaagtgtttacccaattcaattgcaatgttctcaacttaaaattgctctgtacattccttaattagcttttgcatacacctatatagcaacttagataatcttgcaaatttaagtggtcccaaaagaaagaaatactctattgctataaagggtaatgttcatttcttattaagagaattttaagcaaatacatacagatttaggccaagatattatctagaatgctgaatgaaaaacatactctaatgttctatattagaatgagaactaaattggagtataaagctgctcttcaatgtgttttctaatctcaaagttgcttatttttatctctctagtggtctcccctttaatctgatttacatccttttttatataagccaacaaagatagatcaatcctcttagaattaggaatattttaaaaaaaaatgatatgtgtggcgctatagcgcctataccccgcgctatagcgccaagagaaaaaatctcgaatacgtgctgaagttatctttttttttcgtaaaaaattattttttttttcaggcgggcgctatagaacatactcccagcgctatagcgcccaatacaaaaaatttcttcttcgatcttgcttagtaaatcatgcaaaacttttgcgttcagactccaaatgagatgatttaacatgttttggaaagctaggaatgagctctatcattttgggtttcataagctcttcgagaaaatgaagaaatcattgtcaaaaatgggctcaaagatctctgtccatcacaaaatgtcttttcaacacaaatctacacacttagagaaaacacattaaatctatacaaaaatgaatactaatccatctaataattgactaagaattagtgtacaaatgtgcactcatcaaaagcacaaaggaacagtgaaattactcttcacacaacacatcatataaaatttcaacagaagaatcatatcttagtcatgagagtaaataaaaagaagaaacaatacacatcaataaagggaaataataataaaaaaaaaaaactaaaggcacctgtcaaatcttaattatcaaagt

SEQ ID NO: 121596 - DNA, 1765 bp, Cannabis sativa
  modified_base (41)..(51): a, c, t, g, unknown or other
  modified_base (1726)..(1726): a, c, t, g, unknown or other
attagcaacgagctgcacatcatgtttaaaaatcacgtaannnnnnnnnnntagttagggtgttacataatgtattggtaatagtcacaaacatatatatattactaatagttgacgagaattaatagtcacaaagatgtttttacctttttttttttagaaaacaaagatgtttttactttgaatgtattagtactagtcacaaactatatatatgtgtgtgtgtatatttgtgatgaaatgtataatttattttgtaattagacaatcgtcgaaatacacatgaattaccatgatcactttagtgccatgacaactattttgtagatttatcttttcatttatttttctttggataaattatactgacaattttctttactcattttaagaaaagaaataataaaataaactaaaaataaactacgaaataagttctttttttttttttttgatgaagactacaaaataagttctgatgagaagaatttaagcccaaattcgatgaaagagcaaacaaataaacaaaagacgataaatcactcactttagtactctcttttctctctcctcattttcccctcaaccatacagtctcaaaaagaaagagagatggatagggatgaacaatgaacagaattgagtggatgaactgtagcaacacatagccttcatccatgggttttcttaatcagaagaattggcacaattaattaactaatcaattagtgatatcatacctcgagttaagtgaaaagaggaagaacagaacgacttgtagaacaaatcgacagcgtcattgggaccgccgcaactgttggcgagagcattgagctccgtgggtcttgcctgctctcctccaatccctaaaataaccaccgcaaggattaattcttgcacaaaggctgtagtagttgatgagaaaccaccaatggtacatcgtcagagagagagagagtgagttttagaggtgcgtaccagttgggaaccgacagcggcggcacacggcaatgggtggaggcgcggctgggtttcgaaatgggtctgctaggattttaaattgggtgggacgatgcgtgtaatgaaattagagtttgtaaaatttaagttttacaaatgcttcacctttttgcttcggtgcacaagggaagcaaatatattaacctcaatttttaactgaagcaaaagaaattggcttcaattttacactaacgcaaaatgcaaaagacaattttttaaattatcacattttacctcagttttactttttgtgtcggggtacgagccgacgctaattgtcattttttagcttcagttacacaatgaagcataaaatcttcccttattttttgcctcagtaaacaaatttcggtgagacgcgttgagcgacgcaaaaaatactttttatagtagtaacaatagcctccttaacctcatttgcgtcccattagagaccatcctggacttggtatttcacaaaaatatgggtcgcgttcttgtgtggggtaatgaggccaacttcttggaggttcttagtggtaacaaacctctctacttttaactctttgggcgagaaggatttatagaaagctatcctctcttccagctccagagttaatggccattggggaagatagtctagcagatgcgtaaaaatgtatcaatatacatcaagcaggaggagaagaaaaatcttaaagtttagagaagtgttgggttttatgcnctaaataaaactcatttcattataatcagatttacttat

SEQ ID NO: 121597 - DNA, 1251 bp, Cannabis sativa
atctcgacgggcctagcttggaccgccaagattggtaccaatctcgggagtccaagctgggcccgtcgagataggtttcaaaattcataattttttttttaaaaaaatacattcttgtgatcaattatggcggttctttaagagcccgccgagatagagaccaactcggcacacacacgcgggcccgtcaagattggtgtgtcgaaattgcctatttttcttatagtgcatgcatatgggataagaagattcatcctagacaagtcatgatgctctagagggcaacttctcatgttcttcctactattgacaaatttgattttgttggcaaggaaaacagtccttttcgtaattttgctactgaaagtttgttttgcctttttgttagatgtcccttggtttggaggggattttcctattcgcattgatcatatcttggagataatttaatggattttatcattaatgtgttcctctcggatgaacgaaaatgctaggtttgattttcttattttgctggcctttactataaaaattatttggatttggagaaatatggtcctcaggttaggattggttctaaggtatctccctttgtctcgaaagtgattcttgcagatggttctttcaaagacaattgatttggtggagctattttggtgattgattttgacaaggggatctagctagtttgtgtgtatggtccatggccttcaaaccagtgcgacttctcctgagcttgaagcagttattttggctcttcaatgggtgtttgaaaactagtggtatggcttttctattctctcgaatgcgcaacatgttatttacgccttaggtgttgaaagacccttctgattggagactatgacctctattttcctctatttggcacctggagaaaaaagttagttgatgtttcctttaattatgttaagcatgatgttttgttgtttgttgataagttgtccaaagatgccagggcgtctacccatgactctttgaactttcaaggagagggatctccccagtggactccagtttggttggtgatccgagttcgagttcgggtccatgtccaagtttggggttttggttcttgttcaaggttctggtctagttctaaggttcatgttcggggtttgtggttcgggtctgggtccaggttatggtatgggttcaagtttggggtctgtgttaggatatttttagtatttaatttaggttaattttagcacatttttcggtttaatt

SEQ ID NO: 121598 - DNA, 1641 bp, Cannabis sativa
ccgcccaattaacagattgggtgggttgtaaattttcgagttatttcggtttgtaatttttatcagttttttcggttcggtttgggcggtttacaattttttttatatagggaaaggcattctctcaacctcgaattcttttgttttagcagttctattcctagtcaattttggggggaggcagttctaactgcaattcacctaaacaatatgattccaccttctatcatttcaggtttttctccttttgagaaactatatggttgtattcttgactattcttctttaagagtctttggttctacttgttttgtgtttcatcccagtgtaaagcatacaaagttgtcatcatgctctgctctttgtgtgtttcttggttatggggaaggggaaaagggttattattgttttaatcaaatttttcaaaaattgtatgtatctcgtcagtcgtcatgttgtttttcatgagcatatacctttcttcactattcctggcactcataatttgataaaatcagatcttattcacattgacccattgtctgagtctgagtctgaatcatccactactcctatagttccttttcctcttcattactctcgcatgcaccgtgttgaaaggtctcaagaattagatactagtactttgcaaccaaaaatcgctcctccattagatactggtactttacaatctaaaatcgctcattcccctcttcctacaactgttctagatcctcctgagattgtggaccctcctcatcgttatcctcagcgtgtttgtaagtccactcgccaactaaattttacgtactcttattattctgcttcttttactttgtttttagtatctattctttgtatttttgagcctttgtcctataaagaggcagttattgaccccatttggcagcgtgctatggatgaggagctctttactttgcaaaagactcatacttgggatttggtacttttgcctcctggtaaacatgctatcggttctcgttgggtgtataaaatcaagaccaaatcttatgggtctattgaatggtacaaagcttgattagtggctaaggttttttacagcagtatggtatggacattgaggagacttttgctcctgttgcaaaaatgaatattgttcgtactcttatagcagtggcatcagttcatgatcaatggactatatctcaaatggatgttaagaatgcctttctaaatggtgactgttacgaaaattataaacagtacgcaagtgcacataatcaagtagtaaactcacacgagtgaggtcgaaccacagggaattggattgaataccactagactagatttatgattctatttggcaaaccaatagtttttgagattataaacagaataaaaattcaagaaacttaagtagataattaaagattaatcaagatgagaaaatagggaagagaatcttgttgttttgtttacccaattgttaatgcctaattgatatccttttcttgatgtaaatgacagattaaacaatttaacctaactctttttaaatctgttaggttctaaaccacatgttctctaattaatctcttaattagaatcacatgtaatcagcattaagcaataatctaagtgtcacataggttatgcaaa

SEQ ID NO: 121599 - DNA, 1622 bp, Cannabis sativa
ggatggtatgcactgcataccatatttgcgcgcatgcaacatgggagttgggcgtgaaatgccgcacacggaggctgccaacagggtgttcgcgcgcagaatggggctgttcagacagcctgggcgtgtttctttcgacaagccctatctgaatgcgcgtgaggcccgagtgatcactcgtgttcgtgcgtgcacgtggtgtgcatccgagattcctgattttttttaattttcaaaaaatttcttgttgggagagtgggatcaacttccacctttttcaactcttctacaagcccgaagcttcctacaggatccccaaagcatggatctatgtctatgtccttgctttggctggacttcattgctttttgttgggctctagagctcttagtgggcattctctttcttggctttggagagggccaagttataacagtgataggtagactgttggtctcccctcacgcaacctacctcgtgtcttgttggaaatttaaggcatagatggtaaatagatgtcaccgccttcacgtcattgagggccgttcggtctatcatggcgttgcaggccaatggaatgttcattacaatgaattgcgccatcagagtttttgtggttggattctctccaactgtgaaggttaatctaatatacctgattggtgcgatgccttggccaaagaagccatacatcatttgatcgcagggtgccaggttggtgggctggagacattttcatatgttgatttaaaaagaatgttggaggaggctctatcgtccaccatgcatcttgctatggtcatgtttctaatttgtccagtaatgaccaggggtcattgtgtgggaaacggactagagcagtgtcttcttctatgaatgagattgtgggttctataagcttttgttgattagaacccatatcttcaacatccaggatgtcacttttaggattgtgacagagtgtatgagcatagcgctccctagctttgctggtcttgcctgtaatgtggggtctgctaataatgacccctaggtgtcttgccactggtggtggcattggatctccattctgggcaccatgtgcctgagtttcgtcattttgcacataatgatgcatgtggggattattactccttatgaggtattaaatctccctcttcaaattttgatactcattggtgtcatggtcgaattcattgtaataccggtagaactttgatatgtccctcttcctcatctcccttttgataggaaagtgcttttggtatgggaccgttccatgagtggccttgaagtttgcctcaggtttctccgtcaggagggaaaagcaggtgtacttctcctccttgtgtcttttgtggcatgggagaagtgttgaacttcctctttttgtcagtgttcctcccagagctattggtgttgcgcttgtttagagtatttttttagtcatcaaaaataatgaagatttaatcaaactaaaggagaaaaccacaacattgagggcctcaaagctgagcccagtgcctaggttgacctgatgttgggcctagtgccttggttgacaatcaacttggtgcgctggtttcgatcattcaaatgcttaatctgatcgagaattctct

SEQ ID NO: 121600 - DNA, 2714 bp, Cannabis sativa
  modified_base (27)..(31): a, c, t, g, unknown or other
aaaatagattacattgaaatggagttnnnnntagggcataaaacccaacacaccgttagaataaaagaagattgatctaatggataggagcactgaagattggaagagacggaacatttgatgctaatgatgcacctcaaaattctgaatcgccaataccaaaagcatgtaattttttaaaattgagtttagacaaaaatacccttataatcatttaaaaagttcttttcaattaaaaagtaccttttcaggggcaattgttatacccgaaatttggctacacttcagaagttgacacgtctccaacagaagaaatacgaaacaattctgaatgatataacgatatcattaaatgcacattaaataactcgtttattaattaaatagataatattcaaaattcattgactttatagtcaatagcgagacaggaatagtaactattgatctaagattaatgagacatatgcacgcttcagaatatactgaaaaaatagatcattcatccatacaagcagagtgagtatatcaacataagatgcctcgcacttcatacagcaacaagatcacctcgcattacaaatatcacaaagagaatgtagcgagttgggaactttcccaacattagcatattttcttatcaggtcggacaaggaagataactcaaatcagagaagatgtaaccttccacgtcaacaataaccatctaaaggataaaatcaaggaacggctgagtagttacttagtaatatctcacttatgatttgaatgaaacgtggggattatccatgtttcataaatagtcatatttgaattaattccaaaaaggataactatcaacctatactcctataaatagggatagatttcatgagaaagtggacggtaaaattgagtgtgaattattattattctaattttaaaattgtactctgtatataaaaaagatccctaataataaggactcaaggagtatgtagagtttaactacaaaatcacgtaaaaatatctggagtcataatttttttattgcttattaatttctgtaaaatatttattattgaaaggctatttaattttaattaacaaaaaactgcgttaataatagtgttcaattatttttattgaccaattactccaaatcattttttttaatgactccccaaataatttctttgattaatataaatgtaatcaatttttttttaatatataatatatatatatataattgaatttttcaaaaaaaaatgtttatagaagattgtccaccaaattaattagtctttgactctacgctaacaataaatatagcattactaattaactataattatttaaaaaaattataggtaaagttgtctatattagtaacaaattcaattgctctttaattattattcttttaaaaaagaaatcactaattttttttttttgttaagaactaaaattttattttggtattgatttacaagtcacaataccttattttttaattattatatttgtctttttcgtattagatttaaattaagaaaacagttaagaaatttaataataaaatactttttattataattattattttgatattggatttataaatttaatatttcaaagtataagatgtatatttaaaagttatctaccaaatatataattagttttttaactctacgccaactataaatatagcatcattaatttattataattatcattttggtattttgtttataaatcaattgaggtttttgtgtgaaattccgtaaaaataccaaaaaaaaaaaatactattttgaagtgtaaaaataaaaaatcacttattattttggtattagatttacaatttaaataaaaaaaaagtcttaaaatttttaattattatgattatttttatggtattagatttaaaaattgaaaatgtcgttaaaaatttaattattaaataaaattcttattttaatattatatttacaatttcaataccaaaaaatattatatatgcaagatttattataactctatgcaaattataaatatagcatcactattgtattataattatcatttgatattagattaaaaatttaaaacgtctttaaaaatattagttacaaaataactttttaaatatgaaaaataatatatatttatttcattttattaatacatcattacatttttcgtatcttatttatttatttttataatttatttaccaaattataaaatctttattttttttaattattggtatactggacgaaataaatgtaattttatttttttaaaatttaataaataaaatgtatataacattaaataatagaattattgtttggtaaatttagatactttcatctcaaaagataataaactaggtacaagtagataaaaatagtgacagtataacatagcctgtacaaactccataaattatattagtaataacttaaaatatttaaagaaatgttagaagctctccacttcccacatgaattcatacaatcggttatgctttgcataagaactccaaaatttagcttatcatttaatggctcgctacatggattttttgaagttaaaaggggtttgcatcaatgtgatccaatgtctccattaatctttgtgctagctatggaatatcctaactaggatggggaaaaaggttgattttaaattccatgataggtactacctatatcaacaag

SEQ ID NO: 121601 - DNA, 3360 bp, Cannabis sativa
  modified_base (2046)..(2046): a, c, t, g, unknown or other
tgttagttagggtgttacaagagctttgtgaggagctgcaacgtggatggttccacgggaggaacgacgggtcctttaggcttttattggacagttacgacctggatgagtcggattgtgtggtggtccaagatggttgagatgatcgagacgtcaaatgtccatccatgactgcatccatggatgcatgcatagaggaacgtgcgattgacaggatgggcacggtacttgagaccagacagtagtcgtacatggctggggcacaaagtgcccgagctccgttactggggctgtcgtgcatggttgggttttgcttcaaaaaaattgaactcacacgcgatgagcattaaatcgtccaatattttttacataaaaataatttttttaaaaaaaataaattacataaaatttcttatgcccattaatggcttatattattttctatttaaaaaaaaaaaagaacgaaacctacacccaattcttaccaaaaaagttaatgatccatcatctcacacacattcataatatataaccatccactcacaatatatattatatatataaatgctgaaaatccacacaacattaaatatatatatatacattatgaaactggtctattatcaattattagttttacggtactaaattaggtacacaacagaataattgctattgattatcactgtaccatattcctaagatcaccatatatatatatatatattaaatctgaaagtaaataaatgaaaaagaatatttacctctcaaagcctatcagggtatcttcgagtattttatttgttgtatccttcgaacggtaatgtcaaaaactcacacgttgatcttctagatcttccactacacacaagaaccaatgtgagctagtaagataaaagtgtatataaagttcttatattcttaacacatgacaaagaacaatcttgttgtagtgacggagagaaaaaagttaactaattaatcatttttatgcttttaaaaaagtcacattaaaattgtgtatcagaatttactttatacggtatattaaataaatttaataaaaatttatttaattaattatttaaattcaaatcttttttattaaatcataaataattattttaaaaaaataatataactgaattgtgttatagatatttatattatataaccgcttgagggcctctcttaaccacttaagagaatatctcaactacttttcaaattcaaatctaaataaatatttatctttcgaattaattaattaattaacctaaaaataaatccagtggggtcaccgtatataggtggtgcctacactgtgtaggtggcgcctccctctgtcttaactaagataagggatgtgtctttttccctaacaacgtttctctttttccaatttatttaattaattcatttgaaaaataaattattttttacaaaataaatattactattttgacaattcaaaataaatttttctgaactttcatatacaatttttatccctcctcttgacaatgtttcaaggtgtcgatcaggggaccatagacctataactctaagctctaataaactagattatttattgaatctcatcaactaaataatcttgtttattaagtccacgattaattaactataaatatagaactgaactcttagtaattatagaattatatttattaaattttactagagtgtctattgatataatcaatttcattgattaaccctccttgtgttgaatcataattagtttttatcaaattaccgttttactcttataattacttctttatctttttgtacctttaattcactagagaaagaaaaatttaaatataatttaaatgcgtgcataagttttcagttccagaaataacacttaaagggacccaacattcgatctgttaggaaagttatgattctataattgtagattgtgttcccaaccattcatattattatattctcatactaaatttgtaagagtcatcttcactaataaacattaagagtgaatcaaagaaactaataacntgaacaagagttcatgattacttaggattttggctgatttaccattgatcatcattatgatatgaattaggtctttataataaacaacatgtttgataaagacagcttaattacatattggttattgtcatatataatctctattatgcacaacaccttcacttagatgtaatgctctctagtaggggtcgctcacttttagtttgaggcctttcaatctctcaaaagggttcgcttcccttttagggacattagtaccatctgctccaagaccagtggtagtgctaccgggactagtagctgtagcattccatgcgtttagggttccacctgaagtgttggtgcctacatagccagttggcagatgtgacacccttcctttagtggatggcactctccctagtaccatcttactattagcctgaaatgcatcacatatcgattgagccagattggctctcctctacctctagatagcttgctaaggatcaatgctagtccattactccttgaaccagtgttaaagctcctcttgctacttgtctagtgactcttacaaattcagttgcaagttaacaacggactccttcagatgctcaaccttgaggttgagcaggttgctcatcatgttccatgtgttactttttgaagtccacacgtggctcacctagtggcacagaaccatgtgtgttgcaccggcttttgttggcgacctagatggtggtcttgagccagatgttcttggtccaccttttgaggtggcactaacagtagcatcacaatctacactggtggatctctcttattaatttctttttttattggagggggttccctgtatgggacaagagattgtgttgccatgagaatggctgctagactctcggtaagaatagtgcagcatgtgaacttcgaagttttctcctgagggtgctattgcggtcaggggtgttattgttgaacttcccatgtttctatttccctagtcgttcccattgttgtttctttttcccccattattgttattgtcaattggtttgggttggacgagtttattggcttcagtcggggcaactgcaagattggtgccaatgctgctatgcctactagtgtgaacattctagactgcttcatcgagctttttaaacccatctgcccggtcgaggattttcttcatagagtctgtagttttcctcttgatgtctttcagtagctctcctaggggtatgattttgcacaggattgcagtttgtcaccctttcttacttagaccttttacttgttgggttttgtgccctaaataaaacccattac

SEQ ID NO: 121602 - DNA, 1497 bp, Cannabis sativa
  modified_base (1441)..(1445): a, c, t, g, unknown or other
aagaatcttgaagtgtttgatgtttcaatgaatcacttatcaggaatgattccaccaactctatccgaaatccattcactaacatatctaaacctttcattcaatgatttagagggaatcattccctctaatggaatcttcaactcaatcacttcactttcctaccaaggaaatcctcatctctgtgtaagaatctctaaggtacccgcttgtcctcgcaagaaacaattctttcactcgcgaaattcccttgttatacttttctcaatactcatattcatatcagcattcttcaccataatttgttgtgtcattagaatccaaagaagacaacaagttgttggaagaaaaccaagattaaattcctctgaaccaatcccaaaatttccaagaattacatacagagaactgtttaaagccactgcagggtttgatgagcaaagactagttgggtcaggtagctatggacatgtctataaaggaattctttcagatgagacaacaatagcaatcaaagttttacatgttcaatcaagaaattcaacaaagagtttcactagagaatgtcaagtcttgaagagaattagacatagaaatctaataaggatcataacagcttgtagtttgcctgattttaaggctcttgttcttccttacatggcgaatggaagcttggaaagtcggctttatccaccggggacaagttgttctgatctgaatcttttacaaagagtgaatatttgtagtgatatagcagaagggatggcatacttacaccatcactctcctgttcgagttatacactgcgatttaaaaccgagcaatgttcttttaaatgatgacatgacggctttggtttctgatttcggtatttccaggcttgtcatgacggcaggaggaggaaatgttgcagcagcagcagcagcctttgagaatatgggagagtctactgcaaatatgttagcagggtcaattggttacattgcaccaggtaaaaacatccaaaatttacacaaaatacttaaaacttgtatgtttttctttttttttttacatttatggattctattaatttacaagttttcacttgtattttttttttccaaaaaacaacattgttttctcgttaattttctgtagcagcaacgtgaaaacaacgaaaatataaccctctgtaattttgtaaaaaaaattatagatctgtgtttttataaattttttgtcttttttaagtatttatgaaaataagtttttggcggctacactctcttaattattgtttcacttgcatttaatcagttaagttcaaattttggcggtaaaaccctccaaactattgaacgggtagtaaatttaaggtgtcgtctggttaactgctaccattgattgtttatgtgtatactctcttatacacgtgacacatttatattggtacacctannnnnattatttaaaaattattttcaaaatttattttaaattaaataaaattataaa

SEQ ID NO: 121603 - DNA, 924 bp, Cannabis sativa
tggatatatttaagacgaccccttcctcattcctaaacaccgctgccccaactgagaaggtttctcctatgactacatcagtgttacacattgtccatcctgctgggggaagctatttgttgtgaattggtggctgtgcattgtgaataacctcacacatttccattagccttcgattgatcctttggagaaggatgtgtatcggtgtgatcgtgaacctcacacatttcaaaagaggtattttagttaatttagaagtttcagtcttacttcttttggaggaagttttgatatttgtcaaatttagattttatatttgagaaaatgggttattaggtgttccaagttccaacgtgaagagtattgaattttttagattttttttttttcaacaaatcattcacaatatttttttgatttaaatttttttgttaagatgcagtgcctagctaccatatatgagagtagaaatttaaaaattgaaaaataaaaataaaaaacaaaatataaaatttaggagataatgcttaccataatatgcatatagatataaaaactgaatatttaaatttttaacagaaatataaaaattaatattaatatatatatatattttattattatataagttttattataattcatagtactaatataatatttattaatgaagaaaatgatttgcagataatataataaaacttgttgcaagattgaattatatttcgcaagagtacgagtagtacctcgagaaaatcaagaacataatacctcaaaaattatatgccctggacatgctattgacgaggatgggaaaatcgagtttgttgcaagattgaatatctttagatttaataaagcataaaagatacaattgttaaaaaaaaaaaaaaaaacttattagattgaacaaaaattattcaa

SEQ ID NO: 121604 - DNA, 503 bp, Cannabis sativa
tactatttatatccaaggcccaccattttattttttatttagaaaaacaagaaacaaaaggtggtaataacaaagtaaaatagattattctttaagttatttttttgtataattcattttttcatttagctagcagtaaaaaatatttacattaaaattgaaactttatttttattgttctattatttttatatgcatattaaaaatactgtatatatgaaattattaattggtagtttgagatttaagatttactcggtagtctccacatacaatacaaaaaattaatatcagagaaaaggtatattatagattctaacttttgaatttgttctctaactgaaataaatggttacgtatgctaaatttcattattttattgattggaacttatattcaaaaaaaattaggctaattaggatttttgccccctaaactttgacatgtaccaaatcataccccctgaacttttaaggttgttgaaaatgctccctgaattattg

SEQ ID NO: 121605 - DNA, 2702 bp, Cannabis sativa
gttttgtctctgcaaaattagtttttgcagtatcagaattactttctgctgctgcagatgtatacagttttatatacagtatatttctgtaataattattggcatttacgaaaactcgatttttcagtaattaaaaggttaattacatttggagattatgaaaacatgtgaaggaagtttctagccattagaaatggtcaaataattattcattttcacatgtgaacgttagattggagaacagattcaaagctctaaattagagtttaaaatataaaccaggcgatatgtcgcccaaatagtgcatgtgaaaattttcgttatgttttaacattttgtgagggtttgtcgcctggagctctttttgagagaaacgttgtgttacggaaagcaatcaatgggggatgttttcacatttcactccaacgctcttttgatccttaaaactctcttacacggctggtaacaactttgagtgactgggatttgaatttcatgttagaatcatttatttgtagactaatataattataggcttaataccataaacgaaatcattaactgtgtgtccaatatttatcaataattgtaatgggatgattaatggatattaatatgttagaggcatatgaaagcactcatatgtatcgtgaagcccaagcataaagacaatccctacaatcatgggattatatcagagggatacgacatgctgtcttaatcacccatttcatgtattctaaatatgtaataaatgttcttaccaattatagatattgtaagtaaaagggaaaccttccctcatgcattaagccctataaatagcttcactgtaaaagggatcgaaagaattgctttaaagagaaatctaagagaaaacactctgagattttattgtgagagctttgagagaggaaacactgtattctttgttctcaagttaatataatctaaggggagtaggctattaccgaactaaaggggccgaatctctttaaaacttggtgttctttattgcttattgatttttgctctgtctttatttctaatcgcttattaattgactcactgtcgttggctaaaagcgagatcaacaaatattacaatggtgtgtcacaaattttaatctagtgagggaacattatactatttgttataatataatacaaattaaaatatttaaaatgtgacatgttatatattaatatgagattaattaatatatattatgtgttcatctatagtataataatacacataaaagttgtaacacataggagttacaaatctaaaaatatattgtaacttaaggatcacaattgatgatatgtaattaagtgagttattacatatggaagttatgaaatcaatgggataagtttctagctgttagaaactgttacaatactcaattatatcatttaaatgagtattgaaacgttggatgaagatttgactcagagaggagttacaaaaactaaattttgagttttttagaaacagttgtttaatggttatttttatgttattttatggttatttttcgaacacttgtaacaagtttttgaaaacgtccataaacgtacatgaattgattgagcatgtttccagctctcttgtccaacgtttttatcccattaaacacaaatttttttttgggaaatcagcagtgtaattaaacaccaatttaagtgctggtaacagccatgtggtgaaaaaactttgattttaatatgtgatccattctcaaaacactataaataaaggtctgggttcattttgtaagacaacaagtttttatcaagatagcacattgctagaaacacttaggcttgataaatgtagaaagctattttcattctttttttttccccttgtggtagggagaaataagcttttggacaaaggtgtaagaccttgttcaaatttagtgattcctctattattcacttatggtgtatgtggtgttgagattgctatgtttaatgtgtagcttattgctttgagttataatttttctcttcatctctatattctctattttatgtatattttatttagtgttgtcatattatttaatttatattttggaataggtttcaatggttacattaaatatgtaaccatcatggttacatttttttagcattatcattgaatggttgtaattaatttggaaattaaataaaaataaataataattaacttataacctaatagtcacctaataatttatttccttaaaagacttcaataaagattaattatatttaaaattaaattaattatcaaatataaggatctttgagcaatttttttgcccttaaatattaaattttcatagcaaaattctttataattttaaattatacacatataattccataatgaaaattttattatacttataactttaatttaaaattattacacttaattatttagttttttaatttaaatatttaaaaagtaaaaattcaaataggttgaatgtattttccaaaaaaagggctaaactcctccatattttttttttataaggagtcatttactcaaaaaactaaatcagagtcaaaaagagcaaagtcaagctacccccagaaataagcaaacttgaatagaaaaactcatacttagttcttctagttataaaaaaataatttaatatcatttaaaaaataataaattatttaaaaatttat

SEQ ID NO: 121606 - DNA, 693 bp, Cannabis sativa
  modified_base (643)..(666): a, c, t, g, unknown or other
gaaaactaaccgaaaatacgacccgaaacttagactaattttagcctaacaaggggcatattcggttttgggaaagcatattccctttggatccgcaccaaatcaaaaagacaattctgcccctcaaatctgaacgttgggtgttgtgtgtaggggcattttcggatgccagctcatttcctacagttatttttcttgaattacaaacgattctttcatcttatagccatggtcggccctataggtgtgtaagttgggctagtgtaaatctttcatattttttttatctattatttttttattaaaatcaataataattttaataaaataattagaatttttttaatattttgtaaaatatataactgcataataatatttaaaaatattatttacaatatttttaataggagcttaattttaaaattaaaacaatgactctaaaataattaaaacggtcctaacaaattagaaatatgaatataatctatcataataaacttttttttttcatttgttttattacaaatgtgtgaaaatatattattaatccatttataacaactacatacattacttaacttcttaattaccgattaactttaagataaaactctgtggactcgtttggaacgccgtattnnnnnnnnnnnnnnnnnnnnnnnntatattgaattggattatatatcatat

SEQ ID NO: 121607 - DNA, 981 bp, Cannabis sativa
  modified_base (46)..(75): a, c, t, g, unknown or other
gtgtttaatttatcgttttacaaagttcatatttagggtgtttaannnnnnnnnnnnnnnnnnnnnnnnnnnnnntggtaaaataaatttccaacattgttttgcttgccaccgatgttggctctctttcctctattcaaacctccatttttcacactgctctgcgcctcagtagcaggggctttagtgtttggtgacttcttcttaccaccatttgagccctttgcttgggtgatgactttttcaaatttgataaagccatatgctctatctaagaagtcatccatggtgtatactgccttgagacgaaggtcggaccacagaggattcatttccttgagcctagctatgagtgccataacccttttatctttgctaagacttttggtcttagcgattgcctctaagaactattggatgtagtccttaaggggctcgtcttcctgttgcttgacatccaccaaatcattaggctcgatctagcgttgtcaggaaggagcacactggttgctgaaagcatccactagatctttttatgagtcgattgatctaggggagcttaaggtaccaccattgtgctaggtctatcagttttgtagggaagattctacacctgacatcgtctctcacaccttgcatattggttttcactttgaagtaatggatgtgagatagtggattcagacaacttatgtgtcgtgatccccttcactaaagcagctaaggtgtcgaattctgcccaattgaccccatgagtggtagtctgcttcccagatggagcttctgttacccagatagggtcttttttagaagttcccacgttcatcattcttctcttgttcaagaggtcacatagttctctttgtcttccaagttgatcatgtactccagtcgacctgggtcttgtagtagtctcctgaccacggggtcgtgaaggcaactctattgagacctccgaaatgaactcaagattgtcttggg

SEQ ID NO: 121608 - DNA, 1144 bp, Cannabis sativa
  modified_base (80)..(87): a, c, t, g, unknown or other
attcaataataacagcataaataattatttaaatagctataaataattttcataatttaaacatgattaactgctaattnnnnnnnnaaactaagcggtctttacagtcaacttgggtggaagtgcggctggtggagagcttgggtggctatggaggttaggctaatacagggaagaagacaaaggggaaaggaaaagagtatagggttgggctttcctagaaattaggcattttttttcatttcaatttttttaagggctttctaatatctctcttttttttttaattgaaaatagttggctggtgtaagaaaatgccccaatcatgcctgctatagcaattttttcgccaaaattcaacaaaaattttcctgactgctcatttaacttgtaccacttttgctagatttttgctagaaaaatgttacagcaagcgaatttttccaaatcaacgacaaaagcctttttttcatacccagtttttgctacagcagaattgaatcaaaaaattagcaaaaacttcagacccccaaatcacatctaaaactccaaattgtgttccaaaaatacctgaaacaccaatccaagtgtaaaatccacacaaaaataaaaataaaactagaaattgacagcagaaatcaaacataataatttttttttcaaaggataacaactacagttataagattaaaaataaagttgagaaacttgggttgcctcccaagaagcgcttgatttaaagtcactagcttgacttttggagaagtgctcataaagagcggcttccgcccatagagagtggcatatgccctcacatatgggtcattgttttggacgccctcaagcttggcgagatgtgaaatttgcgagctccaatgttcaacttgactcttcttaaatgattgagcataatggaagccaaggaatgacgctaatggaggtggattgggtggtagcaaaaacgaatcttcatatgtgtacttatccatgaccattttctcattatattgatacccaattacttgatgtatgagcaatggtggtggaattagcgtttcttcaatgctttgatcaaataatttctcaacaccttgggtagagatagaattcaacaaatttgaatttattattttctctccttttt

SEQ ID NO: 121609 - DNA, 3531 bp, Cannabis sativa
tatagattcttgtatctatgctatgatatgattagagctctcactcaattgaactaccatgttcgcaatatgtaagtatcaggaagatcattttggtccactttaacgaacaaattaaagaacacatataataaaattaaacttaaacttaaccatctcaggattgagatcattaatctaagataacaaagtgatattgacttagaaagatattatgataagtttatgatatcttctccaagtttaatatcggtcctgttcgatgtataaccatacatccaatccaagcttactttaccaatgccttggaaaggacataacacttgtcgaaggggtaagtaaactacattcttgattatatcagtggaaatcttgtgtactgataaatcgtgggactatatttaaccacataatcttgattactttccattgtgtagacaacatagtaatcatgaataataatgtgataaggatttagatgaatttataaatcaaacaaataatcatgaaacaaacatgtgaaccaagcaatacattaaacaagtaatgaaataattctatttctttattgataaatgaatattcaagattacattgaaatagagtttgagttagggcaaaaaacccaacaaattcccagttgcactaacataaaacaatcagtatattttagccaatcaacctatcattcgcgaatcttcacccatggcaactcctattcttcctcccaaggttcttggcaagggcagccagaaatatagtcgtgaagcctgctccaaaaagggtgagaaggccatagaagttgtccaaaactaccttggcaagtacctgctaggtgttgataagcagcttcaggggctagatgatgactcccctaatttcatgatggccaactctttgagagatggagtatttataagttctcttattatttgttcaactttctacttcatgcactgtacaactctattaaccttgtttttttttcagtgtctcttgaagcttggttatgctcatgccaaagccaagggctctgcagcagccttcaggaagaaacttgaatgcaaatatgttgaacttatgaccaaaaatgtacagattcctaagtttgacaatgtgaaggccgatttggagtcggtataaaaagagctgagagaggtaaaggaccagtacgatggcgtgggtcagctacttggtattcgtaccaatgaggtgaatgaacaaaattcagagaatgtcacattgaagagggcgttggaggctgctaagaagatcggccagcagaagcaaaagagtcttgatgcaactttatagggtcagaatgacctggtagccaagtatcatgacattgccatggagactttttataagtgttacctccataatccttggcgttacttttcttagattgagtctcttgatcgtgattgcatgatttcttggggtagggagctatatgaggctagagtagccaaagaaaatactctaggggcatttgccgataagcatagccaagcttctaatgaggtatatataggccagctaggtggaggaggccgaccatcactttgtggagatacatgccgaccagccattgttgaagacacatgccgaccagggtttggctgagcaggtcattgatggggctgccaagttgttgattctacccacgggactcttgttgttaaggctgccgcctaagacttatctgcccatgactcagctgcacctaacaacactaaaaaaacttttgtgttattatttttttgttctttgattttgcactttttctttgtttcggcatggccatagcctaatgcatttaaatcaatttttttggcagttcttgtatggccctaaggccccttattttcgaactagtgactgaccaagcaatctttgatcttggctttatcttctttccgttttttgaacatgtagctgactgggcggcctttgatcccatgtttatgcattttatgttcaccttgaagcatgtcattcacacatacttagttgttaagatctggctttaacaagcttaattttttggctaagtatatctatgcttgtttgatgttgtgtgggggtgcccccaagtgatcaagcagacttatggtctcttggtcgattgaaactcaccaagtatttagatccttttcctgtaaattttcttaggaagaccgttttacatgcatgttgaactaaaaataagaattatctttaaaaagtttattcattagcaagttgtttgacacaatttgaactgaaaaaatgtcttttattcattaattggtcttatatatgcgttgttattatgcaacgtacaattttgtgtaacaaaagcttaccaatacaaggtctgcctttaaaaccatgttttggctacccctacacggaatatcgtgcaaaggccaccactgaagagtggtggtcatatagctcttttctcaattcatgtatagtgagacattataggaaccactactaaagagtagtgttttgtacaaatgagttacaagtagtgctttccaagatattctctatccaataccttgataggagaaccaatttcatcttctcattgtaacttcctagtttataagcacctttacgtgtaatttttatcacttggtacagtcctttccagttaggtccaaacactcctgctataaaatatttagcattcaggaatactcttcgtatcactaagtatcctacgaagaattttctctccttgactggcttattgaagtacctggcaactttttgatggtagacatgtagttttaagttggcctggtctcttctttcttctttttctacaagggattctaccaatacggtgtgttttgttccttggttttgtggatgttttttgattttattgtaacatgaataggtgttcatgaagcttagggtctcatggccagttgtagcatctactagtcggtcgctcattggcaataggaaatagtcctttggacaagccttattcaggtcagtaaaatctttgcacactaaccacttattgtttggtttagtcaccaagacaggtctggatacgcaaagtgggtaaaaagcttcaatgataaagtaattggcatgtagcagtctgactttatctttcagagcttatgctcgctctttatctagcaacctctttttctgctgtacaggtcgaaaatttggatctatgttcaaggcatgagaaattactgatggatcgatccccaccgtgtctttatgtgacctagcaaagacatcaaggtttttctttagaaatttaatcattgaggattttatttgtagcgctaaacctttcccgatctttagtttcttgttagaagggtgggattgatttttacatcttttaattcctctaccagtccaaagctttctacaggatccccagagcaaggatccaagtgtgcctccctactttcagctgaactttgttaccttttgcaagactcttggctagagctcttggcatgcttctattcattcttggctttggacaaacccaag

SEQ ID NO: 121610 - DNA, 1146 bp, Cannabis sativa
ctatgcctagggccggccctgaggtgcgatagttgtggttgttttggatctgaaaaagaagttgaggtactggtggtgtcgggcaattgtggtttcggttgaggtggatggtggtggtggtaatatttttgatgaagaatgagagtaaaaaaaatctggcggaacaaaaaatatgaaatgaaatgaaagaaagatggtggaagaaagaaaaaattaattgttttaatttttttgtaatttaattatttttattttaaaattaatttatttttatttttaaatattttttaggtgggttaataatataatgtcatgtgtacattgtgtccatgtgggcaatactctgtgtatacatggacatgcccacatggcagttaacttgtaaaaatggatggaaaaggttaagtgctaacagaacatgggtttaggaaattttactaccaaaattttaaaattgagaattagttgtaataaactagacactaataggagttatgccgcaaattactcagataatgcaactctaaatagttagaaacttatgttgcacgcatgagcaaggtggtgcttagttttgtaaatgttcaaagttagtaatacaattttgtgatttataaaaaaaaatcaaattttatatatttgtatatatatattttttttatttataaataatataagaaaaaccacgctaaaaaaatattatgaaacaacattatacacaagacaaaaaataaaattatgtattagaaaagaaagtaaaaatgaagaactaaatcatatcaaataattactatattaattaaataattaaaattatttttggcaaataattacacaatataattagaattagagagtaattgagaccttttaattatataattaatgtgaaattacttccaattatgccaaactatataattatcttcacttatatctaattccaattctcagcggcttttcaaacaaactccaaataaaatattatagtaaagtaatttgtatatattttttcatcacatgaaaaaatgaattgtcatggttttcattattttcaaatttatgttaaataaattaacaattaacccaagatctatttgtatataacatagaacacaatagtagtatatgataattgagtatgtg

SEQ ID NO: 121611 - DNA, 1115 bp, Cannabis sativa
  modified_base (611)..(618): a, c, t, g, unknown or other
ttaaaatacatatatattttttctaatatttttttcaggaacaattgtcttgcttcaattctatgtggatctgtccctaaccatggacataaataaaagtccatgagcccttattacattttgattacatttattatgaagtcactagagtataggagtcctccctactataaaattgggctttagaagtggtttttaaggacttttagcgtcagttttgggaaagttcgctaccgacgctattctaagtgacgttgtatggtgtcagttattatgaaaaaaccgaccccatagggtcttagtttttttttcagctttacaattttgtattttagcataatttttatatatatatattattttattattaatataataaaattaagtataaattatatataataagtttaaataaaaattaaattgaatagttaaataaatacacatttatattaatctaaatgtttgtatattaactaccttttcattaatattttatattttatattatgtgtttgtatttttgtagtatattaatatcatttttataattttttaagttatgttttgtataataatttagtatattaaataataaataatgtgtaatnnnnnnnnttttatgtaatttaatatttttatgcatttaaatttttcaagtccaataaaatgaaacaagaatttaaggaccggaataaatgaaagaaattagagaaagggctaaagtttgcatgaatttttttgaaaactttgaatattaataacttttgatccggttgtccgtttgaggcgattatttttttaaacttgggtattttttcgcgttctacgcatcccaaaccgccaaccattttgtccaaaaaacgctcttttatatactaaaaccatgttatctacccctttcacccaattttttgtgttttattttgctattttacttaaaataaactaatataattcttatgttaagtattagaatcaatgtttatgatgtatttgttaattatactacaatgaaatgtgcaatactaatttccttttatacatcttctaatatttaaataaaatcatagtagctaatttatacaaagattgtgtttttgtatattggtaaa

SEQ ID NO: 121612 - DNA, 821 bp, Cannabis sativa
tttgtactattttaaaaaatgcagggtccattttgtcattttataaaacacggtaacttttgcaaaacgcagggtctaaaataatatttaccctttattaaaatatctttctatatagagagttgttaatcccattaatgtattgttgatgccttttattttttatttttatgttttttaatttccagtggattcctgaattgaagcattttgcaccaggtgttccaattattcttgttggaactaaacttggtatatttttcatctttctaatacttaataccattttgattttctttttaaacaaatatggtaataatataggatgaataacaatgttcctcttttttcatttttttccttttggttttgtcaacctagaccttcgagatgacacacaattcttcatagaccatcctgatgctgttccaattactacaactcaggtaaaatctttagatactttaaggtggaattggttggaggtattctgtttatttgtttggttacattttaaagtattagaatataattctaatggaatgatcttttaaccattttagccaccattccaatgtaagatttaaaaaaaaaaattaataattttttttattaatttttatgcattttaaattttattctattatacttttattctaattctctcattcccattcttattatattttcattcatttcaaatcaaaccacacctaatagtttatattgacatgtctatcatattttaagggagaagaactgcaaaaacttatcggagcagttgcttatatcgaatgcagctcgaaaacacaacaggtata

SEQ ID NO: 121613 - DNA, 1347 bp, Cannabis sativa
taaaatttgacagtcatgaataatcaaaccaaaaatagaattcaaagagtgattactacgaatgccttgcacagtgagcatgctatccgtctcaatctcaacatcaggccaatttttgctcttaatccaactcagtgcttctttgacccccattgcttcaacaacttccgcatcatagacaccgccataataaaacgttttggcctcaatgagattgttaaagctatctcgagcaacgaccctgaatccataagagttatcctgtggaaagagtgcagcatcaacatttatcttgattttgttcgcttcaggtttagtccaacactcagctccatctcctctattctcaaagaataaagaagatagtgaagtgttatcttgagcattacgccaatgatatgcaataacttcagttcgtgaggatgttttattattccatacaacaaggtttcgggccttccaaattgcccaacaaagcatagctgcccgtgagacaatctcctcctcaagagccataagtgctttctcaaaccaaccaccaaaagataaaggatgaagcgtgtcataagtgatatcaagagtatgccaacatgatatagcaaaaggacatgtaaggagagcatgaacaatagactcggcttggtttgtgcacacagggtagagcgcagaaatacttacatgtttagtcactagttgaaggcaggtgggaagacaattagtaattgcacgccataacaagttcttaaccttgggtggggtctttaaatgccacattttacaccaaaaaccagaattatcagcgccaaagtgctggggtttattcttctacagcagatagtaggccgttttaacagaaaagaacccagtacgatctctcgaccaagaccagaagtcagtatcagaatttggagataacggaagaccaaggattaagctagcgtctcaattgttaaatagatccttaacaacatcacaatcccagctacgagtctccaaagagaagagataactcacagtattatgcaaaagagctggatgagttgaggttacaagtctgttttcagtgtcaggcagccacggggtagaaagaattctggtaatttcaccatttccaataatacgcacggccccaagatgaaccacattttgagcagcccaaacactacgctagacaaagctaggattattccccaaatcagcagagaggtaatcactggtaaagaagtatttagctctgaaaatttgacccactagagagtccggattacacaaaagtctccaaccttgtttagcgagcattgcgatattaaagtcatgaagatgtcgaaactgttggaatttatttta

SEQ ID NO: 121614 - DNA, 2008 bp, Cannabis sativa
ctgtagcattaacctcaaaatgctgtgttgaatggtgcctccttggaacaaaaaggaacggcatttatataaaatgccgcttccttggagaagctcttaggtagctataacatgtttaatttggtaatgttaaactattaattaattaaaccaattaattaattatattatatcattcttaattagctaataccaagctgtgtaattagctatagctacttagcttttcgtcttttcctttcttttgtactttctcattctcttttcagagtttcgtaggaaagagtttataatataattcaatatatagttcaatttagatcctgaattataggagattcatgaaaatatatatatatatattgtataaataaaaaaaaaaactgtggtaataataacaatatattgttgatattccaaggactgtcatttacaaaatatatataccctttcaaatttaatcacccattaatttaaaacataaatatatgtatttcgttaggttatagctagcttgacttaaaacaaacaaatggccaataatagtaattaattatcatatgatgttttgccaattgacctaatagttatgactcttaattagataagaattgctaaaagatagtgtctaacattatttgagattccatattattattggcataatataacatcaagtatgtaaggtgttgcttcctatatatcttacgttaagaaaattgagttcactctatggaatgagattgtaagaaatttatctctctttgatttctgatctcataatttctaatatggcaatatttagacagcatcttaaaaaatttagtgaataccatccattgtaattagggtcggcaaaacgggtcacacacgataacaagacttgaaacccacacgagaattagcgagtttggatttgccttaaatgggtttgagtcgtgttcggattgattcgtctaacccgtttaataaatatgttgtattcgaattgacacggctaacacgaaattgatctgttaatgatttatttaaagttattttagtactttaacgtgtcataaatttgttataaatgtgttgttgattgacatgtttaaacaaaatatgcttataaacgagttacacggatcttgtcaacccgtttataaacagatcgtgtttaagtttcatttttttgatacaaacgggtcatttttgggtcgagcatgtaccaactgttatacatggatctcgacatgatacgaacacgacctgcgaacacgaattgccacccctaagtgtaattgttctgttagttttaagttcacttttagagaatcgaactttgttgctcttgtacactttgaattgtagagttagtgctatttgaaattggattatccattctgtacttggtaattggtatttatttatatagttaaaacattttttctaattaaattgtatggtcttgtatagttttaagtacactctagagtctagattgtggagttagtggtatttgaaatagtgttgcctttgttaaagactttcaattccattgtaattagtatttttctcaattctattttttaaaaaagaaaatataagtattaaataattaatttaataattattataaaaaaaattaattattcttaatttgtggcataaatacttaaatttaattatcggttttatataaatatttaagtttaattctttatggtaataatacctaagttatatttctaaaattttttaggtacttaatcgttaagtgtcaagttttatctacgcattattttcttttaatttttaaataaaaaataaaaatttaatgatatatacaattaagaactgcaacgtgataatttatttgacatttaatggtcaggtacttacaaataatttaaaaaatttataacttagatattatttgtaacgccccaatattttgccttattttacaaaaatactattttcatgcataatttgaaaagataaaaaaaataatttaaatacaaca

SEQ ID NO: 121615 - DNA, 984 bp, Cannabis sativa
  modified_base (935)..(958): a, c, t, g, unknown or other
cgatttgggaaaaattcaaaccgcaactgcaccgcgaagaattttaaaccgtattttttttgcggtgcggtgtggtgcgggcggtttgatgtacacccctaccagcgacatatgttatcaaaagttgttggtaaaatcagaattgctggaatattatttgatttattattgaaacttaattaagttctctcacctaaaaacgactgaatggtcgcctttccgggtttgaaggcagtcgacagtttgggttttttattctacttagtctagtcatcatcgataatactgaacgaatttctgagtttgtagacagtcgaaatatcaatgtattattttttttcttttttttgaagttaacgattggaaagatgaaaagaaatagtttacaccacagtttcgttaaagttaactgaagttaaaaaaaaatcggttaacctaaaaattgcagttagataactatttttgatgaaatttttaatatataaagatactaaaacattattaatacattgagacaaaacacagagtcctctcatatataattattttattttattttatttttgaacaactttgatatataatattgtaataacgtttattaggttacgcaataaacctttctccaccaataattatttgttaaaagtcttctaaattgaccatgaccatattattgctttgcccataaattctcgtgctcatttcaaccatggaatactaaccctcccattccccaccaccaccatatccatatgatgtcaatacccatacttcattaccttattttcttttttattcggaaaacaaataacaatacattacataatcaaacccaacttcaaatttctaataaaaatattaaaaacttaatgttagaaaaacacatttttatacacatacacctataagataatttccaaaaaaaaaaaaannnnnnnnnnnnnnnnnnnnnnnnaaaaaaacaaaaaaaattaaaaaaaa

SEQ ID NO: 121616 - DNA, 1132 bp, Cannabis sativa
atatactatcctttatttatatatgttcaatccacaaatttattttacatgcatatataggattcttcataatcatgatatccatatagtttcatattattattctaacatatgaaaactcaacaaaaaaaaaagttgaacaacataataaaacaaaggcatagaaaattaataacaaagcaacacataatttgccctttacaaaaagaatatgggtttttttttttttaattattattacattggacaatttatgctaagtggagagtaggttaggaatattctctttttaaacattgtttcaaacaagtgccccatcataccatctttcccatctcttttatggaccatcttttaaagaaaatccaaaaaataaaggggaaaaggagaaacaaaagttacataatgaagagaaaaggaagccaccaaaaagaaagtcactttgctcagcgtcgtgggttttagataaagggcttcaccatgttacataaaacttagatgaaagaacttcataatttatttacctgcatacaaagggcaaaaagttaatgccgcagtttattaaattgtctgtgaaatcgaagtttatctatgaccttttctttctaagtttaaattaaagcatataattatatattattaaagataaaatgaagcacgtatatttcatacacaaaaataaacaaagcttaccatgtccttcacagatctttcgcaggaaagcaaggaagattatgattaaggcaactccagctaacaatccaatgataatagcaaatgtcttctcaccatcattgcttgatttatctgtaaattggtttgattaaaaatgtgaataaagcattgaactagaccgtctatctctcttttctcaataaaacaaattggtttataaatcctaagagacttttcaatcctaccctaatttcaacacaattgagtcatacagtaccatacattttttttttcaactgataaatcaattaggccaacgatgaaatgaagtgattctcatcaagtcttaattgctttatccatctcactaggctgtaacttttactatacatttttaaaagctgctgtaaaatgagaaagaaaagaagaaaaaaaaaagagacgcacacacttgatt

SEQ ID NO: 121617 - DNA, 1284 bp, Cannabis sativa
  modified_base (1238)..(1244): a, c, t, g, unknown or other
cttcatgacaataaaccggaattgcttggataattgatttgatcaacacctcacgaccgacctgagagaagagcccattttccacccttgaagtttatcccagactttgtttcgaatcaagccaaaagcttccctcttatttcggccaacaaaggcaggaagaccaaggtactttgtgtgattttctgtgaatgtgaccccaagagatgcagctaatctctgaccttctgcatgggaaatctttctaccaacacataggttagatttattgaaattaatgcattggcccgataaggcagaatactgctgaagtacctccgtaatagcttccccttcctcaactgttgcatccataaaaatcaaactatcatcggcaaacagtagatgagtcaatcttctctctagatgcccaaaatggagaccatgaagtttgttggcacgacttgcttcattaattaagcaagacagcccatcagagcaaataagaaacaaaaacggagataaggggtccccttgcctcaaacctctttccggaatgatgtgtccccgagcttttccattgagtaaaaccgagaaggttaccgacttcacacagcccatgaccttggctatccatcgctcatcataacccaatcatctcatcataccttccagaaatctccattcaactcggtcatatgcttttgacatatcaagtttagagccatcttctttccattcccaaaccgaccctttttcaagtagtggaggctttcaaatcccaaaatggcattgtcttgtatctgtctccccttgatgaaagcactctgattctcggagatcaccttatccatactcatcttcatcctatttgccagacatttagagatctttttataaactacattgcaatgacttaatggtctaaaatcactcaccgatgttggatctttcactttggggataagacataacaatgtatcattaatgcaactacaatcttcgttgttgttaaacactaccaagcaagtcgctataacctccttccccacctcgtcccaatgattatgataaaatagccccggcaatccatctttccccagagctttgagggggtgaatttggtcaatagcagcttttatatcttccttagtgaactcttcgaggagcaggctgttttcattaaaagagagtcgacaaggaacactccgattgaggatttcctccatgttgagagaatgtaaagaccgcttagtttnnnnnnnaaattagcagttaattaagatttaattatgaaaattattt

SEQ ID NO: 121618 - DNA, 1019 bp, Cannabis sativa
tttttttttaaaaaaagataatctatttttgttggaaatttgaggataatattcattactgggattttcttccctaaaatatatatgacagctttcaagatacatttcaatattttttgtattctttatttagacaattatatatttatttatctttaagaaaaatatattaattaatatcatatttataaattaagattagcaaatatagatttcccatcaaaaaaataaatttaaattaaaacacctaaacaaaaagaaaaagaagaagataaaattaaagaggagaaggaccaccattcctttacttaattgtccataaaagagagatataagattttcttcaacaataaaataatccaaagaaaacaactccatgccattgccaacacatcatttagctataaacattaattttcaacacacatttcaaccctaaattatgcaaataaaatggtagaataattatattggaaatttgaaaattatataagtcatgtaaataagtaaaatctttaaagcacaaatatatatcttcaatttcatcaagtagctttagtcgtaaaagacaattaattatagaaacaattttgtaatcacaataaataagtgcaataaacattatagtttccattagatgagatcacatataacaaaataaaaaaccttacattatatacctatcaatttcagataaggacggattatactctctattaagaaaatttaatgtcttctaattatttatgattaattaattaataataataataataatttttgtatttaataacaattaggtgacatcagccaatcggatccttgtatttaaaaaataaataaataaataaaggttacatccttaaatgccaaattttgagttggcccttgtatttctcaaaaatccttactccttttcataataaaacaatttattattactctctaacattaaaaattaaaggctaattagtaatttttcccctcgaacttttacatgtactaaatcgtgccccctg

SEQ ID NO: 121619 - DNA, 694 bp, Cannabis sativa
tatatttttattattgtttcaattttttttttttttttctaaaataaagttaaacggtgctattgtttttcaattttttttttttttcaattcatattttcctaataaattgccatgtggtcttatttatacatgtcggctactttattgtcatgccacattataagataaaaagccacatgatcattcagttacaaaaataaaatttattggatggaagtaccattatacaacacagtgaaaaatttagggactactttaaacgggttgaaaagtttaggaagtataattatgcatgtgtcatagttcaaggggtaaatatcctaaatagcctaaaaaaaaataacaaaaaaagaagtcaaaggtaaagaaaaaaaaaagtcatcaaacaaaaaaaaaaagaagttagcgtgaaaaataaaaacaaagagatatgaaggggaaaaaaatgttgttttgaagttttaataaacaaaaaaaaaggtaaagaaaaaaaattaagtaggaaaagtgtaaatgtaaaaattctcttatcaaagtacatatgtaaagtttagagaaaaattagtattttatgtaatttttttgtgcactcttaagggatattacccataaataagtagtattaaaaaagtttgaatttttatgtttaatttttctattaaattaaaaaaaaatatcttatttatcctta

SEQ ID NO: 121620 - DNA, 1530 bp, Cannabis sativa
  modified_base (27)..(33): a, c, t, g, unknown or other
aaaatagattacattgaaatggagttnnnnnnngggcataaaacccaacacaagggcacctatttcacttgtgtcttgcagcggctccatcttcatcttcgatttaatcatcttaataatcatcaacatcttcttatttctgggttacttaacattttctgacaacaagattagttgaggagttctcaccgtcaacaacttgttttcctatttttgatgaaaacaaagaagatccacgagtcgaatttttgatttgatgcttgtcaacctgagcattgggtgcttgggcatgaggtggtgcaggtgctcaaaaatgaaagtcctctaaatcttattctgatgactcaagtagatttgtggtatgtctagttgatgtcacaatgcaaaggttgacccattttaactatgacggtcctgaaaactaaaaccctaggtgagttgtcaacctgtgtgttgggtgaaacactaggcgcccggtttgatttccaaggtgttgttttgtgtgttttcagctcctgaggcctggacttgaatgcttcatgtcttcatattacagaacactgaaagatagtgagttggaaataacttggtgggatccaaacacccattttagagttctcagagtgagcctgggtgtggggctagggacacctcctatgtcgactgctatgactcgggactactcaactctaagatgttatctttcttgtcatgtgtcaaacattgatatctacgtcaccaaaaaaagtttatgggttaacttagttatatcaatataattattttccatgaaatattattcaaatatttattattaatttatgacaacaaaatatctaattaattataaaacctttattatctctttcttctttatttttactaacttggtggagtattctaaaagtttacaaaataatagtggaaatattttaattgatcaaataatcaattaatgtaatctaatgtgaacattatccaagatagtgcagagatcatgggcctatgaaatctagactcccgataaaatagatccaaaatttaacaaataaatttcgtaacttattaattactcatgactcaactatagacttaaaattgcactcctaatttcacgaaatactctatatatcaaatatagatatgttataatattgtccatcatttatatcataatgatttatggtcctctatagataatctataattaatagggactaaaggtatcattttaatcttttaattatattttattcttaaataagttagttgatttgatgatattttaatcgctgaaatgagtgctctgccattaaatactttaacttagctcataggaaattatctttttacttctaacattaaagctataaataattccttaggaaatatgtaaagaccgcctagtttaatttggaaaattagcaggtaattaagatttaattatggaaagtatttatagatatttaaataattatttatgttgttatatttgaattcagaatgcatttttatgtcatttagtgaaat

SEQ ID NO: 121621 - DNA, 827 bp, Cannabis sativa
taaaggcaacattagtatcttaacgccagtttatttatggcatcttattttacgtaagtaagggcgttacaattttcacatgaagggcttcctcaccccgtccccaccccattaggggattcctcaccccatcctcgatgggaaataaacagggatagattttaaaaattttaacaagaattggaacgaggagcattttttgctaatttctcaccccgtgtgcattcttatattctataataaagattcaaatggtcattctaatagatgatgtaaactatatctccatttaagagtatcttgatttttttctatagagaagcattattcttcctttaaacatattttaataatatttaaattatactttattttatttttattattaaagaaatataaaaaaaaaatctacaatggacctcctaaaagaggtctattaatacatattttatctgtttcggcatctgagagaatattttagtctaattttttatggtcatctacgatgtacttatttagaacttcttaaaaaaatttgagaaattcaaaaaaaaaaaaaaggccaaaaatagggttcaagcagtctattttacacgcgtataaaataaaagagtcacatacaactagggttgttcatataaaccggaacaccgcggtttaaatctggaccacgacaatccgaaccactgtaaaccgtaaccggagaaatcgtttttggtggtttggtcaatccagaccgtttacagcgtaatgattcggttggggttcgtaataaataattaacggttaaaccggaccagactgtttataataaataataaatttat

SEQ ID NO: 121622 - DNA, 1940 bp, Cannabis sativa
agcaaaagactactaatttataaattagatacataaatgttttttattttttagttgaaagatatatataaaagtgttgtagtatatgatcctgatctcattcacataagcactattctaaactgcttacctaatgcatagatggtgctatttattttttttaaaattggagctagacttataatctaataatataatacataaatgtagtagaaacgtccaaatacatgtagattctccaaagcttctggcactcatatatttatataaatatataatattctattatattataggaaagttttgttagaaactaatttacacaagcaattgtgttcgtgtgttctgtattaactcaaatataatataataacttagctgtatataatatatatgtatatctatccaataccgagttgataaacacagtatcattatcattagtagaaaggatatatagatatatatagtactaatttagttgataattcttgtaaattatattgtatataataaggtagttatatgatcaactggctatatcaagttgtagaccttttgacattgatccgagcttagagtagtactacaagtaactcgcaagttaatttgattgattgatccttatattatatgcctagaatattatcataatatatcaataaataaatatgcaacatgaccatgacaacatactaaagctacttattacagtctcgatctcaagaattaattaatacccaaagtcaatagtactaatatatatatactagtaatttttaatttaattattttagaactagaactgatttttaatttatttaattcaaagaaatattggttatttatttatttatttatttttgattggtttctgtgtggaacaaattttattttaatttatgtgttaatttttttgtcttaaatttttaactatttgataaatataactagttttttcatatgatattttgagttattgtgtattatttattttgttatgaaagtactggtttaggtttatgcttcagtattttcggaattgttgctcgccttttgttttataattataaccgatttatgaggtattatgtgttattcgtttttagtcaatttattgtggaagtagttttgtttttaatttatgtttcagtgttttaggaaccaattttctttttgttttttaattataaccggtttgatcgttattctgtgttatttgtttgtatttattatgttatagaattagaaccgattttattttaattataacctatttgagttattctgtattatttatttttattcattatattataaaactagttctattttaattataacttgtgtgagttcttgcgtgttacttgtttttattcattatatgttatagaactagttctattttaattgatatataagacatcctccggtgatttttccaacgatgacacaactctgttgacttttttcggtgacttttccgtcaacggcgacttttatcgacttttctgtcaacgacgactttccatcgatttttccggtgacttttccagtggcaataacttttctaattatttttaatagtcaccggtgatttttttgactacaattattattagaagttttatcaaatttatttattttctttttttatttcctatattttaaactttgattattttgtaagaaaaaatgcggcaaaactcccaaaaatttcgctctagttgcaactaacccccaaaacctattttttggatgtaaaatcctccaaactcgtattctgttagcatttagccatttctatcttatttttgttgttaagtgtcatgtgggcatgtccatgtgtacacaggtatttgttcacatgaacatagtgtatgttggatatattttaccaggatcaagatttactaacaagtatgttttattaacatcct

SEQ ID NO: 121623 - DNA, 1959 bp, Cannabis sativa
ctttgatatgtttcaaatcgttctttcaaaaaaattttaggctgttaatttttttttctaaactattgagattgttagatataaggactttcaaataattttactaatagatatacgacatgaatgaaaatcccgggagtacaattttatacatatcaaaattctggagacacgatttgattcatattaaaatccaaagagcatggtttagtacatggacaatcgtggtgttagtgaaattgaacgtacttagacaaaattcttaaatccaacaatctcaatagtttagaaaaaaatttaccgatctaaaaaatttagggagcacaatttggtacatgtcaaaattcgatgacaaaatcatagaattttattttatgtagctgagcctaagagcactcacaataactaatataaaataactacaaatgtaaaattatacccaagagtaaaaaaaaaaaagcacatacaatggatgagctaaaataactcaattatttacctcatgaatagtgcttatttaaatgtagctaagaaatttattagtttagttattagagaactcacaacagtctctctactctatcatttcaaatacctcattaaaactctattttttttcctatcttacctcatatatttacattacattgatggagtttaattcaaattaatttatttatctatatttgttaagttgtaatttatttttgggtaattattaattgtgtgaaaaagaaaattttggtggccaaattttgaagagtcttctagaggaagctttggagtgtcttggtgtccaagtttattttttctataaatatgtattttgtgtgagagagaagaagagcgtgtgtgagaagaagtgtgagttgtgaaattaaaaatgagtgagtttttagtgcgcggaaagtgagaaagaagcgaagagtgtattgggttttgggtggagatattgagatagagagtatatgtaattttggaataataagtgaaatatatttctcttcgtgaatttggtagttttactgaacgtaataaaaaagttactttgtttctttattatttcaatgcacttgaagtttattattttttctaacaaatggtatcagagccaatgttaagatctacaccgaaagtgttaaagatgatgtcttccacaaaacttaagatcgagcattttgatgggaagaataatttcagtttatggcagagcacggtgaaagatgtattggtacaacaagggcacctgaaggcactattgggaaagaagcctgagagtatgaatgatgaagtttgggaagagctgtagacaaaagccgtaagcaatattctcttaattttggatcctaaattaaagtacaatatattgaatgaatcatatccgtctgagttatggaaaaagttaaaaatgttgtatatgtcaaaattcttaataaatagattatatttgaagaagtaattataagagttgaagacgattgaagaagatgatattagagatcatataaatggatttaataagtgcataactcaattgttaactgcataggtcaaaattgatgaagaagataaagttattatttaattgacttctttacgaaaatcatatgaaacactagtgactgcacttttgcttagaaagtttactttaattgtggaaaaggtttcaactactcttttagagacagatagtatcaggtaaccaagtggtatgtctcatactgatcaagctcttgtgatgaggtcagaatcaagttgtggtaggagtacatcgagagaacgatatgataacataagagacaatcacgcacattcacgctcttagagggaagtggagtgctactattgtcacaaaaagaacatgtcaagcgaaattgtgaagagttgaccaagcatctttgtgacagtcagtagtcccgtgatccgttagggaaaataccgggtaagctgtgcaatccc

SEQ ID NO: 121624 - DNA, 4087 bp, Cannabis sativa
  modified_base (43)..(47): a, c, t, g, unknown or other
  modified_base (97)..(114): a, c, t, g, unknown or other
  modified_base (323)..(324): a, c, t, g, unknown or other
  modified_base (724)..(725): a, c, t, g, unknown or other
  modified_base (991)..(992): a, c, t, g, unknown or other
  modified_base (1405)..(1422): a, c, t, g, unknown or other
  modified_base (4042)..(4062): a, c, t, g, unknown or other
attccgctgcaaccactgtaagatttcttatactttatatgtnnnnntttcatatcgttttagaagttcatctttaggatgttaataacatacttgnnnnnnnnnnnnnnnnnnggtaaaataattccaacagtaaagtctctaagcaactccctctcttgttttcttaagtttcaagttatggattttgcatgtttttgggagtttaagttctgtagttgttgtagatatttgatttgtgtttttttaagtttaattatggttaaatatgttgattcatgctcgttttatgggttgttattaggtttgagcaagctttgagnnttagaactcaagcttggctctttaatggcaatttttgattctgagcttgatttgttgttttgtttcttgatatatgtctattggggtataatatgcaggtctggaaggtttggtaaggattggaatcgatttgataggtttttgaattttttgggttttctggtgtaaaccggttacccggatttgctactgcgtttcccgaaaagttcgtgttagtttcagagctttggctggttaattccctactagtttaaggtatttccatgttaagttgcagcagataggtttttggtttaaaacctaagtccccgattgtgatttagtgtgtcacttatccatgttgtgattgatgtgatttaggagcatgtaattcgccgagcagttattccactcaggttgnncggcacacctgaattcgaaattaaggtaagaatagtataatgttatgcatatgttattacatgtttagcatacatgttgtttatgcctgttagtgtacattgatagtagtaataatatacgtagagttgtattgattattgataaatgtatgttggctaaaatactgaccaatgttgtcacatcaatatggctagagtatgactagcatattgagtataggctaacattatggtcaatagtattgtcgtatgaacgttctagactnngtaccgtgtgggacacggggataggattatggttgggtgtatggttgcctaattataacccaggatattattatgttttatgttatgcttttcttacttagtctgtcgactcacactgctatttccatgtgtaggtaagtgcaaggctaaggctgaacagccatgagagtgagcagatgaagattgtacatgtcggggaggttaggcctggagcgtacaatctttgggacatcagggcttttgttgtgtagtcgctaggtgacaagtttatgtatatgaatattaaacttttgtaaatgtattttgtaaacaggatcctggaattttatacgtatgatactttatgttttcaattaaataagtaaaattttaattaatcacgctttttgataatctcgttgattagcaacgannnnnnnnnnnnnnnnnnaatcacgctaacatgcctaaactagttatggcattacaagctcaatcaaagaaggccaatcaactaggcacctccaataaaaaaatccttgtgtgcgagtatagtaggatcaaatacaagacatgctcaagggcctagctggtccaaaacctcagaactcgagctagacagggctatgggatcactattctcagcctatatcaatgccttgcccttgccaaaattcaagatgtcggcttggaagatgtacacgggaaaagaagaccctctagtacacctgaagtactttaagatccaaattgatctcctccaagtatctggagacgtgcgatgctgaatctttcaagcaactctagctaaaatagccaacaatagtattttaggatggccctaggaagattgaattcttgggaagagctctcctgagagttctatattcagttctatgcttcaaaataaagcaagtacaagatgaacccttattgaggtcggtgaaatcgatacatactcgccattttttgttcggcttgggtactagtatagggttagaaagctaggtagaaagcttcaatgataaatttgtttgtgtatagcctttctacctcttctttcaaggcttgtgcacattctatgtctagtagtcttctcttctgttggatgggacgaaagtctaaatcaatgttcagggtgtgagacatgacagtggggtcaataccaaccatatcctcatgtgaccaggcaaaaatgtcaaggtttgctctcaaaatttattgaggctaattttattttgagcagcaagcctaactgattttgagcttcctaatcgggatatctagatcgatttccagtcttctagttcttatattggcccaacatttgtattttccccaagtcggggatccatgtccttatccccgccttgggtaacttcctattgggtgatactttttcccttgtctgaactctggtcagaggtactttccttcgtgaccttagatagagcaagattatagcattctcgtgcagttctttgttttcctttaagacagcccaccccacttttagtcgagaacttgatgcgcagatgaaaagctaatgtgacagcttttaaatcatatagggctggtccgcctaccaagacatttaaagctgatgggtcatcaattaccaggaattgtgccattacagttatgctcctttgaacttgtctaatagtaagtggtaggcagaaatgtccaaggggtgcaatactctagctggagaactcgtatatgagctgagtgtaagggattaagtctttaagttggagtcccatcttctcataagttattttaaatagcatatttgaggaagctccattatctatcatagtttgtgcaaccatcttatttgcaatctgcacctctacgaccagggggtcgttatgtgggaagatgacatggctagcatcaacttctgtaaatgttattgttagttcccctacacgtggtatcttatgtttcctttcttccattgccaggactgcttcatttttttcatgttgtaaggcctgagcatacttttctctaggtttgctcgagtttctagcaagatgtgggcccccaataattacttgtaaatgcccgtccactagtggaggtattaattggttttgattattatatgcttgggcggcccattgatcttgatcggctttgatatacttttgtaagtgcgggttactctttctaatcaagagctcaatctcacacttcaaattattacattcgtttgtgtcatggccgcactatgcatgaaagtgacaaaacttgattgtatctcttttgcttatgtctttttcatgggagatggtttcttatctctatgtcatatgttagaactaagaaagcaataaatttagaggcattttcccaaggctgctgctcgatgttgccagtgaattttcctttccttcataatttagatgaattatgaaataaagtggcaaaattgtaactagtgaggcccaaaagtgtggccggccacttagtgtatttttttgcccattattttatctttcttaatccatataattaaatcctaaattctagttcaaatactataaaaggaacatgatgctctcattctcatccaacctttaacctatctgaagctagttttcattctttgtcagacaactagtaaatgagagtctccttctatggtgatttcgaaccactccttgttcttcatcaaattcgagccattagtgatagagtaccatgcccactcatagcaagtcaagtactcaatcatagtgcgaaagatggtggttaaccaaattgaaggagagaagatccaggttcacatcttgataatgctctgcggcaaaaaggaatcaagggctagagatatgaacggaaggatcttattactccagtgccatctatgtaaggtaatctaaactttatatgtgtttatttcatcgtattaggaaattcatatttagggtgttagattatagtcaataatcaaacatacatgttagtaaatctagatccctgtaaaataagttccaacaacaggtccctctaagaaaatgcacaggaacaggtctataatactgttgggttttatgccnnnnnnnnnnnnnnnnnnnnnataattagatttacttattaatata

SEQ ID NO: 121625 - DNA, 3096 bp, Cannabis sativa
  modified_base (3063)..(3070): a, c, t, g, unknown or other
acacctgggaccaattcccaggtttcacaaaaggggcgggccgcggcatgctaaaggccatgccgcggcacctgggttccaaacccagaaaccagcaagcttacatcgaatttcagcagccaaaacacaaccatttcaccctaaaacttaatcaaactctcaattcacaaattaaagttgctacaaacattagagagttaaagcacatacttcatgcatcaaaatccaacattaaactccatatttcagattgtacaacaagcataaaatcaagctctaaaccaacaaaattcatgctcaagaacttgagctccaaatcaatacaaccctattattttccagcactataacaccaaacaagacatgaattttaaccaagaaaatatccaaaaatctctttcaaaactcagcaatataaccataacaagatcatgaaattaatactcaaatctatcaagattcaacaccaattcctcttacatgaaattcaagagcaagacaacccataacatgcttttaccataataaaattcagcaagaatttcaaataaaatcagtagaaagaactacctcaattccaagcttaaagttcctcaaacaaagcttcaatcaatcctcaagtaccaagccttttttcaccaaatcaatttgaaattcaaagagagtttgagagagagagggttcgggtatgaggagctaaaaaccagaaaattccattatcttattcctcaaaatcttatcttttatcaaatatcaattgaaggtcaaaagaccaagttgccccccaagggccataataaagtttatgcataaactaaggggaaaaatgtcatttaacttcacacaacacttatataattttgcatatataatttttcaaaatattcacatataattgaaatgccaaatatttcaatccaaattgcatttcggacccgaatccagttcggcccgaaatactcggtggggactataccgcgctaacctatcagaacacacctgaaaaggacaacacatgcacactatatattaatatagtttcataagcacattaataaattaatttcactgttttacccttctcgggtcaaaattactaaaatacccctggctcactaacggggtcttaacacgtcataaatcatataaattcacatatatttaattatataataatataattcatcaataatacagaataatctaattaggattttgctaatctattctcataattctcgggtattacaggcagagtgtcgaccatgctcgggtggaccatgcacgtctagtttgtaggaagataatgcctccaacctttctttagttcccaaatgaaacgatcgtatcctttgccacgtatttggtcgggatacaggtgatgttgcacctcgagcttcagggaaggtgtatgtttactgctcacttcccaatcttcaaaactagaatttgaaagatcatcactagatgaggataaattagcatggagacgggggttatcttcgtatagaatttgaagtaagtctagatcaacatgatgcttgcctccccagaaatcaccaggattcatctacaaaaggtggcatacaagagaataaaagttggtcagggtaacgaatgaaaaatagattttacatgtcgaccaggcctaatcaagaatcgaaagaaaagatttcacccagagttagaattttcaatcccagaagttcaaaactttagttggaacctagtagttttcaaaaccttatgaacgaatgggaatgaacgatttaaggtcaaaatcgaagcgcagtcagataattaggcattatagttgaatggtgattgaaattccaaatcttaaaagtagttattctacacttagtcaagaatagttcaagaacatgcaaaatctatagcaaagaattcaaaaataacagatacattccattgcagtcatctaaaggaaagggatgaatggcttactcaatgattgaagtctttcttgatctgctcggatggtatcgtcagaggttttccaacaagttctttgaagaaatctgatggaaatttttggctctgattctttgaaaatgaaaatggctaaaatgatttctaaaagctttgatctccttttataagcaatcaaaaaaaggaaaaattatttttgaaaatttgaatatttgggtttcccccaaaagtcaacgttagtactcattacaagaagtacaaccgtcaagcatgctcaaacatcaaaccgtgaatcgaggtacagctttcaagagatattaaatgctcagacactaaagagaccctcaatcaacatgtcagatcagtaccaactatcgaagacacgcgtcactcatccggacaagagtcttgactgggtgaagtccacgtgcaaacaggaaggtcgtgcacaaacttagggagcaaatgttatcctatttttgcaccgtgatgtggcaatgagctagatgacacgtgtcttgaatttccctacctgggtagaaggaagtattcctagcagcccacaaaaggttgatataaatgtccatcgtcaacatatagcaggatatttgagcagcgtaatcaagggacatcaacatccgaccaaagtacaatctcgtgatcaacccacatgcactaggcaggatatgtgagttggcaattttagagataagtctcattgcctccaagacacgaagatagtctttatattcgtgggattaggtcaaataataaaggcaatacgccttagtttcctgttctttgcattgtacttatggaattaatatagtatcctattttatttgttatagattaacggttaccactcttcacgtaataagctcctataaatagtggcataatctcactattgaggggacgaaacacttagttcagaagaacactcgagagagaaaataccgatctaagagagaattactcagagatcaattgtaagagctttagagagaaagaacatttaattcttgttctcaagtcaatacaactaaaaggagagtaggctattatcattctcatggggccaaactattggaaatattttaccaagatctnnnnnnnntaccatgtatgtttcattaacatcct

SEQ ID NO: 121626 - DNA, 1476 bp, Cannabis sativa
agtaaaaagtccctgtggagacgaactttgattacttatcattgtattacttgtttgtgattgtgtacacttgcgcaattataaatcaatataattctcacaacatgtattttgaattattattgaatatagtcctttgggtaaatattttataacatggatccccaaaacaccttttactatcgtatgatgtctgtttttagtgttttactttgatcaagttttaagataatcacagtttttaaaaattaattaatctattagtattaaattagttaaatcacacacgtggtgtccctatagattatggcattacaatcttgtttgcaatctgcacctctacgactagggggtcgttatgtgggaagatgacatggtaggcatctgcttcagtaaatgttattgttgattcccctaaaaatggtattttaggtttcttttgttccacagccaagattgctttattttgtttatgctataaggcccaagcatacttttctctagctttgcccgagtctctagcgagatgtggatctccactaattacttgtaaatgcctgtccacttgtgggggcattaattagttttgattattatctgcttgggtggcccattcgtcttgatcaactttgacatacttctataagtgcgggttattccttttgatcaatacctcaatctctcactttaaattattacattcgtttgtgtcatggccgtagtccgcatgaatgggacaaaacttagttgtgtctcttttacttatgtcttttttcatgggaggttgcttcttgtacgaaaccatagactgagcggttgcatagattgtctatatgtcatccattagaaatgagaaagtagtaaatttggaggcattttccctgggatgttgtttggcgtttccagtgaacttccctttctttccattaccctacctattgctattgttagaccttttcccatttgaatttaaaatgttgggatatttcgaattctagggggatgtttcgaccgctgtggtgtgatgttgatttttcttttgctcgacaatgtccacatgacgtactgcttcctcgagcttaatgaatccatctgctcgatccaaatattcagccattgatcccacatttaatctttttatgtccttccataattctcccagaggctcaatgcccccagtataggtgctaatcttccctctttagtcaaccctttaaccttcgttgctttggtcataaaccttctaatgtaggccttgagaggctctcttggcatttgcttcacttctaataggacttctaggtgtgagggaagttgatgggaggaggaaaattgtgcatggaactccgaggagaaaacaatccaataattaaactttcttagaggcaatttgaaataccattgctaggcagcctctatgagtgtggcaagaaagattctacactgtagatcaccccttatgtaacaccctaacta

SEQ ID NO: 121627 - DNA, 1113 bp, Cannabis sativa
cgaacccactctctttctcttcttcattgaaatttcaaaatccttagtgttaattaattgaaatattaatataattttcaaaacagtgcatacaaaattttaggggaatcaaatactattattggggcgtatcgaggaatatcaatagcagattgttcaaaacaacttaaaaacttaaaatgtgagtttttatatattgaaatacattagtgatatcgtcacacgtgcaaatcctaacagttgcttaaccgatcgaaaatctataaattttaattattaattatcttatatattaaattaacaaacaatctaatatacatactaatataaatatttactttttttactgtttggagaaaagaagacatacaatgtaaaaattgatttgttaccgttttcagcgacaatggatcatagaacacttgctacggtgattcacaaatgcttcgaatgatgctgaattatataagaattttttttcttatttttttatgttaacttgtaattttttttctctattatttttctatttttaattagatatattaacttgttaactcttagactaattttaaaaaatttgtgtaatatatttatttagaataaatacatttaattatatgtttaatttattttttagttatataaaattaatatttaatttaaataaattagtaaaaaaatataaatttgtgaaaatatattagtttttaaaactgaaaatataaatagattttctatgaaaatcaaagataatgtggcgtcaattttttttttaataaccaacgacataatggactacaacgccaggtattagaaaaaattgacggcataaagtatttaatttccactaagactcttatgtcgttggttattttataataactgacgacacatgttttccttatgtctttaattaataagactacctacaacgtctccttgaacaaccacagtactaattttttccaaaattgacattaaatgtcctaaaaaaattcatctaaagtcctttttgtagtagtgtaaaaaatatttaagtcaaatttaattttttttatttattttttaccaaaaaactttttttgattttcttgattttttttttttttt

SEQ ID NO: 121628 - DNA, 939 bp, Cannabis sativa
tttattttcaatgatcttttatgttaaaacttaatgagctctcgaaaaatgttaaaatttaatgtcattcgtcttagatcagactaatttgaaacttttatttatttagatttaaatttatctaatctttttttccctagtattgcagcttacatttaataatttaccaagttacttttattaatttatgcaggttcctcaatatatgatttcccaaacaaagcgatttggaacaaaagtacaactttcaatgatctctttgtaatttccgacctgaacactactttcactaataaatagacggagctatttaaagcaacaccttttggacattttttaaaattttcaaaggatcttaaatttactactagaaaatttggttttagtgacacacattgagtaactctaaaaatctaaagtgacactttaacgcgcgtcactaatgaggctgactggaaaagtagttcttagtgacgctccaaacgtgtcactgaatgcttttgcactcattgtctccgcgtcactataggggtacagtgtcagattttgtcagactagaaaagcaacagccacacacatggagtgtcactatatcctattcttcttttttattctttttttattaatatttttagagatatagtgacacaccaaaagtgccactatattatatatatatttaaaaaatataataattaattattttaattcaaattttatatattataaataataatttataataattatatataaatataatttaatataacaataataattttaattcactaaatgtaaaatttatataaattagaccattataataattcatgtcaacacaactgttgcccctgaattcgcccaatatacgtggaccagtcgaaaagggacacgtggatcagataacttgtaaatatttgataagtctttgtatgc

SEQ ID NO: 121629 - DNA, 4737 bp, Cannabis sativa
  modified_base (1792)..(1795): a, c, t, g, unknown or other
gcctgaaaaccagagcccaccaatccattttttgaacgcctcataccatcttgctccatatcatctgctgaagccgaaaaatcactcacacgtgggcccacaaagtttcccaaagtggaatctggccttcttctctttgagtcaaccattgtagtaatggtagaatcaaaaaagttttcattactattgacatttaaagtcaaatcttcctcatttattccttgtgtccccttgctatgattacgcccagcatttggcaaagaatccttaaacatatcatgaccttgatttttgccaatcaattcccctgtattctccacatttctaggaactaaattgacaccctgttcagtgctgcttccttgagattcacgcaccgccgcaccagaccggagccactgtgctccaaatgttgactgtctcctctgtgtcgtggccttctgctccaaactataaggcttctcatgtaaatgtaacagctttaagaacagtctgggacagaacttctccgaatgccctatgatcccgcatatgaaacaaaaggttgggattttttcatacttgaaattagcccagtaccaagagagattatcgatgcttatcttcattcgccgtttaataggcttgtcaacatttattcggactctcacgcgaaggtaatcccgccaaatgcccacgaaattattaggatccgattcaatgaaagtaccaatgtaatttccaagagccatcacaacactaagcgtcatgttacccgtttgtaagttgtgtatttgaacccacatatcaaggttgttaatttcaacaagccttgggttatctccttccttcaacctcgtaaaaataaaaggcttccgatcgtaggtccacggactcccatcaattaccctttgtatatcaatctcatggtgaaattggatgagaaataagttcgggttgagttccttaacatacattcccatccccggctgccaaaggaaggccatcatgttttgaaacacattgaaatctgaaactctacctgttaaaagctttcccaccagacaccatctggtgtcaatcgccacttcttctctgctgcctgggagtcgtaatacttccgtctcttcctcttccagaggaatggtttctttctctacctctaaaactctcccctcactgctactagatgccatcatgggactaaccaccagcagaaacaagacaaaacaacacaaacactcagaacaaactctcaaaaaccagagagacagccaaacgtatcaagagatacgacagatttcatcaatgttaaaattatatgtcccactttcattttaatttcattttgttgaggaaattagtgataatttctaactattttctacctgtgactcagtctacaagatacttatttagtttgtgataaacttaatatttttaattctttatatctattaatgatgttgattttgaaataataataaaacaaaccatttgcaaatactctactctactgtgggttatgctatttacaaaaaacttgacctacttttcttgaaatagcactttctaagattttgaataaataccattttggattttgtattttgcaaaagttattaattagattctctgttttgttaaataataaaatggatcccatattttctaaaatggtaaaaataagacaccgagctcaatttttaataattttattttttaaaataaccaactttaagacactttttaacacgaacaaatacagaaaatgtaataagttttgttgattagattattattaagttttatnnnnacaaaaaatcagttcagggtcttatttgtacaattttagaaaaaaaaaaataggatttattttgtcatttaacaaaatagagagtaaattagtaacttttacaaaagtccaaaatgatatttaccctaaaatttttaatggtccacattctttttttcttttttttttttttaaaaaaaaatacttaatgtcttgaatcttttcctagacttatttttaagaatgaatataatgattttgatttttttttttattatttgtaaaattttcacccaagagaagtctgaaattttgattgcgctaatgaatctgattaaaggagagaaacacttgtttcatttcgacacgaagtctttcagtaactagagaattttaatcttggagttttacccaaacagataggtgcattcaaaacagatggtatctacaaaaatgttatttatatgtattctcctaagcttgtctaccgatcttgtggagtggctgtgaatttggaggcaaaactaaaaaagattccctatatgtgcttgtagtttttgtgtgtcaagggtaagctagaccttaaattcttggaatcttctactatttcaggattatcatccaaactaaaagtttggaattggaacatagaacttttagttttctaatgaataggagcagtttctaaagctctaaagcttatatattcttcactttcataatcaaacatcacaatcgacttagttcaagaagttgattcttctatgaaacttataaaaatactgtaaaatatgagaaagttaacaaaaatagtgtgatacggagttttttttacatttattgtactaattttataaaaatacattgtttaaagtttcaaattacaaaaatacagaaattcagtaaaataaaaacaaacctagaacaatttaacaaacaacatgataataaatataaaacaacaaaaatataactacaaaacaactgaaaaataacaaaatttacacttaattacgatagacaaaataatatcaactcagtatgtttttattgactcaaaaatctagacaagacttctaagccacactcgctcattagtttgatgagaacgaaaagtttgttaagtaattaataagagatacaacaatttttagtagttcacctcgtacattgcgatagtaatggggctacgtctactttgagtttttatttctcacgagatggtaattgcagtaatagactaagcatcagaaactctaaactctagagagagaagctctgacattgtgggaagttttttcaatgtgaaaaatgagctaacggagctcttcttttatttataggtgaaggaggcccacgaaaataggagaaaaaaaaatataaataaagtgttttccactgtttatgatgatataacggtgaaaattagcttctagtggtaaaggccaatttttggggcccggcgcgtcctgctacgagttacccggagcttatttccataactctcttggggtaaattttgacagtgatagcttcctaatttttattggggtgtgagacatgacttgatagaaagcttaaatagcttcaaaatgcaagtttaatcgagtcaatcagatagaaattgaatgagttatgttcgttttactgaaggcagttcaggtcccaacgcccaagttgacatcgacatcgacatctgatgtcaacctagatgttgtataagtgtagaaacatctaagggaagtactttgagattcctaaatgataatttgacaccacttagcccttttataggttctggcgaagttggtcaccagttttcggagatgttgttattttacggaaatgggagacccaaaactcttcatttctgggagccaaaattaaagttgtgaatttgattgatctaacttcatggatcattgcacttgtaaaaaacttgacaggctgtcgaaatggcatcagattttgataagcagcccctagcaaaccaggccatttgttgacctggatgctgggcccttcaaaccaagcttttgggattatgtttttgatacttccaaggcttctgaacttgaggtcgaggtctgtccccctgttttttaccatttcgggttcaattgttgcatcaaatttggcatttgtgcaatttaaggtagcgtcccaggtttattgtcaacttgggcgttggggccaggcctaggtcaacctagcttggttggccctatttctagggactcaagtttgttattttctcattgattttaattgaatctttatcaattctgatgacggtaaaaattcttggagcaatttttgttgaactaaattggaaacaggccaggttgacaaaatgtcaacctaggcgctcgacccagctccaggtttcaacctaggcgctgagacctagtttttcccttcaaaagttctgtttgatccccaaaaatagttgattctcaatattttctgaagacaaagctgatgcttgaaagaattccagagaaactccattttcgtggcccaagttggcaaattatcaacttaggcgcagagccagccccaaatgtcaacctagatactgggccctgttatttgtgcccaagaattgttgcttttgctctgaaaggacctatttccttatttttgatgaagatagattcaatgcaaaagtcggatctttaattgaccacttggaaggcgctcagattgatagattgtcaacctagatggtgggtgctcggggccctgggtgctcaaaaatcaacttgctctaaatctaattttgatgctctaacatgtatgtgatatgtctagttgatgttccaatgcaatttttgtccattttgcactaagacggtcctgaaatctaaaaccctagttaaggatgtcaacctaggcacagggtaaaaactctagctgcacaggctggcttccaggttgtagattcatgtaatttcagctcc

SEQ ID NO: 121630 - DNA, 1413 bp, Cannabis sativa
attgaatccgattctcttttattaattaatgatctaaattgtttatctcctactaagtgtataactcattttcatgatttggtagaggatattaattatcttatgtcttttttttctagagtaaaagtatctcatgtcaaaagagatgctaaccaagcggcccatggcttagctaagtttgctctacgattggacgaagatatattttggttggacgaaactctatccccaatcttctctgttgttgttactgattcttcacattaataataatagatctttctaaaaaatatatatatatataaatataatttttcaaaatataaaaaaatctaaatatatatttccccaaaaataaagtgccaaattagttgtcaaaaaaaaagtagaaactagaaaaagccctaagtgccacgtgtacggcgcgatgaacgagtagaaaaatagaagaaaaaaaaaacacacaatacaattaacacaaaaaccaaaaccagtagtaaagtaggagaatagtaggagtcaatagtcatctgcatctcattattttcagtgtcttacaaaaactgaacccacgcgccaccgccacgcgccaccgtcgtcgatgggtatgctgagtaggaaagacaagaaaacctcagattcatcttcatcttcatcttcttctacatccccttgtgcaaatttcagagcagcttatcacaattgcttcaacaggtcattttcattttcgtattctgttttttttttcttagattgaatctgaattttttgagattgatgggtatagatggtattcggaaaagtttgtaaaaggtcaatgggagaaagaggagtgcatctcagaatggcagaaatacaaagcatgtctctctgtatggtttcttctttttttgttgttggtatttttctttgtttttaaaatttgtggtatttttgaaaattgttgttgttattatggcaggaacacttggatgataaacatttgagtcgtttcttagaggctgagaagtcagtggtggatcattgtggtcaatctaggtaacaacactaatatgttaaaaatgtaatattagccttttgaattttaattgaaatggagtgtaattcaaagtaattattaaatttaacttgtttgtttaaatgagaaaatacaaacgagattgtgagaacaaagataggaaggtacggaggaagaacttgttttagtagttcttgcttgtttgaaagtttgtacaattgttattgtgatagagtgtaactgaattactagattaggtaaataatgatataagtactaagtttataagctgtataaatttaatagttttttgggttgagatgcaaaatgactttaaatttggtaactaagttagtaaatgttcactttttaaaaaaattaagaaaatggccaaa

SEQ ID NO: 121631 - DNA, 638 bp, Cannabis sativa
aaatattaaataatttaatattaataagtaaccaattcaaagtaatcgatccaatccgcacttttacggattggatttgaattattgtgcggattgttggatccaaaaaatataatcatgtttttagattaattgctttatttgtatctaataataattatattattatcatcttaattattacaagtatgctatccaaataaaattaatatactaaatactaattatttattaattattgcactaatttcttattctccctttgttttttctgagtagaaacgcaatttctcttcatctttcttcaaatttatatattacctcgtctaatgctattttttcaatcttaatcatttatttttcaattcaattaccaatagaaaaataaacaaacaaacaatgaaacaattttatacataaccattttctattttttaaattctacacatataaaaacgtaatttattcccacatcaatgtcttcttttgtgagggattcaagagcagtcgtctgagaatgattcgtttcggctcaacgacatcctttgtttcagatttttgttttcatttattaatttactattattagtttaattccaattaatatttttatggggttagaattataaggagttcat

SEQ ID NO: 121632 - DNA, 996 bp, Cannabis sativa
cgtcctccacctgaactttgatctgagaaggcttaattccgggcatgtccaccacaatagcgtaggcgtcagcgtactcgatcacgtcggccggggtggccgccatggccttgacatctctcacataagctctggttgggttgttgttttgaaactttccggcactggcaccggcgccgggtccggtgacggcggcggaagagtggtggtcggaattttctgggaattctaagatgttttcgaggattgagaagaggggttgggaaattaatctgatgttgttgttgtttgtgaaatccattgaagaacaaagattgaagctttgtgtgtttgagatctttctgagtgttatgggtttgatattagttgaatcactgagaatggtatatatatatatacaaataggaatgggaagagagtgttctggagattagtagagtgatcaggtgaacacagaatggttttgtctatagactctagaatggtgaagaacatagttgaaagttcctaagggaaattattattttgcccatttaatttgtctgtatttttctttacgagaaaaaaatttacaaaattattattttgccttatattttttttaataatgaataaatattttattaaaaataatgagagagtaatgtactgttaatttacgattatgaacataaattaaatttacttaaaaaaaaagtaaactaataaaattctttaacaaacatctttaaaatttaatacaaataaaaaatatcgtagagaataaaaaaaacaaaaccaagctttgagagcccaaaattaagtaattaaattctacagaattgggaaaaagtcttcacttcaatgataaatctaacattattaatgttacagtttcgacatgaacttgtgaactagtcttccataaaagtctaagttaatgctaccatcaaatttattgcttctacatgaatcgttttgaaattttctacaataacaacaaaatcaataatgaat

SEQ ID NO: 121633 - DNA, 1379 bp, Cannabis sativa
  modified_base (118)..(122): a, c, t, g, unknown or other
taaaaaaatatagctaatcaattacaatgacgtctaaaaaatactaattactacagctgctaataatagaactgttttactatgggtgcctttagtaacacttttttaatcagttttnnnnntttaaaattagaaaagtaaaaatattttcttataccatgtataaaactgtttttaatttttaattttttagttaagaatctaaatttttaaaaacaaaaaaaaatatttttaattttttttttaaaaaaattaatcaatattttggactccaaccccaacttagaccttggagcccagatttagacctgccccggtcccgacctcaaacccgaattcaataaaatttacacaatgcactttggtttttttttttaaattgaaaaataaaaattattatagaacataaataaaaataaattttatatttatgtttgtgattaaaaatttaaaaataaaaaaattaacattaatcattcttattactattaaagaaaatgtaccaatgagtcaatgtcagaagacaacgtgttatagatcacatcacactgtatagacaatattataaaaaggaaagttgtaacaaacacttccgaccaccaaagatctgagttcagacacgagcccaaaattcaaagattcgagtaagtattagccatggctacggaaacatctgtttcagacaaccaaaacccagaaatcaacagcccaaataagcagatcttcatcttatccggtcagagcaacatggccggccgaggcggagtaaataaaaatcacaagtgggacggagtcgtaccgccggagtgccgacccaaccatgggatcctccgactgagcgctaagctccactgggaaaccgctcatgagcctacccacaaagacatcgacaccaaaaagacctgcggagttgggccgggaatggctttcgccaacgccgtgaaagcccatctggcccagttcggcccagtgggcctggtgcccagcgctgtgggtggaacggccattaaggagtgggcgcgtggggaacacctctacgaagatatgataaagagggcgaaagagagcgtgaagagagggggtgagattcgagctttgctttggtaccaaggagagagtgacacgtcatcggaggatcaagttgcggtgtatcaggagaaaatggagaagcttattcagaatgttcgacaagatctttctcttccttcacttccaatcattcaggtcataccaaccaaatttgttttaaatcctacgtataagtcattacatttttcatttttaaaaaaattcaatttaaatatacttagtacataaatgacttcatatttaactattaaataataaaaatataacttacttattattactattaaaaa

SEQ ID NO: 121634 - DNA, 778 bp, Cannabis sativa
  modified_base (36)..(48): a, c, t, g, unknown or other
tttctttattgatatttaaaagataaagattacatnnnnnnnnnnnnntatttagggcataaaatccaatagggtcttcccgaataggaatgaaatagctggagttgactatccaggactcccgtccaagagagaacaactagccatccagaactcctttcggaggaagactagctttcttgaagactccttcgaggtgggcatgatagacatccgagaatgccctttaagatgacatctattattccacaagacttcttccagatggtcaagatagactttcgagaacgctttttcggaagacatctaactctccataacaagaacaactattgaagatatttttatttagaggaattataccacataaactatatttttcataatgtgttatgccaatttgtaatatcatgctgtagtaaacctatatttttttgagtcgagtcatactcattcgaagcaaaggtctcaaatttaaattcttccccataaagtaaagatataaatttgaatccctttcttaatacgtaaaaaagaaaaagaaatggtttgattaaattttaatgtaggttgatcgtggttagattttacaaaattaaattattattattattattatactataaaattttcagagagggataaacgtcaatcgaagataagcattttgtccattatattaagagaaatttgaaattatatgcatattagggattaaaattggtatcctaatctaaaactatacataatttgtaaaatgggataacttttacttaaa

SEQ ID NO: 121635 - DNA, 819 bp, Cannabis sativa
atttagtgtaattaagtttttatgccatatatatcaaaacttatctttattttcccatatttttgtaaatagccctatagttatcttttagaggaaattacactctatactctttttatattgtcttctttcatttttaccctcttttttaaagtctatcatttttaccttttttttttaaacattataccaattttgctcatttcacttcaagatactctccatgtgactctcttatatcaaggtattttggtacaatacatataaaaagaggtatatttcaattaaatataaaattagaggtaaatttaatcaattgattaataaaagtgatatttttcaactttcccctgtcttttgtctgtgttgtacttaaggaagtttttatttttacggtttttaaagtacatttttttaaaaaatataattttctccaaaaaaaaaattattaacttgctcgtaaaataattttttgaaaaaaaatatacaaaaacctataaaatttatattttcatctgtatttaaagttgagtgtaagtattattgaacttatttataaaattgtcagtttttttttcaattatgtataaatatattatatataatttttaaggtttgagattggatgggccttaaccacaaaactaaactgtcttaattcagggcatagtacttttttttggtaagtgacctgaagagtacacataaaatacttgattaattgaattttttaaaggctaaatacaaataaatttgagattatttcacaaagacacaaaaataataaaaaaaatacaaaaatacagtttcacagaattt

SEQ ID NO: 121636 - DNA, 1028 bp, Cannabis sativa
tgaatagtgatgattgatgagagaaaaaggagtaagtaggagtaaggagtaagtaggagtaacttgcttttattttaagtattataatatcaacaattattagatttttttttgatgattttatatatatttatctaattattagattgttgataactcttattatttattttagaataaataagatttgttccctaaattatgatattttgtagtattttgtatgaacaacattttattgttgcaaaatattttcaattatttataaaaattattataaatatatccgcctttaattatatttttttattaatttatttaaataatttattaatgtagcactaatatattgttaattaatataatttaagagttaagataaaaataaatatctatgaattaatatatatatatatatatatatatatttatagattcttagaattgatatttgtatgttaatgagaataatcttgattttggatagcttacgcaactatatatgtgacttatgactagtgttgtaagtttgtgcgtaccgtccgatccatatttctctgtgatttttaaaaaaataggtgtatatcgtgccgtgtcataaaaaaaaataggtttatatcgtgccgtgtcataaaaaaatatggatcgtgtcgtgtcgtgtgtgctaatatttttaaagggtaggcccgacacagcccgatatttcatgtcatactttactcatgtcgacccatattttttaaacaaaccaatccattttcatatccaaacttaaattcgtattttacttttttatattttttttacttactaaaagatgcatatatattttgtaaataatcctataagaaaatattaatattattagaacttaaatatttacttataaatatctaaatttttatatctcaccttataaataattaatatataaccttaattactcatgtgttaataattttaattatataattataatatttagtattatatttaaattttactattattttaacttatttataatt

SEQ ID NO: 121637 - DNA, 739 bp, Cannabis sativa
tgtaaaattcatgcaaacatcaatgacttcaaatttcttatattgataactaatcagattataaagagttttatttagggcataaaacccaacaatatcaacctccatgattctcggggttgaattaccatttttctaggatctcatagtcggcgaggagccatcgtaaaacctatcaactagctatcccatactatcacgaagccaccatgctccaatttgccagttttgtctacgatcaggagctttcataaacagcccatacggcttgataagggattcaagtggttcatcaaataacctatgacaaaatttctctgagggaccgataactccacatatgaagcaaaggtaggcactctttcatacttaaaattagcctggtaccactcttccttgttcttgaagatcttcattcacctctttaacggtctatcaatgttgatcgaaacccaaactcggaagtaatctctccaaatcccaacaaagttttttggacatgaggacacacacttgcctatgaaagccccaacaaccctcaacacatgattggacttaaaccctgtttgtaaatcataaaaccgaacccagtggtccatagtattctaagcacatgatctcagattgtcaccttctttaacccttttgatgatcagaggctgttagggttataaaacacttaaagaaatatataaatcacagatctaaacatattcctaaagtgctttaatatagaaaa

SEQ ID NO: 121638 - DNA, 1758 bp, Cannabis sativa
  modified_base (51)..(60): a, c, t, g, unknown or other
  modified_base (961)..(966): a, c, t, g, unknown or other
ttgggtacaatacatataaaaagatgtatatttcaattaaatataaaattnnnnnnnnnnttgattaattgattaataaaaatagtatttttcaacgtactccaaaataaattacatttttacagaactacatacagcgtttttttttcacttttttttttattttctttttacaaaaatatggtttgttattttttagttgctcttaaaaatgttagtttttacgttacaaaattatagaataatgttgtaacaacgtgaaaataacgttatattctctcttaaaaaaataacattacgtaaaaatgtaaagaaaaaaaagaccagtaaaaaaataaaaaatgtgcaatattaagtgtttggtataaatttccctaaaatattacttattagaaaaataatgataaagtgagtgaaaaaaataaaataatttttttttattatatatgacaaaaaattaccactgaatgcatactaccttatataactttaataataaaattaaccaaactattttgtgaacaaacctaagtccatctccaaaagaaataaattagtaatgcaaaattaaaatataactcacttcctaaaaaatgtgatgcaaatttattagtagaaattacactatttatgggattttttttagtctttactttttttatggcatttttaaataaagcattttatatatgggaattatattttgttttcccttttataggttttatgaaagctatatttttgttatctttggcccaattcccatattttatttttttttaaaaaaaataaataaataagctacaactattgtagctaactttttgcatggagtagcttagtactcattgcttaccgccgttgcttatgcttcaatcaatcacacattttgtcaatctctcttcattttcgtttcattttctctcagcttagggtttcattctcttcttcttcttcttcnnnnnnttcttcttcttcttcttcttcggtgtactgggttgccattaacgatcgaagcaagcttcgactcctgctgccgtgtgtgtagtttcttcgtttgagattatttttcgagctagattgcttggttaattgagatatttattcattttcttcgtagtttttgttgtaatttctttagtttagtgattatagttttttaatttgtttatttttttaaaaaaaaaatcgtgatgtttttgccatggtcggttgggattttaggttgtttttggtgttttggtgtgagttctttctaatttttaaaaaatttgtccccatttggtggttgatcattgttttatttagtttatttttgttttaagtttgtgtttgtgttgattttttttggttttgcagttaatgattgttaaatcttcatgatttttctagggtttttttttgtacttttttgtttgtgttcaatcggtttgtaagtatttgtgtttggtttagtttgttctttgtttttgtcttcatgaattgcatacatttaagattttataaataatttttaaatgaaaccgttttttttttgtataatagattttcttaatggtataatagtatttgttctctttaattttttatgatttttgtattttgattattcgcttttttaaatgttttttttatttgtttatgttcttagtgggtgtggtaactgtttttgccacgttgtggcagttttctttttgttgtgtgtttgtgatgtgggttggcagttacattttgattggttatatatgtttattgtta

SEQ ID NO: 121639 - DNA, 903 bp, Cannabis sativa
gtccgagacagtttctcggtcaaaattgtcacacagcttttgaatatcccactgcccattatttaaaagaagttcagccacatagttcaaattgggagaggttcccccagatggtttcggatagaagcctttccgatgcggaatccagggatctccccagatcttcgtattctgatcagtagcaaccaacttacaagctcattttctcaaaatggtatttgccttcaccacacttttccaaaaccaagaacctgaatctttgtacctgcaaactttacagcacagagattaactgccattgagaatattccatccccatttagccagaaaggcctgattcatctccttggttttccggaacccaagcccacccagggatttagggagacaaagtttgtcccaagcctttagatgaatcccacgattgtgtgtattatttaatttctaataattctcattattttcttatgattgtgtgtaattattgttgaaaaattatgtaaaagtaattaaaactataaaatacacatatattttagtaattagctcattaactgtaataaaaaaaaaaactaaaatacaaagcacgaatttaatcccgtataaaaaagtggattgatctatttaagaaaaacgtgtcaaccttaattaagcacgaactattaggtttacgggccgtatcaggctaccttgtaaaattgtcggcacatcacataatacaacacgatctatatttttttataatttggcacgaaacaactcatatttaaaaaaagccacaaatatgtatgtgtgagacgtgtattctttatacgccatacaatatacttatcttcttctttcaagatccaaaaatattatgtgtgagaggtgtattcattaatatacaccatacaatactta

SEQ ID NO: 121640 - DNA, 1961 bp, Cannabis sativa
  modified_base (55)..(57): a, c, t, g, unknown or other
caaaaactcataacttgaaacttaagaaactaaggaggaagttgctagaggcttnnncttgacttggatttacttagagctgctggaaagaactcaagatttgttgaagaaaaacagaatcctagctggttctaggagggtcgaaagagagagagagtttgagagagaaaatgtatttttgtcaaattttaatttttcttgtaaaatgaataaataacacatgttttattaaaaagtaatctcagccaaataaactctataaaattacattattaaacttaattaaacccacataaagacgaatcacaaataggcaaaatgaccattttgcccttcccacacgaaaatcataaaaggtcacttaggggtatttttgtcaactctaaaatcttgactattcccaacattccaatgtctaactataatgtcccactaaactagaaatacgaagatgtgattctaatagccaaacaccgcgttccaatgttgtcggacacaaaacatgtaaaattatgaaattttatatatgacatataaaatgcattctgaattcaaataaatcatcgtaaattaataattcacaactaacatgcaagtttcgtaattaaaccctaattatcaactaatttccaaattaaagttaagcgatctttacacccacaaagttaatcaaagtgactctgccagccttagaaagcatcttggccttccaaccttatagttttgatatgaggttgttcagaacaaagttaatgtttgcatctttctatcgtgttttgaacatcttgaggctaaataattgatcttgccctcaggaccctttacccctaaaatctcttggatacctctccttataccttgattggtattgttactaaaataaatattagttttgagcttattaacctattggcctaaccataagtaaaacttgtcagttcaatccaaaagctctttggccttagcaatagtagctctccccactagaataaggtcatcaacaaaaagcatatggaaaaattttggggcccctactcaacttgatcccagagatcagaccctcatttatagcattatcgagcaatctaaacaccatattgattgcccaaataaataagtagggagaaaaggggtcaccctgccttataccgcatttaggctcaatagagttcactgggataccattcaggtagatagccaatgacgaagtataaatacactaggatacaagtctacgaaaataggatgagacactaaaagctttaagcaccttctccacaaactgccaactaagtttatcatagactttcactagatcaatcttaatagcaaagaaacactcgttttcttttttggccttaaatgagtgaatagtctcttggagaatgacattattatcttgaatatttttccaagaataaacacagcttgagtaggacaaatgattctcaggagaacatgcttgatcttattagcaataatcttagagatcgccttataaagcacattgcataacgaaatcgatctaaactgtcatactctttgaggattagggattttaggaataaggacaacatttgaagcgttaatacccctattcatcttaccggactcgaagaaatcacacacagattcataaaaatatctccccaacactcgcacagtaatgcttaaagaaaatgtttgacaagccatacgggccaggagccttaagactactcatagtgtttaaagtctgcttaacttgttagcgtgaagaagaaatattgataacttgttgttaacacttatggattttagtttcattcaaatagaagagaagatatagttattctagctctaaatttttggtcaatttctaaacgacaatgtatgaaactaatttctatacttttacttatatacattgtgtaatgaccgttttagtaaattggattagtaaaggcaattagcactaaatt

SEQ ID NO: 121641 - DNA, 1434 bp, Cannabis sativa
  modified_base (62)..(69): a, c, t, g, unknown or other
  modified_base (1344)..(1344): a, c, t, g, unknown or other
  modified_base (1392)..(1407): a, c, t, g, unknown or other
aaatctttaagagaaaaaaccctaatttgtatcagaataatctgaataagattgactcgtgnnnnnnnnagaattttaactgcaaaactacgtaaaaccttggtgttattcttgctttattatttttttcttagatttcaactattttttgtgctgatcctatcacaaaataggcttattatcgttaacgaaaaattgcattaacatgtatacacatatatatatatacagttagatatatatatgaaatagggggtcggcctttggtggtatccgttggttgtggtcgtgtgccacggaggctggaggaggagggcgtgtcacaagtgccagacctgcagttggaggggagcaacggagctttgctccagtttggagcataacgggtcatgagacccaattagagctattgagtctcatggaccatcatgatccatatccatcgttcattgaccatcactagaccctcagggggtccagtcgacgcccaccgtgtcgtcacaggaccaatcaatccatttagtggttttcgacaaaaacttgaaccaattgggttcttcctccttcatctacgtgcatggcatttgcatgtttacatgcacgtgatcttcacgtgtttttcctcacggcttgcagtcgcaactctttgggcttcatggctcatcattcgaggttcaaaatttcgtcatctcgatgaggcgatggtttactccttaaacccgagctcactcatcaatggaggaattatgaatttttatgttacattattcaacaaaatttttaaataaatttcaaataaaattacatcaaaacctatacaacaaatcattgtgcacaatatttctagtaaaactttgaaatttctaacaaaattttatcatataattaacgattcacgttcatgcaaaaaaaataattccatccattcataatatatcacctccagatcagtttattgcatctaatttcaaaataacaaataggtacaagatgttaaatcaagaacaaagaaggttccatgttagcaagcaagtatggagcaggttaaatgttccaaagcatagttttcttcactggatagcagtgcagactcgactgaaaacaagggagagacttcaaaaaatgcagattgtggcttatgcttcctgcatactgtgtaataatgcagtagaaaacactctgcacctgttctttgactgcaggtacactcgaagctgcttacaagaattaaaaatatggctgcactggaggatcaaagttgaatccctgccgattattttgagatggattgatcgagcaaaactgagcaaatttaaggcaagttgttgttgggttttgtgcccnaaataaaactcatttcaatatactgagatttacttattaataaagatnnnnnnnnnnnnnnnntgttgcatggttcacgtgatttatttc

SEQ ID NO: 121642 - DNA, 1383 bp, Cannabis sativa
tgacttctaattttctattgataacaaatcagattatattaaaatagattttatttagggcataaaatcccaacagtctaagcatgtgtcgttgcctattttgtgtccaatgttgcaatatgaggatgaaacgtttctgcatttgctggtttcttgttcgttctcttgtgcatgttgaatgtcatttgttgttagcatcagcgaagtggttgggactgatttttgggactagtttggtcaagttacttagcagcaagtggctggtatgggtgaagaacttgctattgtagcatgggcaatttagaaggctcgtaatgatgtggtgtggcgggataagacgactacagtagcaaaagttgttctcttggcaagagtagctcttaatcgatggcaacatgctgaataatatagaatggggtcgttatcttacacgatgaagtgggataatagatttgagcactggagtaaacaggatgtgaataagattaaaaggttaatgtcgacagattacttttcgagttagcttggaagtttggtgtaggagtagtagcttgtgatagttctggcattaatttggaagtcttttcaatgagtttttatgggcgagctaaagcttcttttgtggaggtcgttaagaggaaagaggccttatattggatacaaaggaaagggtagcttgatgtccagtttaagataaatttcttactagttgttcaagtagtgcatagtgccattcacatgtcatctttgtttgccctaacagagctaagtacaactaagtgggagagtccttcgtgcaaagaacttatagagtaattagtaagaatcagtaccacatctttaactcgtttccaatatggcatttccaacctagctatgagattcttctttctcgattgattcaacgaaatcttccatgtagttcttctcgaatattttgttgtcgattttcatattttctttcttttctcttaaagaatttcaaggatcgaaatttttcttcttaaaaattgttggttatcctttgttaatttatggatacaaactgtttttgtatatggttctttttttaggttaactaatactattaattgttgtttaatattgagtttgggtataaagaaataattctattgattttactttagtgtttaaaggaaattttataaattgttgcttcaacttagtataaataattattacaacatttcttttaataattcctcaccaaaagctaattctttctagtttagaaatgatgtgacaataattatgggtttcatattaaaattaattggtaataaataaagtaatctatattcttatatatggctcaatatttttacatttaattcatgttgagacaatattctctaatatctc

SEQ ID NO: 121643 - DNA, 1520 bp, Cannabis sativa
gtgaaccatgcaacataaaatacgattctgatcttttattaataagtaaatatgataatattgaaataggttttatttagggcacaaaacccaacatgttgcaccgtgtccgtgaaggttgcagggaagattcgacatctgaggtcatccctgatttcttaaaggtccatttagattttgaagttttcaacatgagttagggggtcttcgttacccgtgtactgcaagtaggtattttgaattttgttggaaaggagaggtcattgatcgtttgtgagaaagcagagcccctcctcctttctagttctaagtcaatgagttttaatgcaataagatctttgaccaatcaggttaactcatccaaccgaggctggatcaccatatttgtggctacttggggttagacaatattaacgcatgtattagtttggtttccttgaaccagctaaagtggatttactatctttaatccagagttgtccctattcttgttgagggcattccgaaggtctccaccccttggtggcttacaagttcaaagactgacccagatcttggccttcctcctacattttgactgtaagcccttccattgatttggttggtcgttggcctgactttcaactttgtcattgccatgactgtcagggtagttagaacgataatcactattgacctcaaggtcttcccttcgccccctaggcctactgtttcttgggtgatcattgccctctcgtggttggttgcggggctgccactccctgtgttgggctatccttccactgtttttatcacagtcaccattgttgtttctagagtttcccatgccgctctgtctgagacgaacattatgggagtcatctcgtcccatataatgactgagtaggatttattcattcgtagggagcggtcaattattgttgttgggaaccctattggaagggtgactcctagccctctcttagttctttgggcgctctttaggttcgtagagcaccctcttccattggcttctcggggtatggacttcctttggataggttcggtggtcttaaggtttttgttggttgtgggtatcagtacccaacccttgagtgctttagctgaaatagcttcaaattaagtcggcaacttcttgagtgcgacaatcttggtcgtcttggtgcctcctcatttctcgagcaagatcatccaaccaaaattggaactctctcctttggttagcgagacttttagttagggccgctcgagtttgagtttgctcttggtgtattagtttggaactgaccttgcattcgacctattgcgtctcccagttgatccatctctgggtcaattccttggatatccacatggggttcattccatggtctaaagatgccaaggccccgaccagtttgagtttgggtcgtgccgtcattaggtgggacggagtttctagtattgtaataccctaggagtaagagaatggattagtaaaaccctaactagttaattgtgtattattgtaaaattatatt

SEQ ID NO: 121644 - DNA, 2181 bp, Cannabis sativa
atgctttcatttgtgagaacactacttttgttcttacataaagaagagtaccctatttatataaatggaaaaaaaattaaaaaaaaaaatccacaaagttgataaaacacctcttgtattgagatatagttttcctgaagcaaaaagaaatataaatatatacatactaacagattgttactactatctgttcagctttgactataccagtcaattagctagttttgtacaaaaggacaagagaaaaagaaacatttctaccttgactaagaggaacaaaaggcaagaatatggtttttctgactcttcctaaggtaaggtaatggactaatcacatatatatacacaaatattctaggcaagcatgttgtgttagtttaatggcatctaactataccgataactacaagcaagcaagaacaacgagcaacaaaagatcagaaattgcagagaacaagaatcctcgtgactgtcccgatgaacaagtagatcaaaatggtgttcaaacctgttggacttctacactcacatatcttagttaaagtctgtcatcaaaccgtcgaacaaatcaatgtaatcataactttcagatgaggaactaacctcaaaattgaaagcatcagtcttattaccaactgttagcttgttaagagtagtttgagagcttatgtcttctcttgtcttgtattcacattcaagttgaacatatcttgatagagatatgttctcaacatcatcatcatttgtacatgtaccatcaagcttcagcttgctctcacttacattaggggaacaagatctttttcgtttagacagtatgggcttaatatcccaatctgccaaatctataaggcctatatcatgcaaatttctatatcccattccataaccttcatcaaaatcagatttcttgtcacctgcattgaacatggagttaggaatcttacttgtgcactacatctgtcttcatatattatacatatctacatacattcttgttcagttatattctatggaatgcctaacaaaacattttctttgacttaatgtcaatcccaacttaggcagtgcttacttcatctaacaataataactcaatttttgatacacaacgcatataagccaaatataatgaaagaacaatattttatgttatagaatgattaatggcagcattgaaacctgaagcacataccatggatcctctcactaaaagttgtttttctgaatattgttatactctccctaattctacctcccaaagtaaaacataagctcgtatcatagagaaagagtaatgaaaacttcaaaaacgaagaaatattaagaaaatagtgtgacgtcctttgaaaagtttgacaacattaaagctttaccatgcctgcaaaagtcatttgaaagacacatatcgcaatattacagactaatccaggcaaaaagaatcagtctgctatatttcttgaacataataaataaagtaatacaaatacccaatgactatcacctaatcaaggcacacaaagtaactcacataaacacatgcatgataagtaaatcgcaagaagcaatgcaaacaaagaccttacttggaaaatcttggtttattagacaagttggagatgaaggaaaatgatcagatcccgaaacaacagcaaatccatcatttttgcatgtatccttctccccgtttgctttattagactcagtggaacctatggccgttacctttgaaaccagagattccatttttaaagcagtttctgtttcagcttctaacaagattgcccttttctcaaattcctcaaaaagtttctcccgaacttcattatcatcctcagctctatttttcccagactctaaaaccttgatcttctccttgagctgagcaatctcaaccactttttctctctcaatcttctttaaatccatccacatttcttcagttattttagttttctcctcagctaatttcattccctcttcagcttttataaccttttcctctgtctctcttactttttcaccagcttcttttactttctcatcagccatcttcaaatctatccgcaatcgttctaaaatttcttctgttttcttagaattctccctagccaacttcgtttccacctcagctttcataactctttcctcagcctctctcactgtttcaccagctgctct

SEQ ID NO: 121645 - DNA, 1579 bp, Cannabis sativa
tccacccacaatctgtatccttacgtgtaatgtactaaacagcagtaccggacttcctaacgaagtagtcaaaccttttcttcattgcatacaagccaacaccatatttaaatgctctttgtctctaaaaaaactttcctacatgtaactccctgcctggtgtgccatccatagatatataataactatgatcctagatgtcttctcttgtaaatgttttctccttgaatttaccgtaacttatcgaagaaagaaaatagatcgcttaatccagtttcgttggtccctctagcatcactaggaccactagcatcattggtctctctagcttcactggttcttctagcatcactaggacctctaccataagtggttcctctgacattacttgtttcgcctggacaactaatactaataccaggtgtttaacaattttctctacggggcattcttttttgtttccctggcctgggtggtatttgatacgatcgtggagttaaattcaaagctacagtaagaaggacctctgcagcttggtcgtctcttacgtcatcattgccctcaacatagcattcagggtctggaccatcaaaataaacatcaatgaatggcatttgtgctacaatgtcagtacttggcatcatagtgtttaattcaggtaatacatcggcaaccaacacctctggatttgtttctgggataaaactcccaacctcgctacgagtgtccttaatagtacttggtgtgggactaggattgatacaaatattcttctttaacaaagtcacaaacaatgaagtaaattcatctgggttcttcgcaagtgtagacaaaaagaaccttgcatgcatgtcatttctaataactttagggcgatacattgagtctttcatgtacttgtaatttacttccaatttcaagtcatactgcactttttcaacatcgatttcttcgtacaaaagatcaaccaaacctgagtagcttacattcgtatcaatctcaaacgtcaaattttttgcccgattataaatccaatctcgaccctaaagctcaaacaccattatacataacaaacgcattaacagttgaagtcgtacatacatttattaaaaaaaatacaattacaaattcagaaaaaaaaaaatctaacagaaaagtcttaaaagtgataaatccataaaccatcgggcccaatcgtacccaatcgggcataacatcggactcatcagtccctgttaagataaaagaggacaatcgggtaggcattgggtcccccatcggaccctatcgggctgccatcgggctccctatcgggcccaatcgggccattctatttggtataggggtgtgcataaatcatccaatccaatgaaaaccgaccgatccaattacaaccgaccgccaaacattggatatccaattgtgatcggatcgaattggatgttattttttaatattcaattggattggattggatattggaagaggtgtccaaaaatctaatacatctaacatccaatcgaactaattagtattttcatttagtttgaattagtaattaaatgttatgttgttatac

SEQ ID NO: 121646 - DNA, 1206 bp, Cannabis sativa
caaaacataaaatcctttcacctaatatgatcagttcttcccatagacaaaatagacctctcccccttcaccgtcccctccttctaagcacatcttctctctctcttttgtacaagaactgaattgtcgcttttgccttatgaatcaaatttcatgttctttctacaagtaagttcttgctttttcgttggatgaagaaaaaatacaaggtagctattatgggttctctctgcttctcaatctctttgggttctttaatgaaatcctatcaactcctatttgggtttctctatatctttctctcatgaataccttgtgccattatctaattcttcctttcattgattttactttcgctgactaaaccttcttctttcaaatttattttccattttgtttatatcgttattgcactatgaatattaaaatcataatatatgtatttatatatatacatgatttcattctttaattagtctagatattgtcttgaatacaatgatgatgatgaggatatgagtattgttttatttatctatatatatttatattactactttttttttttttgccctttttcttaatgtgaaaacaatatccttattttgtttatggtttgcaatttgtgactaattaaaaataacttctttagctattataacaagaacattttattatgttttcctgtgtagaatggttagataaagggaaagcttctgtcttttaaagatagtttcaaaaagttgaacaagttgttgtaagacctctaaagacctttaatagtttgttcaagttcatttcaaaaatcattgggcatcaggtcgttatgttgataatcaattgctcgtatcttgatatatattttacttggttaggcaatattgagagaagatttttagatgtacctcttggtgtctctttggttgaagcaaacatgtaaggcattgacatagttttgtctgatgtgcttaattattaaatgaatctttttacaatgtgtaggaatacttgtctatttaccaaataagacaactaaagtcttgttgttggttatacaaaaatacatatacataacaatgaaaatgttggaataattgtccaaatatcaaatgacacctttacccttactgaacataaccaacttaactaactattagttaattcagttagtgttcgggtcaagtgaaccactgatgcaacatcagt

SEQ ID NO: 121647 - DNA, 1212 bp, Cannabis sativa
ctcatttctaaaaataattttttaaaacaaaaaatagaaaacaataccaaacatgctcttagtaacttttttttcttttccattaaagtatatctcatttattttgtatgtggatcttttttttttcgaaaacaatttgatagatatggtggccaaattcatggaatattgttttgtttgtcgtggtcattatcattttgggtagagttcttatgaattcagttctagccggagctggtggcggcgaatggaacagtgaatccacgcacttccggtgtgaatttaggagagatataacttgagtaattggtgtaccgtactagatatttttggtaattatattcatataaatactcatttaataaataaattttcatagttataatatcattttccacatttgaagcatgttttattgtttttaagcattgatagtaggaatttttagttttattataatttaattcaatttttattgttgataaagtcaaatttattattatgattatttatatatattgtattaataatattgtgctaaagtcaaataatttaattatttttggagatctattttagggtatctttattttcattttatatttactagctttttatatacatatcttgtaagattggtcctattatttatatttatatagtttttaatttatactattattaggcctactttaaaagaaatattattttgttatgcaattttttaaatctaatttaattccgttttgttcttattttggtatataaatattttattgattattttcctttttagttatttattaattataaaaatataggtattaatgtaaatttttgctataatttttttagcatttattttaattttataattaattagccttaattgctattttttctacttatcttacaccatttttgtttaatttatgtcttatattaaatttcatgaagtgttctactttttggttagtttgtactatattttttcgctagtttgtgccattttgtgtggcttttgtaacattttatttggctaatttgaagtatgttgttgactcgtttgttcatgaacacaaccttaaagagagctattatcgattttcacatataagttttaaatcttacttttaattatattttaataattttggaagaatatttctattattttaggggttttttcatttttatacttcaaaacagttt

SEQ ID NO: 121648 - DNA, 1767 bp, Cannabis sativa
ctaattattttcttttaggttcagttatcagctgaagtataaaatctctacctattttttgtctcggtcagctattttggtaagacgcgttgactgacgaaaattgggcattttgtagtagtgtatatatattgttcacatatttttcttgttaatggatctaaaatgattgtaagcgagcaagatgaacacaagttaatatcgatcacaaataaaccggtttatggaaaaggaatttaataaagatgaactcgaggattttatagatgttcacccccttttggcgataataaactaatccacttgagttgttattggtctcaatgcttgaggaaagttctccagaattatcttctctaagaattcaatcctcaagtaagttttttaaaatgagaaagtgagagttcatgagaatgagttggattcctttacaattgatatcacatttatatagattttcatctaggactctgttaaggtttaaaatctcttaaccccaagacgtacattcccttaactatgatcgagttaggtttaaaatacaaaatgataacaaaatcatgtttcaaaataaatatttttttaaaaaaagataattgtgtaagatatctttatctgcacgtgctagcttattttcgtcactaagagcacatgcatgttgatgaagaatacacactgagatgagaaacatcttggcttgggccaagatgatgtagggtgtgcatctcggttagggtcgagatggtgccttgtgacgagctccaagatggtgacaatgttgtgatttaggctaggattgagatagtacctaggtgttgtgatctcggcttgagctgagatgatgagtttggaagtgatgccaagataatgcatttttaggttatggcgttggagatgaaggtgaggaggctaaggtgatggtgtggtgagggaggttaaaatgatgtgttggagttgtcatcttggcttgggccaaagttgcatgttgaggttgttatctcagtttgggttgagatgatgactttgtattgagatctaagcttgggccgagatgaagcctttgatatcgtgccaaggtgatgcataaggaaggatgtcgaggtgatgtgatgaactaacgagacttggtcgaggttctcaaaattatattgaggtgatatgatcttccccacatttaggagaaaaattaatgccatatcatccttcgattttcctagggataacacacacatatatatatatattaaataatgttacgtgcaatacacgtatacttagttatatctttaattttattttgattatgtgtatttttatttgtattttttttaaaaaaaaataaaaaagctatagagatattttttggtaactacaataggtaatgaagtcgcatgtcataaacactttctcataaagatatttttttaaatatgtctagtgaattttaaaaaaataacaatagaaatatattttgtttttagatttgtctagtgagtttaaatttaaattgtaatgttgtaaaaaagaacaatactttctgtttaatagccacattttgtataggaaatataaattttttagcaaaaagaagaaaataagattgtatgttcttttttattacaaactcttcaacgtttcagcgtttaaagattacacagattctaaaaatttttttaggtgagaaatttctgtgcttgaaaatacatattggaatattttttttttaaaaaaaaaaattaatgtcgatgtttgttatagttacaacat

SEQ ID NO: 121649 - DNA, 1119 bp, Cannabis sativa
agtcgacagactcagtaagaaaagcataatcataacataaatataaacaagattacaattaggggcccatacccccaaccataactcttccccgcacccttggcggtactgcgtcaagaacattcaaacgacaatactatcgaccataatatcagcctatacaaggtacgctagtcatactctaatcgtaatgatgtgatagtgtcaaatagtacttgagccaaacatacatttatcggtatccaataccactctacgtatatttataccgctatcaatgtaatctaataggcttaataagcatgcacgctaaacatgtaaacacatatgcataatattatactaatcttacctcgtttctgaattcaagtgtgtcggtcaacctgagtggaacaactgctcgacgatttataggcccctaaattacaatattcgtaaactgatgagtgacacgctaaatcactttttggggacataaaaccaaaattaaaagttttacatcgatggataacatggtaatatcctaaatatcgtaaaaagggaaaaatctagggtgcactaaaatgccccaaccggtagactggttccccaactggaagatcagttccatgggatctgcctagggactaaccagaattctggttcctataggtcccactaaaccgattgaccggttcagtgcagaaagccccaaaaacaccacaattcaaccccaaatgaatccaaaccttccagaccacctatttataccacaataagtataatctatgcaataaaaccaaacaataccctttgtagaaaaattcaccatgagagagcaaagtttgagctctaaagttcaaactttgctcaaacacaacaacaacactcaaatccaacttaaatcagcttaaataaccttaaaacaacttctgaaaactttatccatacacaatcaaacacatagcacctacaccatagaaaatcatacaaagaacctaacttagaacttaagaaatcaaagagatgggagcttgatggatacgttggattgaatctctaaaaatctagttagaacacctattgaatcaagctgaggaaatccctaacccctactggtttgagagagagagagagaga

SEQ ID NO: 121650 - DNA, 2391 bp, Cannabis sativa
  modified_base (2303)..(2311): a, c, t, g, unknown or other
attcagtatacactgaataaatggttacatatttattattcttctttttttctttttatccttggatgaatctcttgatttatcctttctctttgtgtttgatacatttggatttttcacctctattgtcaaggtggtcgctgttagagtactagtgttaggtttatctcccaagccaatctttaacaacttgatttcattctgtgcttcttctttacacacaaaaatctatgctctttcattaaattcattgatattcctcataggacaaccttccaaatcatcccataattcaccccatgtagtagataaatcagttgtaattccaccccaaagagctgttagtgaatgtcattcaagtttctgacttttgtagcacctgtattgaagcgactcattgcttgatactagtcaaggatgacgcctacggtcaatgatctcttatagcttgaaactgctttttgaaatccatcgacaagtgttcctaggatgttatggaatggttggtgaatttatcaaacccactactcacaactcctgtcaaggaagttggaaacaatatgcaacacaagttgttggaaacatttcttcctggcattatagtgttcaaattgtttaaatgggcaactcgatcagtggttccatcatattgcgagtcatgtggattcttaaatcgctgaggaaattgaaaatttaagatgtcagggtggaatcactcagtttcttcgtctgagtcatatcctggcagtttggcatatctccatcttgatatttcctaaatttttcctcatattgtattactcatagttgaatgggacccataggttgttaattcgtgttttgattaagttcgttatgaaaattaggtgcatttcgattgaagtactcgtaatggtttggttgccttcaatttaacctctcatggaggtcaggttcaagatgcctttgcttataattactcacagacctagtccctaattatctttcaaattggtaactgcgcaagttacttatacttacttggtcagtaaaataatgtcgagatttgctcccatctcacatttgtctatttgttctagtgggcctactatgctcgtaggatctggattctcttatacttgaacttgcttcgtgcatctcatctcgcagtggtcttcttcttctttgaaagagattaaacacacgtcccctactcaagtaagtgtgcatattttctttgtctatgctagaaggcctttgtggatacctagggggacgaccaccagacctatattcacttcgagaatttcttccatcattactagagattacttggtttcctagatgcagttacctcgcctctgcattcacgcgacatgattctggtatgtcagtcagttcattccctttattcgcaaatccatggaaagttccttaaacatcatgttgatgttctttatttcttgtattacttgggttgggttgattttctctatccattgggacatccctcgcactgccatgtggttcttctagagcatttatggggttccctttgttattttcctggttgtgaagcctcgagttcttcctcctagtcttcttacagttggatcaagttgaatttgaggaactattccctgtgcagccctggctatcatggattgtcactccaattcaatattttgtcgttctgattcagccaggcgttgtcgaaattgcctattttctaattctaccagtgggacatatctggtatgatcataggcatcttcttcccttctttatagaatttgatcaccagcagtattgaaattaccatcattcttcctcaaacgtggtttttcagatgtgttggttctctgagatcccctaggatctttaccaggtcgatgggtagtttcctcttgatgattaccttcgtgtgaaatgttatcagccattgatatggatttgtaatagtgtatataaggaggggttttctaagtttttatcaccaagactctcattgaaagcatcaaactattaacgcaaatttttgttaaccaaatatatagacttttacgtaataaatttactatagaatttaataatgaacactagatattttacgtggttttgtagtttaagcctacatactcaacgatttcgtagtattagagatatttatttgaatatagagtatagttctcaatagtgataaataatagaattctctctctactttgccatccttttttcatggattctacctctatttatagatgtatagattgggagttatttttaggctaaattaaatttttgccccctgaactttgacnnnnnnnnnatcatgccccctaaacttttaaggttattgaaaatgccccctgaactattaagattgttggatttaaggacttttttcta

SEQ ID NO: 121651 - DNA, 2062 bp, Cannabis sativa
  modified_base (96)..(102): a, c, t, g, unknown or other
  modified_base (129)..(135): a, c, t, g, unknown or other
  modified_base (1987)..(1989): a, c, t, g, unknown or other
atgacataaaaatgcatctctcaattcaataataacagtataataattatttaaatagctataaataattctcataattaatcatgattaactgcnnnnnnnaattaatcatgattaactgctaatttnnnnnnnaaactaagcggtctttacacaccacatgcactgtttccagacacagtgcatgcaccctatatagtgtggggtgtccctattagttttgtctttttgagttaattaattaattaattaatccaattagataatatttaaatttgaaaagtaattgacatagtctcaagtggttgagacattcccccaatcagttataagatataaatatcaataaccaaattcgattaaattatttatttaaataattaaatatgatttaattaataaatttaaatttaaataactaatcaaataaaatctttattgaatttatttaatataccgtataacaaagttctagataacagtttttggaataagttttttacgttacttttctgaaagcttaaaaaggtttcatcagattttttttttctctctattataaaagaaattgttattgctcatgtgttgagattaaaacaaaaacttcatatatactttgtcatagtagtgcacactactccttgtgtgtggtggatcaatctgatagactacggtgtgactttccaatcaatcaaaaggatacaacatattaaaataatcaaggatacccaatagacatcaaaagttaaatattcttttcatctatttactttctatttaatttatacacatatgatgatcttgggcatatgttataataataatcataaacaattcttgtaatgcatacgtgattcagtaccataaaaccaataattgtgagaagtcaaattcaaactttgatatgtcaccctttgaacaaggtggaataagtttcgagtctactcgatttcacaaaaaagcgacatctccgagaactggtgaacaacttcatcaaaactaaaaaattgacaaagtgatgtcaacatatcacttaggcatcaaaaatacaagtctaggatgtttttaactcacccagggtccaggttgatatcagaatgtcaacctgcgcgttgggtcttgaacaaccttcaataaaacgtccataactccctcaatattgatctgattgatgctattcaacttgcgttttaaatctctttcaaagctcttttaagtcatgtctcacacccatatcgcaattctgaaaatttcaagtgcaaaattagtttccatgacaagagcaatttttttcgcagatcatccgaaaacgatccaacgaacaagattcaagttccgaaaattgatgatttttatcaagagtcaattgtagccattacatcgttttcaatggccgagatcaacccaaaataattttttttatataatttttgtattattttaataagaccacattccttataaagggagagttcgactagtttattttttacattcttctaagttctcataaggtcaaaacacctctctctactttctttctctataaattagaagttttgctttagtcaattttcttgtaattcttgtgagcaatacaaacttgaagtaaatgtatctccattaccgtcgcgacacgaagagtgaactattataaatctctcgtgtttctctatttacttaacttctatttcttctcgttaatctagtaagcgagtgttgagcgtcaatagtgcaattttgcttccacataaccttttgggctcctttacctctcggtatatttttttttttctctcccaaaaaaatatttgttttggaacttcagttaaacatctccaataacaatatgtagatattgtgctccgagtatagggagaagtgttggaatgtacggagcatttaaaggagaatcctttgtttagtgtatgtttgtttatgtaggagtatagtggattctacaaacttaggtgccgtttggtaacannnttattttttaattttttaattacaaaatgaaagtaaaatttttgtttttaaaattttgtttttcaaaaacaaa

SEQ ID NO: 121652 - DNA, 629 bp, Cannabis sativa
tgatgggctaccgaaaaataatatgcaccttattgatataggtagtaccaatcaatccatttaagccctcttcaacggtgtagtcccatatctatactgtctcaaaatcatctcacttgaccatccccaggcgatgtaggattgcacagcttacctggtatttcttcttacggattacggatctattgacaatcacattctattatctggacaatccctttcgaatactcattgttctaaattgagtgttcattgtttttcttttaaatatttattatttgtctactatttggtgttgtctaaattcctcccacaagataacttgatattataaaacacactaataacaatatatcatgttctatagtacttgatacttttaaggtaccccttaccatttttcttaatcttgcccttaccatttttcttaaggtatgccttatcctttttcttttcaatgaaattataattccttattaaaaaactaaaaagagaaaaaaaagttatgtgaaggtttctctttatgattaactaggggactaagccgcgcttcgcgcgggtttgaccccatttttttatacaatttatagcaacaatataagttcattatgattattataactatcaat

SEQ ID NO: 121653 - DNA, 633 bp, Cannabis sativa
attactaaagtaaaaatacaattaactaaggggttttttgataaatatatatatttttatattttatttttatttttatttttacaatctatatttttttttcacaatataactttaatttttcaaaaatatgattttaaatttccaacattagaaaatatatttttctcatcaaaagttaaaatattaaaaaaattactacaaaataatgaaaaaatcaatcacataattaacaactataaataaattataaaacaacaaaaaaaaaatatcaaacagtttattattttttttctgaagaacataattttataaataaaaaagtttaaattgtaaaaataaatttttttttgtgttaatatattcttatatttttttttcaaatttttgatgtactatgtaaaaatttcactaattaacggagcatgaactttaactttaattattcttaacacataaattaatttatctcctttttaatactataatttttctttctaaactatattggagagaaaaaaaaaaaatatcctatatattatttttcattttttttttaatttacggtttggattgctctagtgtagtttttccggtagtttttatgtgggttgctatatgaattttgattgc

SEQ ID NO: 121654 - DNA, 1519 bp, Cannabis sativa
atatccaatgtttggtggtcgattgtaattggatcggttggttctcattggattggatcgatttatgcacacccctaggtgttatgatatgtgatgaggagcatccttgctttgttgcgatctcctcaagccagaacaaaggaaaagccattgtgttagaaacaaccaagtagtttaggaattccataaagaagaaaagaaatatgcttatgtggttgtattgatggagataaagctagacctatggtgtaatatcccgaaaaatttaatggtattttaattggacatattttattaaatatgttattaagtgggcattagagtaggattataatcccaatttaactaattacgagttaaaaagaaatatatgagtaaacgaataaataaagcgtaatttattaattacggagattttatcagactatgagggtatcgtggatactatttttagaataaaatgtattcaagattggcggccttgagaactcgacagagtggtcagaaatatcacgacaattatattgtgttttattagagttgtatcagattagattataataatgagaagtaggttgaattggagaagttagaaatgaccaaaatatccctaggttatgttatagcctaagtattattggaggggtagaatagtcaatttataggattttagtttttgtcttatgtggattattctagctgaaggtggggatttaatattaattttattactattattaggttagataataaagaaagaaaataaagaaaattaaaattaagaaaatttccatttcccatacctttctctctctcctcttcgaagcttaaggactcagctgaatcagggggaaatttcttcacaaatcaagcaaatcttgactgagttagctaaccctaggtgttgttcaagccttgaggtaagattttcttcttcttttctttaatttcctagattttgagttaggttttgttggatgtttctttggtttcaggtctgtgtgattgctggagtttagatatgtttttaggtttgaattgatgttggtttaagcttggattagataaattttagggctgttaggtttgacttggattaaattgagtattgatgaactgatgagtattgatgatttgtataaactgtttttatgatattaaattgttctggagagtttcaataggtttggaggagatttggttgggttttggtgtaaaaacccgagtttcccatttctgcagcagggaaaaccggttaaccagttttacagatatagtgaaaccgatcgaccggtttggcagtaggggaaatcctaggttttggctttgaaaccggttttgattggggtgttcttcaaagcttagattagggtattttagtgatgtttgagttatttcgaatcagtgggggttagatttgttcggttacagaattagggtttgttttcaaagtttggataacttgtttatcaaggtttgttattgtgacataggacccgggatcgtcgagcatggttcc

SEQ ID NO: 121655 - DNA, 2262 bp, Cannabis sativa
  modified_base (2167)..(2168): a, c, t, g, unknown or other
  modified_base (2212)..(2212): a, c, t, g, unknown or other
gagagagagagagagagaattagggtttcagattagagcttgagagcttagggtgcttgagacttagagaaattagagttagggtaatgctttttatataggagggctgacaagagaataataacctaacatccctaataaatggaaaatataaagtatttgttacataataaaattatagataattaataggttaattatgccccaagaataagtataaagcaatatttatcccctatttttgtgggttgttgaagtcgaattcgcaacttcgattgttgtcccgaatgcaagctgcgcatcaagtgtctgctagggtcgagactgcaaaccaagtgcctgccagggtgcaagctggctagccaagtgcctactaggatatagcctggccgacatatgttggccatagggccgaccaggagggttcggccagaccccttaaggtggccatttcgttgtcttttcatcttgcataagtgttcagacttcccgtcaactactatgttgtgtacgatgactgggctttcttgttgacaagttgtactctacgtggcattgatcttgcccacgtagacatggcacgtcatgtggaaaaaaattgggataacatatatatatatgaataattacccaacacagtatttaatctatataattatatatgaagatagttcttgataccaattgttagtttttatggtttatataagagttataaaagctaaagcagaattcgataaaaaatggtttttatctaatatgaatcatataatctactaaaagaaacaacatacctcttgaagcctatcaaggtatccttatttcttttagtacaattaacaatcatccaatcctagaacttctgttgaagaatccacacttggatcgttcaagctagactcaacactgaagaatagagtgtgttattggatcttatttagatgaattaatttaagtattacagtgtgtactcaactcatgagacactgtaattgagataagaaagtttgatctctcacaaacttgttatggtgtaggtgtgtgagacctaaagagagagagaggggggggggaggggaataggactaaaagctcaattctattttctttatttttcagttgctttctgtcttttttcaggtttactgattgtcaatttatgatactatatctcctatgtatagtgttataaattaattattttaatcctttatttaaaataaaagaaaatatctactttgatttgaattagaatttaaattcaaatataaatatctaataactgaatgacaaatatcaattagattttttattttaattattatatttttaattaagcaattatctaataatttatttaattaaaaattaaaagattattaacttaatttaatttaaattattttagccaatcaaataattaaactaaattaattatgcctttatatgtcacccaacacgtgtggattgggactacacgcgtgggccatattttaaggtctaaaattaattttttaattttgccttaaataagatttattatttattttaccaataaataaaaatttatttattctcattaatctcttatttcacaaagattaaaataaatattattttttctaaaataatatatttctatccttaatattatttaagaataatattatatttaactaattaatatagtttcatccaataaaattaaatactaaaatattattaaatatacaattcataattgccataattaatcaaaataaaatatttctaaattactattttacccttaagaatttattttccatagacattaattctcactctaaatttattcatcaaataaaatcttctcttgtatagtgttgtatagaggtgactcggggaccatggacctatatttcgaagctccaatagagacttgattattatcaatcttgttatccaactttttacaccgtgatgtggcaatgagctggatgacacatgtcttgcactttcccgtttgggcagaaggaagtactcctagcaacccacaaaggttgatataaatgtctatcgtcagcatatagcagaatgtccgagcagagtaatcaagagacatctgaccaaagtataatctcgtgatcaacccacatacaccaggtgtaaagaccgcttagtttannttggaaattagcagttaatcacgtttaattatgaaaattatttntagctatttaaataattatttatattgttattattgaattctgagatgca

SEQ ID NO: 121656 - DNA, 2338 bp, Cannabis sativa
ttcgggttaagatttcagtctaggtccagatcaggctccgggtgtgggttagggtcgtcggtctcggtccagatgcaggtccaagtcccatgttctgactcgatttgagctcgagttcagttccgggtttgagtcctgagtttctgatcccagtctaggtttgagttcaggcctgggtccaggtctaggtttgggtctgatgggtacctgttttttggatcgctggctgggtctaggtcttagttcgggtactaggttcaggtttgggtctgcgtctgggtctgagtccaggtcctgtgttttgatccaagtttgggtcggtattcggtttggttcgtgtccatgtctaggtcgaaatcccagtctcagtcaggggcttggtctgggtctgggatcgagtcccgagttcgtgtttgggttcgggtttgtgtctcagtcctagtcttggtctcggatcaggttcgggactgcgtccgagcttgagtttcgaggccttgttatggtcaagttctgggtgtcggtccaggtccatgtcctggtcacggtctcggtcctgttctagggtccttgtcacgttctggtcaagtttcagttttaggtcccatgtctaggtctgggcctagatcttggtccagcttcgggtccttgtccgactcccaaattgagaaacagactatgggtcttttctaagacttagttctcatatcccgagacaagatctagatcccaatcacgggtcctagtctggtttcgaatcatgtcccagatcccggtctgggtcttggtctaggtcaagaaccgagactagggtgcagttccgggtctcgatccctattctaggctccgagtcctattccaggttcaggtctgagttcaggtgtggattcgtgtcccgagtcccaatttgcatttggattcaagtttgggacccaatccagggtgggtttgtgtctgagtcccagtctaggcccggttacagttttgggtctgggtcaaggtcctggtccaaggtcccgattcgcttctagttttggttctagtttcatgtcacggggtacaggttcgggttgagtttcggtctgagtctgagttcgggccttgatctgggtccggggcgaggttcgagtctaggtttcagtctcggttagggattgaggttgtgtccagttaaatgtttagatcggagtccaggtctcgatcctgttccaatatcacagtccagttcaagtttcggtttttgttcccgagtgtgggttttggtatgggcgtgtgtttgggtcctggtttgagttcgagtttgggttcgggttcaattctaagtccctgattcggacatcgactacgtgttttgtccaagcctcgggtccaaatcaagatcttgatctcgggtgctgttctgattccatttcgggtatgaggtgaggagctaggtcctaggttcaagtccaagtctagggtcgggtactaggacccagtgctagtttgagtcctagtcttggttcaagtttgggtctctgtctgggtttttatctgggttcgggttcaggtttgggtcctgctccttgtcctagtcctagtttggttccaattctagttgtgatttcgagttcgagttcgggtcggggttcgagtccttgtcagaatttgggttcgggttaagatttcagtctaggtccaaatcaggctccgagtgtgggttagggtcctgggtctgggtccagatgcgggtccaagtctcaagttccgatcctgatgtgagttcgagttgagttctgggtctgagtcctgggttccgatcccggtctgggtttgagttcaggtcttggtctaggtgtacgtttgggtctgatgggtacgggtttttcggatcccgagctgggtctaggtcttagttcgagtaccaggttcaggtcttggtctgcgtctgggtccgagtctaggtcccgtgtttcgatcccagtcagggtctgggttggtattcggtttcgggtctaggttcgtgtacatgtattggtctgaattccagtctaggtctgaatcccattctcgatcacgggcttggtctgggaccaggattgagtcccgagttctggtttaggtttgggtttgcgtctcagtcttagtctgggtctgggattgagtttcgggattgagtttcttggtgttggtccaggtcctggttgtaacaccctaactagaataggcgtattacgtgatttttttaaacgtactatgcaggtcgatgctaatcactgaggtttatcgaaatcgtgattaattaaaattttttgctttttaattaaacttatataatattttatacaaaaatactcgggat

SEQ ID NO: 121657 - DNA, 2223 bp, Cannabis sativa
tgatcttcccaaaagtgacacaaaaaggttggaggagaagatagcgctctaaccaagctggtcaaaaagaaaagcatagccctcttgaattcagaagatatggacatgaaaccatgtgtaataaggaggattgcggaatgccccccacttttagaaaactttaaaatgcctccatattgagttgtatgagggaaggaccaatccacgagcacacttagcaaaatataacaaaatgatgcaagtggcacgagtcagcgacgatggcaagtgtttatgtttttccctaacactgaccaagtctgcagaagactggtagaagaaactttctccgggatcgattaatagctagaaggatttacaatcggccttcaacgaatagtttagtgtcgcacgtgataaggacatggaagttggctctcttaccaatgtcaaccagtaacacaacaaatgcctaaaggcttttattcaaaggatgatgaaggttgctgccaagaccaaagtcagcgatgacatgaagctaatggcccttgcccttcaattcggactggctattggttctttgctatggggagagatgcagagaaaaagagtcgaaacattaagtgagtttatgttaaaggctcaaggtattattaaccttgaagatgcttacatacaagcctttagagtccctctggctctaaccccttccacagctacgcccagcttcataccccaagttctggccccagccttgactcttctcgcaactcagctttccccaattgttgacggacccactacctctgatctctcacctacacagactcatttttccaggcacaggatggcacagacggggtgtggtgaggctcccagataggtaaaaatcgaggttgcagaatcaactatgaaccactcccaaaataaaagagggggcaagggcaataatcgcaatgactcctcaaaaaagccgaggaaggagtatgatccaaagtatactgaatatactactttaattgacacatgagagaacatctacaaagtaacctacaacatggtccattacagaaagcctctgcgaatgtcacacaaaggaaggaatagacatgatcagaacaaagaatgcgagtatcatggagagaagggtcacgccaccaacgagtgtgattatccgaaggatgagattgaaactttggtttaagtgggacatatgggataatgggtctggattccaattatttatcctggacagggggtcgtccacgggcacatggttgttttgggataatagaacactataaatcctccgcaggggataaggcattctcaagctcgtggaacatcactgcctgcactccctactctgctagtgccgggtggggtagagttactcgcactaggacctagaaccccatatcctccgaaactcactccacctccggtggacggacaagtggtcataatctctggggaccccatcttgcaagaagcacttaaaactcgcaacaaagatacctgagagaggtagaagaaggggaactatgcgcaccagtgtaatctctcgtacattgcccaagaatgatgaatttcccatcacctttaccgaggatgatgccaaaaatgtgcacttccatcataacgatcctttagtaaatgatgcacagattgccaataagcgagtttccagagtccttgtggacaacaaaagctcaattaacatcctattcaagtttgcattccaggtgatatggcttacaaaagcaggtttaactccttgtccttttttgttgtaaggtttcaatggatacaccctaatgccaatggggaaaatctagttacctatcaccctcaaagcaaaaaataacgcaagcgtttttaagcacttgacttttgtggtgggagactgcccaacaacgtacaatgcgatactagggtagccaaccctaatggatttaaaggcagtaacttctattaggcatttatgcattaaattcccctacgacaatggatgtattggcatgattaaaggcgatcataaaagtacaagaaactattacaatgtttcaacacaggttgcgttcatggtccaggaagagatattcattgctcttggaatggagaatcaaatggatattgaggccatccaggaaaattttcaagatgagttggatcccagagttgggacagaaagaaatttagaatcaatggaagaggtagaggaagtaagcatcagtgatgaag

SEQ ID NO: 121658 - DNA, 2349 bp, Cannabis sativa
  modified_base (2190)..(2199): a, c, t, g, unknown or other
ccagtccaaaaacgctgcattattttgcagcagtgtcccgattctttctctgttccagcaaaattgaatagttggacactcagcaagagcatggtaaatggactcctcatgacagttgcagactggacaagtagtagacacattcactctcttagttttttaactaaatcatagttggaagacatcattgacaagctctccataccaggtttttcatttttgggggaagtttcaaagcctaaaatttcttccaaaaggcttcaagaaattggttttaagttagctataataagagaaaaattgacataaatgtttgcggtattattttgtatcattttagagaatacataatctaatttatcaaaatagaaggtttgattggtatgttttgtaaaatataaagtccaatgatttttacctttttttttttttattattattagaatatctttaatggagtgttaacaaagtaatgtattgttatattttagcacacttaaagaaaaatattacttcaatgatattttaaaaagtgtgtcaaatttagcacaatatataacattgtgccaaatttagcttatgataaattttatatttttttatactataatgtcattaactattatgatttattggcttttacataattttattttttttatttgatatattatcatcatttaagcaataaaaaaaataaaaaaataatgatgtttgtatattttcaatacaatattaaattatgatcaataataattataattttttatatctttatattggagcacaattataaatagtgagttaaatataacacaaacttaatttttgtgctaaacttaacacaaattttacatcttgcattggagatggtcttagtagtaaactataccgcgctttatgcggtgacattattgttatacaaaaataatttgtgtatcatgtttcacacataaaattgccaatatgcgtagacaccctacatgtagtgatggaaacttaaattgtgggtatggggcccacaagtatccgcccttaacgggatggagattccttgcctacatggggaataggagcaaattgggacaattttttatctccaaatattaaacggggtgaggatggagatagaactgtttgggtttatgccctgaaaaatatgtaaagatattttttgattattaaataaagagttaaacatttgatataatgtgaatgttaagttattaatatttattattgaatattaaatatcaaaaaaattccttattcatatatgaggctgtgatttatagttatacagagaactaagactacttagctatgaatagaatagtcagcaacatattaaagttattgaatctttaatgtatggctgctagtacaattcattaatgttcgttattcgatacaagtaatcttggttctaattacagatgtaatatgacatcagagtgaaggtgtatacaatagagattttatatgacaatgacaaatatgaatgaagctgtctctattaacatgtcgtttattataaagatctaattcatatcataataatgatcaataatagatcgccctaaatcttgaatatcatgaactcatgttcatgttattagttcactcgttaaagtttctcatagaagatgattcttccaacttttgttttgggaatctaataatgtggatggctggaaacatgatttaaatttatagaatcctgactttcctaacggatcgaatgctggttccctttaagtgttaattctagaactggaatggtgtgcacaaatttagatgagatctaaattatacttccactagtgaattaatgatactaaaggataaagaagtaattagaaggataaaacgataatttgaccaaaactaattacgaaccaacacatggaagactaatcactggaactgattacatcaatagacactgcaataaaactcagtaaatataattctataattactaagagtttaatttcatatttatagtggagtaatcatagaattaacaaacaaggattatttgcttgattagactcaataaataatttagtttattggatcttagaattataggttcatggtccccgaatcgccatcttgaaacactgtcaagggtagagataaagagtagtataatgccgttgagaaaaatctattttgaattggcannnnnnnnnntatttatttttgtaataaataaattttttaaaatcaattaaatagaaaaaaaaacaaaaattattaagataaaatttgtcaagacaaaaattgttaggacaaaagataccaatcttgtcctaaacaacaagtgttgaaaattattttacc

SEQ ID NO: 121659 - DNA, 708 bp, Cannabis sativa
caacatacatgataacatacatgatagtaaataggatagtaaatagattagtaaatagatcttggtaaaataatttccaacaaacgctatgccatccattgtggagggagttcaggtggaatttcaagagtcacaaattggatttctagtattggtgcgagttggcactggctgaatttggaggcatgaatgtattcttttagggctttgaaggatggtttaataagtggtttaatggatctagtaaaggaggaacgaatcttagtgaaatattgatatggatttaagagaggaagagaatctaaggtaattttagtttcatctggaacataaaaaagctcacaaaggaagtctaaattatttgaagtcgattttctacacgaggggcaaaagagtagggaatgagcttgagcattcattgaagttagccatattgtaaagtagagactcgtccatatgataatatgagttatagctcttaaaccataagggttcctgctatatgctaagcgtcatcaaatataaagatatctaaagtaatgttctcacaagaattttcacgacttacaactctatagtgtgacttacaattatgaatgatagattgcttagttacctttgttagagattttattacaatgaaagaaaatcaagacattacaacactattgcaatataatacaaggatcaacaaagagattaaataaa

SEQ ID NO: 121660 - DNA, 1087 bp, Cannabis sativa
  modified_base (240)..(241): a, c, t, g, unknown or other
aatggcgtggaggcctcaacgatctggtcacctgattgtccgctgatcaactccaatttctcgatatggaatcgtctaaatcaatatctaagaactcgtattcttttgcttctaattgtgtcgatcctttgaggctaaaagattctccatcatttttcgtactatagggattagaaatttaattatggctcagatctgaggcctaatgttaatattttttattggaaatattttaccagnntctagatttactaacatgtatgtggattaacatcataaatataaatatctctaaaacaatgaaattaaacacataagagtttagaataagtttgatcatgatgtgcccaagtatgagtctttacacattatttataataattttctttcacatatgatctcagtcattctaaatatatataggtatatatataggggtacacataaagtcttcgatttttatttgtttcagaaaatattttctacattaaatctatttttgatgctccaaatggaaagcaaaggtaattatctttctttatatttaaaattgtcgtatagttcttctaaattaaaagatttttaatgttattactgaaaagttgttcactcacagaagccattctcggaaggcttccttatccttccgtgaagtcaggaatagctagcctctctctgggatggagatccaattggctagttgctcctcgtggaaagacagttttggatagtagactccagcaagctctatcttatctaaaagctccttcagcgagtgcctttggtccgtgatctcgaaagctcatatacattctgggatgcactatgacttatgctgacgtggagatctcactctaaagaaaaagttcgttaagttagttactgtctaactaacttaccaacttcaattcttgcagtcaccgactttaggatcttgatcctaagcctataaataccacctcacttgttattttacaagatggcttagactgagattgacagtttgagagagaaaagattgagagatagatagatagagaggtatagagaaaagagagacataagatttgggttttgtaagaagaat

SEQ ID NO: 121661 - DNA, 1005 bp, Cannabis sativa
ttcagcaaagataattgatagtctaaccaaaaaatatgctcagtcaaatcaaaaactttatacaaaaagttatgaactattatttgaaaatactatccccaaaaaattaagacaatacaaatataagaacaacatctaacacgcccaacttaataatatatcacgaacaatccataaaacatctacaaaataaaataaggtacgtaaccatagatgaattagtccccttataatgatattaataaaatcgataaaagaaaattctcaaaacttataagaaaacgacacttcaacatattatattaaaattaaacttatccataaaatctctgtaattatagcctatcaaccaaaaaatttaatgataaaaatatataatagcaaagaaagatagtaaaataatctaaattaaaatataataaaaaaacttaaaatacttatttgtgagagctgaaaagtcattcaggtagaagttaatggtacaaaatgaaccactttttttggccatgtctttctataatgaccgcataattagaaaagagaatttttataatttatcatatgaagtataataaaatatagattattttattatgtgcatgactatttaagaactatttataaagaaatatgcaaatatgtgattagtaaattaattatggaattagttaatgcttgtgccatatttgtatgttaaaatataattatccttaaattatcgtcaacaatatttggtgaaaatgcacagtgatataattttagctgtttagtggtaccggagattagttataaataattagaaattatttattagtaggatagttgggaaaagttccttttgtccctatgtttagttttattttttgtttatgcataattgtaatttaggttttttttaaggtgattttttaatattatacctaaaattgattttatttataaaaatacctttaagaaaattatttgcacaaataccgattgccacgtcagcataaataccgaaat

SEQ ID NO: 121662 - DNA, 552 bp, Cannabis sativa
tgcaagaggtagaacaaacacttcgtataattagtccatataggaattactatatagtactagtagatatagataagtgctaatcatagtttttcattataattttttagttaatttttgtgttcaaaaatgttaaaatatttttttccaattttttttataacaatattcattataattaaaatatcattagaaattcttgtcaataaaaaaaatattagaaattcaattatcgatattttaaattatttataattttttaaaaatttatattcttgatagtgtaactataactatatatactataagcatggtcgactcttatggcgtgcaagttatttgattactgtacagggtttaaaaaataaaggacctaatatattttttttaataaacccaatttttcaagagactaacaacttatcattggtcacttccatactaatttctaaaacctattttcaattctattactgcttataagaaaaaaaataatttagtactgttatttattattttttttcaaacttttcatattcttttttttttatt

SEQ ID NO: 121663 - DNA, 805 bp, Cannabis sativa
  modified_base (770)..(780): a, c, t, g, unknown or other
gctttctctgttgctttgacacccccaaaaaacacttgagacttggcttcattagaggtcagccctttaacctccccaaagttagtgagagcctctttaagacgtgtaaccttagctggagtacccttgtaaaaaatgaaaagatcgtccgcaaaacaaagctaatcaagtttagagttttacacattggatgatacctgaaagtcttcttggaagcctctaattgaagccttcgggtaagataatccatgattagcacaaacagtaaaggcgacatcgaatctccctgtttgagccccttccttcctttaaaattttcttggactcttccattcatcatcaaagaatacgaggtacccttcaagcaagtcattatccacaaaacgaatctagaaggaaaaattagagctacaagcaactcctcaatgaagcctcaatcaatagtatcataagctttactcaaatttatcttgattgcacatctaggagaaactcccttcctgccatagctcttgattaaatcctggaagataaaaatattgtgagctatcgatctattcttgatgaaagccctttgattttgatggaccaaatcaggaagcacctcggctaatcttttacatattaacttggttatgaatttatagatcgtttagcagcaggcaataggtctgtagtcaatttctttttgaggaatttccaccttaggcacaaaggaaatcatagtctcattgaattgaactggtatagtgttggaaatattttaccannnnnnnnnnntactaccatgtatgttttattaaca

SEQ ID NO: 121664 - DNA, 565 bp, Cannabis sativa
acaactaacctcaatgcaagcatataaagctctaactaacctaggatatatatttgtttgaatttctaacaatgtttcccatcccatacgttcaaaaagagaattaaaattgacatacgcaagggctaaagtatctaaatggggagtgagaaagtcggtagtggggtttttatagcaaaaaaattgattttgaaaagactaaaacagcctttgaatcgtgacctgtgaggaaattggttaaccgatttgccaggtatgcagaatcggttaaccagtttctgcagcaggaaaattccccgaaaagacacaaaaaaccgttttatccaaccgtttgaccccaaacttttttcaacacttcaaatatgataaaacataattgctcaaacaagaaaaatagaaaaacgataaaaatgatgatttacggtaagattttcgaaaattgccaagaaaactagaaccttaccgaaaatgagttttatgcaatgaaactgaaaaaaaaaatccagttgtttgatgatgtaaaatttgaggtgtacaaacttacggaatcaaaaaatgttgaaaa

SEQ ID NO: 121665 - DNA, 2531 bp, Cannabis sativa
  modified_base (2482)..(2486): a, c, t, g, unknown or other
aaagagtagacaagtgttggccatagttaaaataaaaaggatgatattaggttgtgcatgcatagtcatgtctagaagtggtgttttttgattaattacgtgagatttaataattaattatactaataataatattacattttgaataagacatttaaataaatacgagcacattcttatagtggttagcaccatttatatataacgtcttgtcatttagttaaattatatgagagacgatacttaattatactaaattttttaatatttatcaataaatatatcattaaaaaataatgaaaaatattctttatttgatttaacatttgactttattaaggacccgtttacactgatgtacgtaggtaatactctctaattaaacttattaacttaattaactcatcaaaacacgtccaccaccctaccattaatatagaactctactctgctggtatgaaatgaattataggaatataatagtttcttatccttaatttcaggctaatatatatttatttatatatttatactggtgggaaaatccacaattggtcaagataagaaaaattgctgtcactcaccatatctcctcacgtatagtattctttatatatataatatttatcatgtatatatttttaatttttaatattattacaatatatataatttttaaatatatataacattttgtgctcttacgataaatatttaactggaatataaattatcacaatcaaaccaaacaaaacaatccaatccatcttcgatcggtaaaaggcttgatatataattcttatttaggttttattgttagaaatatcataattatttttcgtaacgagttaattaatttgttgccatttttttactatattaattaatagtactgttgttgtgcatgttttattgagttttacttttgaagattttagctaatgaggtccaatgtttccaaaaacaaaaaacaaaacaataaccaatttgattagttttatttcattttgttttagcatacactactctttgtatccttctatttgtttattttcaaataaatttattaatttatttcgagtagatatagtaattagcacggatcaatataattccattaggtagaatatatattattacaaaattgtaatcaaattaatttcatatccaataaaaaaaaaaaatatatcatcaatcaattccaaaaggtcaccttagccccgtgatatatttatatataataaaaatataaagttattgtttaccttagcctcacgatatatatattcaaaaagagaaaagaattaattaaaaataaaaaataaaacaaattaaaagaatattatggtcattaatgaaaccctaatttgtttcctagctagtgactatatagtgagtatagttgtccaataattagagatcttcttctatatatttgttgttattaaatagtgtgcaagtgttcacaaggatctggttttttttttcatccttatattctttctttcacaatggataagaaacggtcattcgttgaccaagtcaaaagacatatatattaattttttatatatagttatgtgtatttttaattgtataattattttttttttatgttattcaataaataaaattatttatattaaaaaattatttaatttaagtaatatttaaatttataaaaaaatataataatatttaaaatttattgttaattataattttagtttaattgtaattttttttttaattttataattcttttatttttcttaaatatcattcattttttttataataattaggagaatttgcggcgaaatccctttatgttttaagttttatacacttaacctctttatttttttttagcaaaacccccttaagtttatttttctttgtaaatttaaggtgtcagttagatattactattaaataccaactgaattactactatatcgacttcgaagttttagtgttacaaatatacaggtgtatactgtggtcgtgcaattaatatttaacggtaatatttaactggcgtgttaaatttgcaatgaaaaataagtttaagggtgttttgccacaaaaaaagaaaaaaagttaaggagagattaaatgtataaaattaaaatataagatagattcgtcccaaattgctctaataataataaaaataatttttttatgtaaattggataaaatcttgataatagaattttttttgtttttaaatatgtacaatgagtttagatttaaaatttaatattaaaaaagatataattaatataaaagataaaaaaaaaagatattgggagtttaaatttaaagtagtgtaatgttattaaaaaaaacaataccttatataattatataatataacaatgagatactctctactagtacaattataaggtaacgtgtgtaacgtcctcacttcaatcctccattgggtccttacacccacggaatgatggctctnnnnnacgagtacgccactctagctgtttcctggattgatgactgaccct

SEQ ID NO: 121666 - DNA, 1066 bp, Cannabis sativa
aaagaaagagaaaaatctagactcgtattagttattagctacattttaatgttgttgttaaaacttatgcaaagagtattactaatactattggatattatggtatccaatgctactactcctcctaaattacatcaataataatataacaccactatactaatctcctttaacttttctttatgtattcctaaatttagacactagtgactcccttcttaatattcaagaaactctttttgaaatttattattatagagacctaaacaaatcattgctatattatatatctatgttatattacataaaattatataagagaaagtgttattcctttttaaaatattacaattcaaatataaatttattacacatatatcgcttatcttttacactgtatttcaaatttaaactcatcgcacatatttaaaatatatctttataatataattttttttacccaatctacatatatatcttaaaaaaaattatctttccattattatttttaatttaaacaataaaatagaaaaaaagtgtttatgtttcttaaagaattaatcattgttgtaacactattaccttttgttgttataatttttttttttattatttataaaaaaaaataaaaaaggtatatgatatttttataaaaataaaaagtattacaatcaaactaaaattataattaacaataaattttaaatattattataattttttatatataaatattacttaaattatacatttttaataacaaataatattatttattaaataacatctaaaaaaagttaattatacaactaaaaatatacactaaaataaaaattaaaaatataattaattatacgtgtattacacgtaatattaacctaaaaaatagaaaagttaattaaacttaattagtcaaaatattaagtgggggaagtcattgtattggtgagggatcatgatcatgtggttataattttgcatattaatttttgtggtcttagctctacaacattttactataagaatattttatttaagaaaatatatttctatttaaagaaattaa

SEQ ID NO: 121667 - DNA, 511 bp, Cannabis sativa
ttcgtgttattttttggaaaaccgcaaacgtaaaagtgtaattattttacaaaaagtagtgtcttatgtaattattccttaatattaatagtagatgtaaatgtaatgtaataaatacattaaaagagaagtagagcatgtttgtactctttagactggatgggtttgactctcaccataatcaaagtgacatgttttgataaaatatataaattaaaaaaaaaaaaaaaagtaataatagttttaggagtattttttaatttatggagttattcaaattcttgcaatttttgttagaaagaacatactataatatatattagataaaaaatttaacacgctattaatttttataaaattagtatttaaatatggcaaggcattatgattcacatttcattaaaataggaaaacttataaaaatactggaattttagttaacttttacaaaaatactgtcatacggaaaagttttaaaaaatactgtgttttataaaacactagtaaaaca

SEQ ID NO: 121668 - DNA, 680 bp, Cannabis sativa
tgcttctcttgccacaatatctgaaaaagcttccctattcaatcccttcaattctcccttcaataattttcgtcgactgaccagttggaacatttgtgtgcctttcaaaggttactggcaaaccttaactaaaatcccagggaactgggggtgtgttgcccacattttgaaattcttgaatggttttttaccactaagcacttcagggtatatggttaacacaatttgggtgcgatcaaaggctccctcagtcaagaaaacagcttcgaaattggctagtttatccagccatgcttcattgacaagtactctatcaatcttcgaataaatcctctcatcatcttatcttttgttacaccatgtatgaaaattcccacttgccttaagatcttctaaatgacatatcttaatgcaatttgcaaactcaattgctgctttgtacttcacttttttaccaactctctcctccttatgtagtatttcattaaaatcccctaataccacccattcctcctttgtaaccaactgttgtaactcattccatagctcaattcttcccccatcttcattgaaagcatatagaaatgttgcatagaacttatacttgccatctacagtagaaacatgtaaatgaatatataagttgactagtggatttaagaatgcttacattgaaacta

SEQ ID NO: 121669 - DNA, 1592 bp, Cannabis sativa
  modified_base (1554)..(1562): a, c, t, g, unknown or other
taggcaatttttagtatgtacaaaactaaattattaaataaataaaaatgtgacacatgtttgctcgtagggacttgatcgtgagtaaagggtacaaataggacattgtgtacgtcaacttatttttattacaataataatgatttgccattaagaaggttagcttttgcataaaaattttggaccaaccaataattaatcattatagttaatgagtatactaggtaaaagcctacttaattacattcttcttcaatattcatcatcatattttttttttggggtactaagctcagagttgtaaataatgatcatgaaaatcatcatcatataatatcacataaaaatatttatttatatcattaatttacatctcgatcgtgttcaatataacatgcggttacatgctattaaatttgagagaattgaaataaattatattcattatattcttagaaaatgaaataacaatggtacattatttaaaagtcattacttactcgtacaaaatatttattaatgagaacagaagactcatcactttatttttatttttatttttttgttatgataaaaggttcatttggcagtgaaatatgacttattttgtagagtgaaaaaaaagggttaaaaattgcaactgatgagctataaatgactgacaatattgtgaaagaggggatattaattaataaatacaaatgagtttaattacataaaatatttaatctttgtagctgtgtaaatgaagttattaatttatgtgtcgttgttctcttcaatgattaatgaaggatagagaataacttagtggtgattataaattatataattaatgagggagggatgagaaaaactattaagctaatatataattatattaccctaaaaaaatattttaaaagagaaatgattataaattaaaaaataattataaagataatataaattaaaattgtataccctttcatcactccttctttcttaccaaataatataaaatgattattactttcctctccttctcttatatcctccattattcgttaactatgcattcatcatactctctatccttaatcttttctataccaaacatatagttagattactcgactttagaagaaaaaaaatcatgcaaaatgttaatgggagcatttatatttgacaaatgaaagaagaagataaaaacattatttcataaaaaaaaaaaaaaaacatttaattcatttagattttttttaagaaataaattatgaaataaaaatgacaaatgaaaaagacaagctagaatcatctccaaggcatatcaaatcttaccctttttaatgcatccacaaatgaataagatgtatatatttccttgtgtgttcaagaaaatatatttgtttgttcaaataaataaatatttgtttattcaattttattttgtttttttaagaaattatccaaacaattatataacatacattcaatattaagtaatttggagtaaaaatacttaagtaatttttggttgcaaataaatacctaaatttaattttttacggtaannnnnnnnnagttatatttttagaactctgtagatacct

SEQ ID NO: 121670 - DNA, 2141 bp, Cannabis sativa
taaaatatcattttaatggaatgcccttctcaccattttggtagaatgactattccattttaaaatagaaggaaagatcattccaatgtaacataagaaaaaaattagtgatttttttatcaatttttattttcctattcctattcttatatttttatattttatcccttccaaccaaatgccgccttagtttcacatccatttgtgcaggaaactaacctagaatttgtgtaggaaattaacctggactgcctcttacatactgtaacactttttcaacagccttgaaatgaggtgtccagagggttagctaagatatggcttagcatgtttacaaagtaggtcaaatctaggtattagagctttcaaattattttactgtaaaccttaggatccataagtaagtatcatgtttcttgattcactatcaagttaagctctattgatgtgctagctagtttacaccccaactttccagctcttcaagaagctacaaggcataaggtctttgagaaatgaagatacctttatcagaccttcaacctcaagacctaagaaatacctcaagtgtccctagatcttttaacttgatgttgagagacttaattgcttccagattgtaattttatgatgacatcatcttcataaacaagtaacaattcagtaaagtgagtttgagaatattttataaacaatgaatgatcaatggtagagtgaacaaaactttcttcgatgagggcacttgaatttttttcaaaccactacattggtgcttattttaaaccaaacaattatttctggagcttgcatattggattgatatgtaaaatctttcccttaggaatataccgttgaggtagagtcataaaaacttcctcattattaacatcaagctgatgaagatgtcaaccatgcatagttgcaagtgccagaaagagcttaaaagaatccaatttagcaataggtgcaaaggtttttgtataatcaacccgttcttattgagtgtagtcctttgcaatactagtcaagctttgtgtctcttaagagtcacattaaatgaatttttagtttgtaaaccattttcatcccactacatgcttagtagggaaactattttttaggtgtttttttgttcttaagggctttaatttcaacaatggcttgtttccattcagaaaatttatttctatggctgagaaaagcaaaagcataggcaaggcagccaaatgctttgagataggaagagacgggggtttattttgtcagatttcaaaaggtgattttcgtgctagattaagagtcgggtcatgtttgtacaacacaaattctttagtagcatatagtaatgtgaaactaaaagagtaacattgtggcaacatttagtacatgttgattctttctgaaaaactattgaattttgttatgggcgattcaacatattaatggaaaatattgaacacctagagaagtaaataatacaaggcattgtaatttcatagcactatcttatctaatccctttcatttggataacaaactcagttttactgtagttgaaaaaatttggaatcacttcttgtgcctcaaatttatgttttataaggaaaatctaaatgttctttgagcaatcatttactgtaataatgaaatatctatggcctactactgtcattgtttgaaaaggaccctaaatgtccacatgaattaaataaaaacaagaactaagaatatgatgatttgaaatgaagggtaatctttttttcttggcaaggtaaagaatagaacaatgaaattcaatagaaatacgagtgtcaaaattaaaatattaattcaaagaatgttgttaaatacatgcgccaaacctattaacgcaacgggtggaatgcgaatcttctcgtgctaaaatatcaacaaaccaagagtgtcctattacgttatgtttctccaaggcctggatcttctcctcctcttggatattcaaagcatatacatccctaacaaaggataattctacttgggggttggtccatctccctccacaagtttattacccctcaatgtgctggtaaagcttatgcactgcaaagttttgaataggtgaagtaaccactcttttgatatgttgtgttggaaattatttta

SEQ ID NO: 121671 - DNA, 1948 bp, Cannabis sativa
gcgtacctatccttactctcttaggagtctcctcctagcctaggccacccaaaatatcattcttacttctccttgcacctgtggtgcttcttcacgatgttgttgccactgcccttactcttgttcttcatttcactggttctctcgacgatattcatctaagtatcctcttcatatgagctcctccatttcaatcttgaggtgggaacattcattagttttttgtctaaagtgcttatggaatctatagaatttgttggcatccctcctaaatctatcaatccttataggtgttttgatgggaaattagtgtcatttgtcaagaagatgtgttcgcttgaattagccaatttcataaagtgggtgtatcatagatgacacaaaccttcccctcactttggcctcttattcatgtcatctcttctcctctcaaagccttactttcccctagtttctttaggtactcaaaatttgaatgccttctcggggggggggggtccttccatctaaacttcatgttttcatgtctgtcttccacccaaatgtacttttttgccctttcattaaaatccttgaggtcatttagctctcttttaagcatattgttccacatctttcccttgggttatacaccatccactatggcaattatctgttcatccttggtcagtcgccctacttttatggcatctgtgttgaagcacttgatgtagttcttcaagctttcattctctccttgtttgacattagctatacttgtgctggatggtatagtctgacgaggcatagtgctaggctagcaattagtgagttgcttccataatgagtcaaagctgagagtcaggcatttgaaccactgacatgttgcaccttccattgtcaaacattagcaccttgcttttcttgagacccttttcatagtcatcagttcgttaaaggcatctaagtggtatttttgatctgtcgttccatcatatgatgagaagtttggctctttgaagttgagaaggagtggtccagcctggatctctcttgttaatggtgatttctcatttaatttgtcatcgtcgcagctacattcctccgatgcaactaaggaaactttcttacataaatcctccattttttgtttaacttctttcttttcctgttttgttcattctggaggccttgaggtgtggactttttcctatctccacttttttaaggcgcaatgggtgacgtatgcctttatgattttccatttagtttgtccctcaaatattggggagtggccttcgccaaggtcctctggggttggactgagacatttcgcctccagtaggtctaaagttggcattgcatggccgcaccacttcgtggacaagattgaggcatgttattgtggacgattcagatattactctagcctaaccttaaggttctcagctcatttggcattacgcttatacaagggagcatctcaatatccgtgtaaaaggtcatttagaacttcttgcatgtatgcaattgtttcttccaacctttggtttttccaccttaggtaattcattgcctccacaatactgagtaaaaccatttttctttgtcgggtcagtgatgcgatgtacttggatcttgtgggactcatagtagggggtaccatatcaaagatggacaatattgtggccttcaattgtttctggtgagggttgttagcaagacactagccccgaatttcgtgtctatatgtacttccatcacctgggcttagttttcttccccgatgactggagttataggtgtaacacctgctaatgggtcctttatattggttgtaatcattaaggttgtttcctcccccactttctccatcgagatgttttccatggtgccctccgtctaggatgacctcgccttcttcttcgtcatacactacaacaattaaacccaatagcggcggagttat

SEQ ID NO: 121672 - DNA, 1306 bp, Cannabis sativa
  modified_base (1230)..(1266): a, c, t, g, unknown or other
ctgtaatcaatcgttgcttcagctcttgaaaacttgcttcacactagtctatccatataaactgttgatttttcttagttaactctattaagggcattgagatcttgaaaaacccttctacaaattggtggtaatacccaactaaacgcacaaaacttctaacttcagtgattgtctttggccttggccaatccctgacgaattcaatcttttccagatcaaccatgatcccatctctactaaacaatgtgccctagaaatgacacttgaggtaaacaaaattaacacttcttaaatttggcataaagtttatgttcacgtagtcattgtaaaaccattcgtagatgttcctcgtgctccacttctgattgagagtacaccaagatatcatcgataaatactatgacacatatatctaggaaaaccttgaataccctattcattagatccataaaagattctagagcattaattagtccaaaagacataaccaagaattcatatagtggccatacctagtaagaaaggcagtctttgaaatgtcctcctctcagattctcaactaatgatagcctgagtgaagatcaatcttagagaagactgtcttttcctgaagttgatcaaaaatatcatcgatcctaggcagagggtacttgttcttgattgtcaacttgttcagttcttgtaagtcaatacacatgtgaagtggtccatcttctcttgaacaaacaacaccagagctccccatggtgacacactgggtcgggttaaccctaagtcaagcatcccctgaagttgtatcttaattccttgagttcagtgggagccattctatagggttcctttgaaactggctccactccaagtactaagtcaatcacaaaatctatttctcgatgaaattgtaaccctaaaagttcttctggaaatacatctaagaactcttgtaccactttaatatcttctggccaaattgactcgggtggtgtgataaccctaagcatccctcctgcaaaaaatctctagccttcaacatcgagattattggaatttaagaaccctgaactgaccctcacaaatacaaagggctcttcatcctcaggttgaaagatcaccatcttctgcttacaatcaatactagcagcgtacttggacaagaaatagtataatatcaaattctgctataaccaattctactaggtcatcactcaactgttgggttttatgccnnnnnnnnnnnnnnnnnnnnnnnnnnnnnnnnnnnnnattaatatagatcagaaatgacatttaatgttgcatggtt

SEQ ID NO: 121673 - DNA, 1905 bp, Cannabis sativa
  modified_base (32)..(62): a, c, t, g, unknown or other
tttagaaagttcttatttaggatgttaataannnnnnnnnnnnnnnnnnnnnnnnnnnnnnnaaaataatttccaacactcaaatccttttcttcttattcattacaagtacttgcaaaacaattcataatcagattaagattaacaaacttaatctaaatgataactccctatatttctatgacaatgttaattaatcattaagaagacattaaacataacaactccgaaaattaaacaaataatttagatactttcattctaaattgaatttgcacccaaacaatcacagcatatcaaattttactttttagatttcaatttgattcatagataaaaattataagtggtcaataaataattgcaaagataaaacaaattgtaaagaattaaataagagatgaagaagaaaataaatactacattagtccataaaagtggttcaagagaatcacataacaaccctaaaagagatttagccaataacaatcatcttaaacatccaaagattaaattaataacataaaagatatagaagatgagaaagaatactaattggagtcctccaatggagttttctatgcttccagtggtcctccttttattttccttcaatgtctagaaaattcgaatatattatgaaaatctagcctccactcgtttgtaggtcaaaaaaaggaaattgtacaaaatagtcaagagtcgcgacctttgatagagagtcgcggctcttgaatttttttacaaagacgagatttttcaatttttccaaaggttgcggctcttgctcaattttacaaaattatggcaattctaaaatcctattgcaatgaatggtgatgttttggtcataactctctcaatatagcttagaattagacgattcaaaatgtttgaaaagctaaaagagagatctagaacttttatcctgaatatttttcctagaagttagcgaatcatagtcaaaattatcttgaagatttatgctttattttcaatcacaaatggagcgttttgagcatcaaaaacataaaaattttaacccattgtatcttacaactccaaaattcatgctaaacacctaaaattcatcatatttagcatattttctctcatttcaactcatatgatgtattttaccattaaaactttaaataagcataaacctgaataataaaacataaaagtactaaaaacacatactaaaatagactttaaaaattcataaaaataaacataacatgttactctgtagatgtagatacatatagttagtagtagtatatattgatatattaaaattatattgttgtctagttgattttttattgttttaattatatattaccaactatattatatatcacatttttatttttttaatcaattattatatcgcattttatctttttaattatatattatccattatattatttctattattaaccattcattaaatttctaaaaaaataaatcatcgtttcaaccatcactaactccaaaagaaagagaaaaaagaaagttgaaaaatatgaagttgtaacaaataaatttcataaagaaaataacacaatagtacaaaaagataattaagttgtgaaaaattaagaaaaaaaaatttataatacaaaaacaagctgaggagttgatattaatttgtatatttcaaaaaggttgatgtttagctatttgttttgctgctttatagttgtcttttttttgttgttttagagttgttttcttgttgttatctaggtattttataattgtttttttttttgtttttgagttatttttctaggttttttcagttttaattaaaaaaagtaacaatattacaaaaatacttctagctggccaaataaacaaatatatagcccaaaataaaaaaattacataaat

SEQ ID NO: 121674 - DNA, 4111 bp, Cannabis sativa
  modified_base (3826)..(3830): a, c, t, g, unknown or other
tggaactcttttttttgactagtaataccaattcaaagccacacttgatgaatcaccaaactgctgtaagtacaattaaaaaaaattgagaatgactctccactccactttcatacaacaaacacaagaaagagtttgtatgattaaatcgactaagtctgtccaaggtagacaaacggctcttcaaggctaaccaacttatgaacttgtgtttaggagtgtaaaatctatcccaaatgccaccataatgccatctaacaatacttccatgtggcatcttggcatacattttagctatggaaaactgatgattgctaaagtcattttgggagaagacttgttttatcctttcattagtttgaactattcttttccaataccaactagcctccaaaaggacttagtagtcccaccaatcttgatttttgagatacacctcgttaacccattttacccaaaggttgtccttcttggtagtaatagcccacacatgtttacaaataacacaaagattccataaagctatatctttgaagcccaagccaccatctttcttatgtttacaaagatcatcccacgcaacattcccattacctttgctcatgtccactcccttccaaagttaagcatgacaaatctgtgtaatcttttgaaatatagcttttggtataataacaatttgggaccaataagtgttaatgaacaacaagacagagttgatgaggaccattcttcctgcataagaaaggttcatcgaacttcaagttttgattctggctgtcattttctccactaaacttcatagtctgctttagaaattctttttttagctaattgccatccaagatatttaaaaggtaaagagcttttttttcaaaaaccagacatatcaataatcctatccaaagaaagggagtccaaacctactccataaatagcagatttcccttcattagctttaagcccagatgtgttcaaaaataattgaaagcccctaagtagtaggagagcagacttgaaatctcccttgcaaaagagaagcaagtcatttgcaaaacataaatggctaagttttaagcccttacatctcgagtgaaaagcaaagtcacaaatcttggcaattttagccatgattcttaataagtactccatgcctatcacaaagaggagcggcgacattgggtccccttgataaagacccctcttagactggatatacccatataatgaaccattcaccataaaagagaagcgaggggcagtgacacaaatcataataagctccacaaacttctttgggaacataagagcttcaagcatttccttgagaaactctcaatccactatatcataagcctttcgcaaatcaattttgaaatgacaagcagatttagccgctttcctctcatagcctctaaccatatcttgacacaccatgatgttgtgcacaattttccttcctttgataaaactactcttgttttcagaaataatgttaggaagcacttctctcaatctgttgcaaatcatttttgtccccactttatagatcacattatagcaagcaattgatctataatcactgactcagggcacaccgtcttaggaacaagagtaatagtggcagcgttaatttcctttaacaacttaccagagttgagaaaagagataactgcattcgaaacatccttcccggttatatcccaagtgtctttaaagatggcactactaaaaccatcagggataggagctttttcatctgggattgagaaaaaagcatgcttaacatcagcttctgtataatcttgaatcaatttgacatcttgaaagtcaaaaataacaaccccttctctcacaatctacttgttcacctttgttctactagcattccttgtaccaagcaaagtctgctagaaatcaagaaaggcatgtatcactttatcttgctcctctacataattgcctctcatatctttgattgagtagatggtgttttgaactcttctttttcgaatactagcatgaaaaagttttgtgttgtcatcaccattctttatccaagctaacttctctttttgacttaagaagagtaaatagttctggtgagtctcattgtatcgcaatctagcctctttctccttcttcaataattcttcattaccatgttgatttaaagagcttcttgaaccgaaatcaactgtaacgcccgtatttaaaacttataaacctcaaaagctaattttattatattataattatataaccatataggtcgagatcccgagttaataaatacagttgaaaatcatattcactattataaaaccccttgacaaaatttttatttttacaattgataggcaactacaaaatataattcaaaatgttgaaagaccgaaaccctctaggttgcactgccgcgatatgtacaatcactgccaagccccaactcactgctcctccagcttaaattttcctttacctacacacaaggtagcaaactgatgagtcgacagactcagtaagatatacataacatatatgaaagcaatgctcttctgcctttatgcccaagccgacctgagctcatcaaccgagctcaccaaatggttaagaacgttcttaatggaagtacaaccacaatattatatgcacaaaagtaccaactctatacccgtgttggtagggtcttcactgtactttcaaaagttactaagtattgtaccacatgcacgacgtaccccctggtactcgtgttggtaacaccgtaactactctaaaatcctacactgtactaacacccttaaagttacatttccattagtgttagtagtgtaaataactaatacaagcatacattcagatatttatattatttatgctatcttagctcattccagattcaagcgtgctggtcgacttgaatggaaaatccctcgagctgaacgaaggtcctaagtcacattacacagttgaataaattactcgaataactattccgaaaccctagctcaaaaccaagggtaatcttaatgacacattcaatgtattattacccctaaatgctaagggaaaccaaactatgctcgaaaaataatatagattcagaaaagttgcaatttcggggtcctagcatgtaaaccggtaaattggttttatagacccaataaaaccgattgatcggtttgcaccagtaaaccctaaaaattgcacagctcgtccaaatcttctccaaatgcaaccatactttccagagcacctgaaaatacattctagaacaatttccacacaatagtaataagaaaaacacaacagaactcaacatgccattgttgagtcaagtttgagttccatgaactcaaacttgcccaacctcacaaatcaccaccaaaagcagtacaagcaatattgaaacatcatttgagacctacaaaagctaaccctaaacgaaacttaccaacacatactcaaattcatcaaaatcaaccctaaacctaacaaaaccttccaataacatcataaattcacaatagagcaagcttagggtttttccctcagatcaagccctcaaattccacttaataatccctaaaattgaaagaaaattcccccttgactgatggtccttgctggccgaacaaagatatatactaatattatcatacatgtttatgtaatagctatattagacttattttaaaacattatatattacttaatggttacatttttattgtaaccatgatggttacatttgttttaacctataatagcaagttatcaataagtaaaattttatttttttagaattaaattaattataatnnnnnattttcttaaaataattaatttttaatttaaatattaaacaaaatctaatttaggaattaatatttataaatagttttatttttatatttaaatccctattataatttttttacaatcaaaatatttaattataatatttacaataaaactttattttttataaatattagacttccacctcttataaaataaatttttgaataattaattagtttttaaaaaagatatttaattattttttgcagaaccgcttgacccatctttttcctttttttttttt

SEQ ID NO: 121675 - DNA, 1077 bp, Cannabis sativa
  modified_base (1027)..(1050): a, c, t, g, unknown or other
aataatcccaaacagatgaggttaactggattagttatccagacttctaacatgcccaaacaaaacaaattagcttgtctaatccaatccagtcctgcgtaccaaacgggccctttagggtttgggtctgctaatgttatcccgaatattagtcggatgatgtagtaggttcttttcggtgacacatatctccacattgagatcaggacaaacaaaaatgtctcaaggatcgaccgctcaaggtgtatacagggtcaatcgaagtaaaagacggactaagtataattagttgcataacatcaacatgaacaggcatggtgggatgaaaatagtacgagacgcatacgagccgaccggggaaaagatgcgtgacataaataaattcaataaagcttcccatttattgtgcaataattgaaacccaactagttttttaatattttaggaagaagagttgatttccgaaattagtacggtgacaactttagggaattgaagtctattttaaatatcctctataaatagtagatcaatgttactctaagaggatctgaaattatttgtttgagagcctatatgctgctcattttcttgtaaagctttcgagagagaataattctttttgcttctccacttacaagttaaatacaataataaggagagtaagctattaccaaaagaatgggtgttggacctctataacatatcgtgttcttgattttattgcatattatttatatctttcttaaattttatagacttcttgtcgctttaaggattcagtttcgttgaccaaaagcaaggtcaacattgtgatgctttcattgagagctgagaactcaagaacacaatctgattggtttattcaataaagagcacaaatagttgtacaaactcgaagaactcaagccacagaccctgtagatccgatggaaattgatctaaatgcccagaatcctgctaatccaagaaaccctcacgtggttgatccgagtacccaaaacactgttggaattaattttaccannnnnnnnnnnnnnnnnnnnnnnntgttgtttaacaccctaaatataaact

SEQ ID NO: 121676 - DNA, 1071 bp, Cannabis sativa
ggtacagtgatcagttcatcaccagtattacttattaatgcctctttgatttcattgaaattcttttcaaaaaatttagacgacaacaacttaattggaacgacatatcgtttttgttcttcgccaatgaaaatggagatgaactttgttgttgtgtgatgcttcttgtactttaactttgccatcaatcgttggaagaattgagccattgctaataaactctctgctttggaaagaattttaaaattaagaatgggtgtgtacgttgtgaaatcaaaaatgtgtatgtgtggtatatataaagaatggtagttgatattagaatgttagtaggattaggatttagggttcgatagatattattaaatttgaacgttactaggattaggatttaagagtctatagatattatattagaacttgagttagaagtaattaggatcaaattatctttatttattttctgaatactcaatttatctttattatgtagtaggttattaagatttcaacttaaatacattgcaaaaaaaaaaaaaaaaaaaaattccactcaaagatttccatatattatgaatcgaaaaaaaaggcaagttgatatttttcaataaattacattcgtcaaattctttgctaatgaaattgaatggtcgatgattatttttgttgcattgattggtcgataattaagtacatttaaaattgcaaaatatttctctttgctattattaatttttttaaaagccttttgttattataattcatcaaattcttaaaatcacaataatacttttttaattaattttctgtttttaaaattgaaaaaagtgaaaaatattttttaaaaacatgttttataaatctgctttcacttttcaatttttaattcaaaatcaaaattttaaaaattttaaaaacaaaaaaaatcattttcattatttttaatttttttttaatcaatgtttcagactatgaccaaactcagctctgacttatactcgacttaaataaaatcaaaaagtaaaataaaaataaattttatagaacacacttttgttttttgtttttaaa

SEQ ID NO: 121677 - DNA, 1145 bp, Cannabis sativa
  modified_base (100)..(102): a, c, t, g, unknown or other
aaaatgcattcaaaattcaaatataacaacataaatgattatttaaatatctataaataattttcataattaaatcttaattatctgctaatttccaaannnaactaagcggtctttacatacatattgatattatgcattattagacatacatattacacaaaattaaaacaaatattttatggaggctaagaaattgtttggcattataatttaaaatctatttttactttttaaaaataaaaaataagttttaaaaataaatagaagttgtttggctaagttttttaaaagccgagttttaaaaaattagaaaacaaaaaatatcaaaaatgtaattttcaattttaaaaaataatttttttgtctaacatattatatttgtatttttgctcacatacacataccctagacccgggacctgggacctgggaccccggacccaagacacaggaccctagaccgggacctcaaacccggaccctagacttggaccagcctcaaacccgaacccaagccaagatcagaacctggacccgaacctggacctgacccgcagacctaaacatcagaccctggatcctagatcccgaccccagaccatgacccgaactcagactctggacacggaacctaacctcgaccccaacctagaccaggaccccgaaccccagatgttggacctagatcggacccggtccctgtccccagagccagaacctgaacccgaaccagatctaggtcctaactgagtttgagtctgggtttagggtctaggaccgagtctggggtctggagttcaggtttgggttcaagtttgagtctgagatttggttcgggttagacgggttcatgtcatggtatggtgtatgttatcccaatttttgtcgacctgaagtggcatgtcttcgtggccaatatcagtgccacgtggcagtatagctcgccaataagaaggccaagtcatatacttagcactttaaccaatgaggagtccgaacattcaagcgggatgacgaatgataaaccagccatctcaaagaggttgtccggccacccctggccggccctattgccaacataggctggctaggttatggatatcatggggcctgccagcatgctgttggaatatgttttaccag

SEQ ID NO: 121678 - DNA, 1015 bp, Cannabis sativa
tatatcaatgtaaatttgtctattaataaaataagcacgtggaaaaagtaggtagagtgtggaattctttttatataaaaatattcaagtgtagcacatatacatgtatgtatataataaatgttgtgtacaaatatataaataatagattagggaaaattaggtgctaattaagtattaattaccattaatattgcaggtagaagaagtggaggagaaggtggaatctttcctagaagggtctgtccaagaaaatgaagccgaaaaagaagagacaaagacaataaagagtagtactggtgctgatgatgaagatgatcaaccaaaaaaatagtactactaataatattaccacatgatcatgattgatcgagatatatatggtcaacaattaatgatcttacttgaaatatatttctttcaccaaatcattgtttgttgctcttctgttatatattctttttcttattctttcttattattttaatttagttttgtttccctttaatgaatattcattatttcattcttcctagattaaatgtgcgtttctgatcgggctgatcaagtttttgaagtggtatgtatacattaattagagtgaaaataatgctgcaaaattaaaaatatatattaatacatataatataggccatctcaaactttagaggggccaaggaatttttcaattaatatcaatatatataattaataaattacatataagaataatcttacactttttttttatattaggcgaggagatcctaatttggcaccttatgagaaaatatatgaaactactaagtaatgtttataatcataatattttgggttgagatgcaaaataaccttaaatttggaaactaagttagtaaatgtctacttttttaaaaaattaagaaaatggtcaaatctagtaagtttttttttgaaacaaagattgcaactttcattaaagcaaatcagctaacaaaatagcttccaaaccagaagggacagaccccctactgga

SEQ ID NO: 121679 - DNA, 1029 bp, Cannabis sativa
  modified_base (926)..(928): a, c, t, g, unknown or other
  modified_base (974)..(981): a, c, t, g, unknown or other
gaaggcgagattcatttctctagtcttgcagaatccaagacccccatgggacatagtgaggcaaagcttatcccaagcttttagatacaaaccatggttacccttttcagacccccaccagaaatcatgaactattgcatcaatcttagcaacgagacggttagagagcttagtcgttagcaaggtatacataggcaaggataaggccacagactttatgagagcggcatgaccaactttagatagagtcttagctttccatccttggagtttagacgtgaaatttttgataatgaaattgaagtcggcatccttttgtttggagcgaaagagaggtaaccttaagtatttaatgttaccttcaggggacccaattcccagcaccaacttaataccttttttcatgccattagaagtatttttactaaagaggatcaatgttttaagtttattgacttgctgacccgaccaagcacaaagcctctcaatgcattgccagcagcctttaacttattccaaatttgcctttccaaccaagattaaatcatctgcaaagaaaatgtgagaaattatggggcctcccctactaagcctaataccctttataaaacctttacattgggcatcgatcaaaagtctagacaaaatttttgcaacccagatgaacaagtaaggagacaaggggtcaccctgacgaaggccacatgagggcataatcttaccaaattgacctccattaaggcaaatgttgagagaggtagtagtgatacactgggatatccaacctcaaaacttttgcggtgccccaaacccaataagcacatggtcaataaaattctagcttagtttatcataatctttcactagattaatttttaaggtgaagctaccttcttggcctctttttgttggattttatgccctannnaaaacttatttcaatataatcagacttacttattaatatagatcannnnnnnnatttaatgttgcatggttcacatcatttatttcatgatcatatgtaca

SEQ ID NO: 121680 - DNA, 966 bp, Cannabis sativa
  modified_base (26)..(46): a, c, t, g, unknown or other
ttaaggtgttaatcaacatacttgtnnnnnnnnnnnnnnnnnnnnnaaaataatttccaacatatacatgcttaaaaacaagtttgatgtccaaactataatacctaattttttcaacatggtttgcactcaattctcaaccaacattaaagcagtctgatcgaataatgctaaagaactaaacttataaacgttttttgcctcaaaaggcatcacacattacaattcatgtgtggaaagaccacaacaaaactcggttgttgaaagaaaacgccaacatattttaaatgtagctcaagctctaggtttccaatctaatttacctttggtaattggtatattggccctatctagttcaaactgctattatcttatcaatagaacaccttccaagttgttcaaaggcctcacttcttatgaaacatttcataatactgctctccattatgatcatttaagaagctttggttgtttagcctatggctccactctcccttccaaaagacacaaatttagaccaagaagtagagcctctatttttattggctatccacaaggtatgaaggcttatatgcttatggatattgagataaaacaaacttatgtctctggggatgttgttttctatgaacatatcttccctttattttccctaacatccccctttgagattaacaatttgtttcctcacactgtgcttcccactgttagacctgtgcaggagactcacaggccaataaccaccaatttcatgatcattcctgcatctaaactagttaaagttgatccccatctcagccagccaagttctccatctactaaacctgaccaaattcaatcaacaccagttcccactgatgctactgttagaatatattttaccaggatttagatttactgacaagtatgtttattaacatcctaaatatgaatttctaaaagaatgaaatttaaacacatataaag

SEQ ID NO: 121681 - DNA, 1644 bp, Cannabis sativa
tctgtttaggatgttaataacatacagtaactctagatcctggtaaaataattccaacactttttatatatcacgaattctctccagaattttgagcggatgttctctctctaagcataataccttaaccaacatcctataaacaagctcccaaataaaaaatttggataatgctatggacaccgaaataggtgctctcgaaaaaattgtacttggattgttgtcccattaccatcaaaccagcatgtaattgacaataaatggatctataaaaagaaatacaatcctgatggttctgtccaatgttacaagcatgcttagtcaccaaaggatacacccaactaccaggcatagactactttgatacttatgccatagtggccaaatttaacacttttaaactcatgtttgccttggctgctatccatgaatggaactcacaccatatggacatcaacaaagcatttctatatggggacttgaatgaagaagtttaaatgaaacttccccaaggctacacacccaaagaccacattctacataatgttattcgcaaattgcagaaaagcatatatggtctcaaacaatattctcgggaatggtatgctaaactgagttctacacttttatagcaaaaacttctttcagtccccaaatgaccactcactatttatatgaaattaatcaggcgtcttcatggctttactcatatacgttgatgacatggtttttgctgccaacaacacatctgcattacaaaactttatcaccacactcaatgcaagattcaaattaaaagaccttggtacacttcatttcttccttggtctcgggatagcccgttgtcccaaaggcatattcgtatcacaaagaccttttacactcatactgttgcaagactaaggttttcttggttcaaaattggttttcgcccccatggaaccaaacattaaactaagtagtgactcgggggaatttctccaaaatcccacagaatgtaggagtctcataagaaaactcctttacctcacaattacacggcctgatatcagttttaccgtgaataaacttagtcaatatctccaatcccctcaactaccacacttgcaagatgccactagaatactatactacctacaatattctccaggttagggccttttcttctatgcttcttcaccaaccttgatacaactccaagccttcacagatgctgattaaggagcatgtcttgacacaagatgatcaataataggctactatgtcttcctaggctgctcaatcatctcgtggaagtcaaagaaacaacaaatagtatcgcgatcctcagctgaagcagagtatcaagcaatggcgcatgccacttgtgaactcatggctcacttccatcatcggagatttcaacgtcaacatcaagcttctttcaactctatattgtgacaacaacgctgctatacatatatttgaaaatcttgtatatcacgaaagaacaaaacacgttgagatagattgccacattttccaagaaaaagtcactaatagtgttctccgaatgaatcatgtgttaggatttataaaacactcaagaaatatatatattacaaatctaaatatattcctaaaagtgctttaatatagaaaacc

SEQ ID NO: 121682 - DNA, 1741 bp, Cannabis sativa
ataatataatatggaagcaaagaagaacaatctttaattagccatgaatgagacttgggttttgtttagttgatatataaactaagaaataaaaaagaattattgccttcaagtgggtgtttgaaagaaatcaagaaataatatatagatttgtcactaaatttggcactaaaaattatcagtgtgaactgtagaataaatttagagattgtgcttcaatgagaatcccatgaacactaataaatctttctatatttgttatgttattattattgcttgaattggtttcttagttgttaattatgatactaatttctgaatatttttctgttgtagagtgcctatttattgattcattattagtattaaaatggtgagaagaagtgcaatgtgatcattttttagaaatattaagtaaacaaaagaaatgtacgaaaatacagaacatcaaaaaattatactatattggtttggtttggccaataccattcaaaatttagagtatgacctatattatatccagttccaagtttttcaactatgtcagaatcagaatcatgattacaagtctgtacatgtacaactttctcatacattaacacaacttactagctctttaagacttacagtccaagtaataagcctcatcatagtattatcgttgtcactcgagatggtactaataaagcttcaaagactttttaacatgcttcttcaaaaggcatgacgaaaaggggctgatgatacgtacattctttgtcaacttaccctcaattctgtacaaacccctcacttgctgaagatggtaatactaaagcttcggagactgtttatatgctttttggagaggcataacaaaaggggattgaagatgtcctctgtccttcttaacttatcttcgtcatccaattctgtacaactttctcaaacttcctcatgtactttttgactgaatgtcattcttaaaaagaggaacaaatggttatgataagagaggggggctgtactcggtagagctgcctacataccttttctcagggatcaagcccagatgtagttctgtctcccagcatgagtatttgttagaagtagtgtgtggagtcataagaccgttaaacaaaataaatgtaaagagaattgaacagtagtttgctctctaaaccttagatgcatagcttgctctctaatttctgtccaagattatagcccaagtaaatgacaattatttagggaatagacaaaatcaatccatgacaagtacacaccctgatatcaattttggtcagaggttttcaatagaattcataatcatgttatgatcttgttatttaaactttaaacgagagaatagaggactttctcatataactaagtaaccaaaaatgacaagaataacatatatatataatgtatatgtgaacaacaaaccagagttgaaaggtagattaacaaacgagagataaatattaattgcaacatagcgaaagagtaagataaaggtccaaaatgggtacacttcatataacatcatcaaatcaaatcaaatcattcctatgtgaagctccctttattcactcactcctgcataacaaatcaataattctaatattgatcagcttcatcaaaataaacattataaaaggataagtcctagtaacatgaagcaatgttatagatatgttacataaattattatgataccttttctatttcttggaaatgaagagatatccacccaaca

SEQ ID NO: 121683 - DNA, 539 bp, Cannabis sativa
  modified_base (454)..(479): a, c, t, g, unknown or other
tttttattataactctattatgtgatcaattatgaattattcctgtcggacattatttttatctataaatttcttgattgattgtagtttcagtacgagcaaccaatgaagagcatgcctagaagaagatacgaaaaaagaggaagagaggaatacaattgtatcgattcaatcagaagggaaaatacagagtaagtgagtatatatataataagctcactagatagtagtaattagttacagcagaaactgactaactaacaactctaacagctcactaataacaacaagtgacagctcactaattctaagacactcttaatatattccggcccgcttgttgaatgaatattttgcaattccatcttgtctttgagtgtctgaaactgtgttggaatgggaatttgctgttgtggacgttgtcccacatagaataatgttggaaattattttnnnnnnnnnnnnnnnnnnnnnnnnnntatgttgattaacaccctaaataagaactttctaaatcgatgaaataaacacatataaag

SEQ ID NO: 121684 - DNA, 1004 bp, Cannabis sativa
  modified_base (953)..(957): a, c, t, g, unknown or other
taaaagttacttttaccaccataaaactgtctgataaaagtaacatttcttgtactactattgcaccaacaaagcttttacaaccactaatatcaaaccacactcccaaaagagaggtcaaaaaccaaacaagagagtaaaaaactatacatgtaaagctgtcatccaatccctatcatcattagtaatttttcaataagtaaaattttgaactctataacaaatatcttgctgaattcttttttctacaaactgctttcaaaacttaaaaagtcccaaagagcctcattccgcagtctccaaatacggtagactagcattgccaaagtcattgtatatacctgccgtttgaaattagtcaaaccttttctatggctcaaccctctaaataatcccccaacattcgtattttgagttttccgacccaaccaagagttcacaagcctaagacactcttgactaaaaatgcaagagaagaaaagatgagaaacatgttctcggtgcccacaaatcatacaatttgggttggtagtaattccaaactaagccaatctagagcatgttttcaatctttccaaacgagctaaaaagcatgcatgcttgagaatggggatgaaagttatattgacgacatgcttaacaaatgcaagttggacgagaagtgatgtttttccaatgtcggacgggtgagtaacacgtaagaacctacccttgggaggggaataacagctggaaacgactgctaataccccgtaagctgagaagcaaaaggaggaatctgtccgaagaggagctagcttctgattagctactttgtgaggcaataacatagcaaggcgatgatcagtagctggtccgagaggatgatcagccacactcagacccaactttctctagaagagatgagaacactacaaaaaataactacctttttagtgacaactttttagtcnnnnnataatttttttgtgactaaatgtaccttttagtcacaacaaaaattt

SEQ ID NO: 121685 - DNA, 2228 bp, Cannabis sativa
aaggaccgatatgaataaagttatctttattaacacgccatttatcataaagacctaattcatgtcatatcataacaatgatcaatagtagatcggcttaaatcgtttatattcatgttattagtttctttgattcattcattaaagtttctcagagaagataatttttacaacttctattttggaaatctaataatgtcgatggatgggaacatgatctacaattatgaaatcttgactttcctaactaatcgaatattagttccctttatgtgttaattctagtattggaaagttgcacgtaaatttagatgggatctaaattatacttccactagtgaattgatggtactaaaggataaagaagtaactagaagggtaaaatgataatttgaccaaaactaattacgaactaacatatatggagggctaattactctaattactggaattaattatatcaatggcactgcagtaaaatttagtaaatataatttaataattactaagagtcaatttcatatttatagtggagtaatcatggaactaataaacaaagattatttggttgatgagactatcgccactttgaaacactattaaggttaggaatgaagagttgtataatatcgttaaaaaaaaatctattttgaattgaaaaaatagtaattatttatttttgtaataaataaataatttttcaaattaattaaatagaaaaaatacaaaaattgttaagacaaaatctgtcaagacaagatttgtcgagacaaaagttatcaggacaaaagacaccaattttgtcctaaacaacaaggtaggcgctagcttatgtactgtttgggttaattaattatttaattaattcaactaggtaaataaaagtgattatagatatttcaaggttgttgagatattctctcaagtagttgagagattacctcatatatatcaataatcgaatttagttatagatatttacttatttaaataattaaatataatttaattaatggaatttaactactataaataaaagtctgatttgagaaatcagaacatcactttacactgtaattttcgaaattaagagtagaaaagaaaatatttttctctctcaaagtgttcttgctcatgtgttgacaaatcaataagaacaacattatacactttatcctaatagctcacactattttttgtgtgcggtggatcaatttggaagacactagtgcgagtcctattgcatcatcctcatcatctggattaagggatacaatatacaagaagttttgaggttaccctgatagtcttcaagaggtatatgttctaaacttactatttattgttttgatttaatgtacacacatgcagttttatcttttttactttttgtttatacattcgttggccgctaccacttatgaaacggtacgaagttaatcaatcggtaatacccacgtataatataattatttaaaaatgtcttcaaattgtaatgaaattttgaataacttagtagtgtaatgaaaacaaggctcaaatgacttgtaggcttttcttttcaaaaaaaaattgtatactatcatataaatcaaatggaatagaaatgtatggatattgtaaaatataaataaataaaggattacctactagtggtgcaactcaaccacttgaggctagctcaagtggctatagggggtgcgtgtgtattggaggttctgggttcgagtctcaggttatgctgatgtaatatataaacgcttaaataaaaaaaaaaaaactatagaagatattagattcaatgatttttttttgtctaattctatttaattttaataatacaataattgtcaatgtactaaatcttatctccttaattttgatatctacgaagtcatgcctccaaatctttacatgtaccaaattgtattttctaaactttcattcatgtcagattttcgttaataaaattaaacaaaaataattggaagaacttttaacagcttaacaagttgaaaaaatgcgacaaaaattataattatccttactaaatactaaagaaacactgttaacaaaataaatctctatattttatggagtttttacaaaaatattggattttggataaaagtttataaatttaccgtcacacgattttttttcttcaaaaatactatcttttttataaaacaatcgtaaaacaactaaacagaacaattaaaacaaca

SEQ ID NO: 121686 - DNA, 1605 bp, Cannabis sativa
  modified_base (40)..(42): a, c, t, g, unknown or other
aagtaacattttgttgtgagtaaaagtcacatttagtcannnaaaaattatgttgtaactaaaaagttgtcactaaaagtaacagttttttgtagtgatgaatagtaaataagatcctggtaaaacaagttttcccataaatccatgctgcacgcgcccattgatgaaagtaatcttcacgagccaaagaaataatgccaaatgttgcttcatttcaaaaaactagaatttttcaaccacaaatagtctacctagaattcaataaggtttccacctgtttaagcatccacctgtgatctagccatttggaaggagaatgcaagcctttgaaaccctttgagttttgaaagcttagggagtaaatgttattcacattttcggttgaggacacatgaaattctcagatgattcaatataattacagcatgcccaactgaaggcccaatcaaggtaatggaccagatccattaccaaagtcaactcttccagatgctagacatactttttttccagaaaagatggttctccagcacaatatgcgtccggataacgtcaagaagagtgcccagatgagtagtaaaagggcacttggatatgtaactatgtatcgcattcattaattatcagatcccacaatatcaaaacttaattcgaaagatcgtgtccaagaatcatatttttgaatattgaaataaagtatgtcaataatcaagcatttatgtatctttattatcctgaaaagtaggacacaatttgacaactatgaacatgatgtggcatccacattagtgtataatcaatgcctcatgagccgtgcttcgttaaatgagcccaaagtcaatgtattatctgaatttaccccatcagtgggcaatgggtacatactagaaccctagcactataaatagaagaaaactcattcatgtaaaggggttggaatctcattacttgagtgctaaggcaaattctagaatccacttgtgtaaatcaataagactttttcagtcttatcataatgatattgactcatgaactagatgtcattaatctttgaaccacataaaaactctcatttcattattcgtttattatatttcattaacttcattatattttattagtttttaaaaatctcgataaacaataaaaaaataggtatactaggttcaatttttttttatatttatttatttattaattataatataaattaaatttgaaaaaatattaaaaataaagagaaaacagataaagatttttggggttttagacggccacctcactacactttaatcctaaataattttatttttatttgtttttaaattagtatagattgaatttaagaaaatattaaaaaaaaaaaactagataaatatatttggagatatttaaactaccacctcaccccctagatatagttattaatttaaaatctcgtactataatagtgtaattttgtctaggataaaatgatctgcagcccaaaatactatgagcatgtttggcatgcatactaaaaaacagttttttgtgttttaaaacaaaaaactatttttaaaaacaaggtacatgtttggccaaaaattttaaaatcaatttttt

SEQ ID NO: 121687 - DNA, 762 bp, Cannabis sativa
aacacttccttcataaaaaatgtagctcttttcttaagctttaaaacgagataaagatctttttaaaatgaatcaaaattgagaaagatattgaattttaactaaagatactttttctgaaacaaaacttaaaacgagatatatcttaactgagtattagaacagagaaagtgaattgaattgttttattattctgtgtagaattgtacaaaatgaaatggtacaatgaggagccttatataggcagagtagtaaatcaatagagctaaacagataactaacataaccgacatataacaactaacttacttttataacaaattcttgataggccccttcaagatggattatacaagttttgtaaacccatcttggatacaatggtcttaaaatgatttgggaatagaggttttgttaggatatcgactaagtttgttgtggaagagacatggtgtgtagctgttatttttacagtctgatcaaggcgtgactctagtgatgctcagtgagtaactctagaagggtctagtgacccactatgaagggtcactaaatattgtttttccagtcacccacattagtgacacgcagtgaagtgtcactaaaatattttagagtcactcaatgtgtgtcactgaaactcgtttttgtagtagtgtttagtcacaacacaggaatgatgatatataattagtcacaacttttttacttttaatcacaagttttgttatgactaaaacactacaaaaaacagctactttt

SEQ ID NO: 121688 - DNA, 885 bp, Cannabis sativa
tatatatatatatatatagagacaaaaagaaattactgtagttttttcttttttctaaatatatatagaggcaaaagcaaaggatggaatagatgaggaaattataaatattattaataaaaagaagagaatgtgaatgttgtcgtaagaagatggcactacctatatatatatttatagcttaacttcatctgatcgatctttattgaatcaatcaggtggttaattagaatattaattattattgttagagctatatatatagtgccatctttcctacgacaacactctcatacttcttgaattagaccatatgattttcttctaaattacccatctctctctctgtgtacatatagctctcatgtttatatatatatatatagctctctgtatatagtactctatgactataattaatttgtatatgtgtgtctcatgtaactaacaagaagtttctgctgagttaccatgaagttacgcgcacattatggtggacccatttaatattttaaaccaaaaaataaaagaaaaaatagctgagactacatagacactctcacaaactttctctcaaagactcactcaaactaccccattaaacatgctcttattggtttgtggtgggctttggccttgctgccgccccggttgctaagttataaatgatttaaaaaaggaaacttacaaaaatacatgaatttgggttaacttttattaaaatactgtcacacggaaaagttttcaaaaatactgtatttttataaaatacctggaaaacacaaagtagaacaactcaaaacaacagtagaacaactaaaaaacatcagtagaataccagtgaaaacttaacacagtatgttgcagtataaaacttataaaaaa

SEQ ID NO: 121689 - DNA, 962 bp, Cannabis sativa
cctcccccttcgaaccctaaggactagaagccccaaggagttttctccttcaattgtcttccttcagctggtcttgcaagaatttaaggctgctcaagcattcgggtaagtttcccttgtaattatttattgatttcttgagttttaggttagtatagattaggattttagaaatcttggggttgtaatgctagattgaggttagagtaagatttgagggttgtttttgactttgtttgagtttgtttgagtttgaatatgttagagatagggactgtttagcttgatttgagctagatgaggtttaatcttcacttgagtatgcaattttaaataaatggatgaattattgtaaattggtgcttgagtttcatagtatttgtactattatattgttctgggaagtttgaataggtttggaggagattcgtgtggtttctcggcaaagaaaattttttcccgtttctgttagctaagaaatcggttaaacgattttacaggtgctgtaaaatcggtcaaccgattttgctagcgggggaaaattttggtttaagcctcgaagctggtttttcactcgggttttttttttttctgaacctagattagggtaatttaccgatatttggattttccaaatctagtgggagttagatttctgattatggagattagggtttgattcttgagtttggataagttgtttatcgaattttgttgttgtggcataggacccgggattgtcgagcgtaattccactcaggttggcccgcacacctaatttctggattgagataagaaaagtgttatgcatcacttaaggttaagtgattgataattgtattgtatagtctcgattatgattgagatccagattaattatttattaagcctcagttatgactaagggttggaaacggtcattaccgttacgagtaattactcctgaaaccgcggataggttt

SEQ ID NO: 121690 - DNA, 1234 bp, Cannabis sativa
ctaagtatttttaccatatttaattaacttttttatatttaaactagttttaattatataatcatttattcatatccaaatagttattctaataaaacataatttaaatattactattcattataacaacaaaatatcttatttaataattatacatttattctctctttcatctaaatttcatcaacttagtgaaaaattctcaaaactgacaaatacagtaatgtaaattttaattgatttaaataacaattattgtaacatactgttaaataatattttaaataatatgaggatcatggacctataaaatcaagcttctaatatatttctcatgactctaacttattaattcctcgtgtctctattattgactcaaaactgcactccaaattttataaaacgctctatacataatatagatacgctataaattctttattatttctataataatcctctatagatagtctatagttaattggaacttaaaatttttgttttgccctttcgttatattttacttagttgacataatgatattttagtaaactaattttattactaaaatgagtactcaatcattaaacgcttcaactaacctcaaagaaaactgtcatttcacttctaatattatagaagatataaatattcatatttatgactaacattcctactcaattatgctaccgaattcgcaagatgtaagtatgagctagtccataagataaactagtaacgaacaagtcaaagaactcaaataatagaattatcttaaatcttaatcatgtcaggattcagatccaattgatctatgataaactaagtaatattgacttagaatatatataacggtaagattatgatatttactctactgtaaatatcggtccaatccaatataaatctacatattcgatatcaagtctattttatcaatgcctcgaaaaaaagcatatcacttgttttagtgcaaataaaatgcatcgttgattatcacgtcaatgtaaatatataaatctttaggcttaaatattcgaatcatatagtaacaattattttttactgtgaggatatcacaataattgtgaatagctatacattatggacttaatagaatttaaatattaagcatataatcacgtaaaataaaatgtgaactaagcaattgacataatcataagggtgcgtttagaaagccacattgtaattgaatttgtgtgtaattggaggt

SEQ ID NO: 121691 - DNA, 817 bp, Cannabis sativa
atttgtatatagtgttatgatatatactcaattataatttaattcaatatatataaacacttcttaacgtgtattactcattaatagttactaaatgaatttaactataactattaattataaaaatattaaaccattaaattttgatccaataacgaataataaaaaagaaatttaaatttttatacttaatttagctatttaattaaaaaaaatatcaaaaaaatatatctttttatactatatcaaaatatatttatataaaaatatttaaatcaaattcaactttttttaatctttttttgtgtcgagaaatttttttttttttaattttttttaacctatgggacaatcccattatagaagttggtacataaataataagaatataaaaatataaattaaaaataaaagaaagtaattattaagagattaatataataaagtgagattatgtaaaagaagaataaaataataatttattaaattataaaaaatgtaaaattattattattttaattgatttatttgaaaactctgtatttattatgatttataacataattaagttataaataaaataagattatagaagtcggtatataaataataagaatataaaaatataaattaaaaataaaagaaagtaattattaagaaattaatgtaataaaaatcgtactgaaattttactttttccattgaggataatcaatatatataaataaaggaaagcacaaaagatcttaggtggcatcttataattctctctttttatttttctaattttgtgaggctttcttatggttggtgaaga

SEQ ID NO: 121692 - DNA, 912 bp, Cannabis sativa
  modified_base (821)..(824): a, c, t, g, unknown or other
  modified_base (873)..(878): a, c, t, g, unknown or other
gtttaaaagcataaaaattaactctataccatagagttatcacacgaactttcattagcatggaaaaaaaagcagtctatcatctgcaaacagtagatgagaaatagggatagcacgcctagtttgaagccatagaggttgccaatttcttgttcatatgctgaaacaatcgtgacaaaccttcagagaaaattaaaaataggtacggagataaagggcatccttgtcttaatcctctagaaggggttagagcacctatcacttttccattaataagaaaggaaaagttgtttgttgttaagcatctcatgatcagcgatatccattcattacaaaatctcattttcttcataacttctatgaatctccattctacttgatcaaatgtcttgctcatgtctagctttaaagatgcaatactgttaccacccgaggtcttgtttttgatggcataaaccaattcaaaggccaccaaaatattgtctgttattaaacgatttggtaagaaagcacattgagtttcggagatcacttttggaataacttgcttatatcttgccacaaggattttagtaaccagcttggaaataacataacaaaggctgattggtctgaagtcttgcatttgttatgctttcttaaccttcgagataagggtgatgattgttcggttcaagcttgttgggtcagctccatcatttagaacacttaatacagctttaggcacaagatcccccacagttgaccgattgtgttgataaaacatagcaaacatatttctgtcaacaccggggctcaatcaagtggtatctcaatcatannnngtaagactatgaagaatccaatcaaccagaaggagaatcgggctcaagnnnnnnagaaagagatccaggttcagatcgtgataatgct

SEQ ID NO: 121693 - DNA, 585 bp, Cannabis sativa
aaatattgttatactattttatactactaaatcacattcacaggtcataattttttacccggcttaatctgaaaatcttcagtcatttattgttaaaaatgatagaaggaagaggaatatatattgatacattaatactttaggagtgttcaccaaaaaaaaaaaatactttaggagtggtgcaaaaatggaagtaattattaattagttgggaaataacatgcgtggaatcatagccacacacccacatggctcttgatggattggtgaaccaacagtggtaagtgctaacccaacctgggccacctggccatgtcgcttttagttgaaaaatatatgaatatgaattatatggtatcgttattatagagaaaagttttcaaaataattccatcaactaaattaatgtaaaaccctctaaactctaaactatatcttttctagcatttaatctctattttttttaaagcaaaatctcttaaatccgtgtttgattaatagtttaggtgccgtttggtaacacttttttttatcatttttctgtttttaaaattaaaaaagtgaaaatatttttcaaaaatatgt

SEQ ID NO: 121694 - DNA, 1750 bp, Cannabis sativa
attagaaaaatttaagtttttatggttaatttttcgatctaattagaaaaatctctcattttttacattgtatggattgtggttgttccaccgacttaaaaaaaagtaaaaaaaaaaattggtcaaaaaaagattaaagaaagttgagtttaatttaattattttgtatataaacacatatatttttgatatagtatataaaaaaagataatatttatgtatatttgcttaattaattagctaaattaagtatagaaatttaaaattttcttttagatcaaaatttattagtttaatattaaaaattaatacttataattaaatttatttagtaactattaatgagtaatatttattaaaaagtgtttcatatatatttatatatatatattagttatttgggtcctgacttgggtggaccttaagcacccgccagaacctctttagagcaactctaacagcagtatttttttaaaggtgctaaaaatctccatatcatctaaaaatataatattttattttatctctctttcacatcatttttgacactcttaaattttaaaaacattccaatgatataacacccttcaagaatactataattataattttcaatattattatttaatatattatttattttaaatttttaattataaatattatcacactacttatttatatttgatttttttttttaaaaaaaaaaaagatagtgtcaacgccatgtattagcatcaacacaactttctataatagcatctatctctaatagtatagtattcttgtattttgctaaataagcaatccacataaacaagtattctttaaaatttgaccatttgaccattggagatgctcttatgccttagggttagggagttagcactccatttgcactgcctagtgcctatgcgcaccacttgttgtcctcttcttactagtgctgtgctaggttaccaccccaccttttgcgacttatcaaatgtcaactgtacagttcaaacaagccatttttccattctaggtgattaagtaataagttaactagtttcttctgcaaaagaacataactactttagaaattaaaatgttatctatttatcattggatatggatatctcttggatttagcttaagctagtttacttgaactatggggaagaaattaaccttgactttgtttcatgtctagaagagttcatagtcaatttaatttactatcgccaccacttgaagaggctgctgcacatatacacaatatttccacattagagacctatataattaataccctaactgatatttcatcaatctttaacacgttctttctctgaaccattttttttgtttgtttgtttgtttgaaggagtgataagaatcacactacctatgacaatcttcgatgagaatcttctagtcaacgagctaattgtctagttaaaaatatgcaaagtcaggatctgagtcactacaaacaaagcgacttctatatataagacgaagttattatctcagaaatttaaacaaaacaatgtgagaccaccttcaagaggcatccaaaataaataattaattggacgaaagctacctacaaaataaatagatataaaatgtgaattaacacactatacaacgataatatagattatgaattttaaagggaaatttgattttctatgcttaaaaaatcctaaaattatatccctaaacctaaatgttataccataggcaatatatgactactttt

SEQ ID NO: 121695 - DNA, 4330 bp, Cannabis sativa
tataaataaataaaatttctatatatataacgctcatcaatcatctctctattacttatctaacactgtgtcccttcttttccggtatgacatgattatgaataaataataggaaaattattttatatattatcttttaacattttttttcaaatttacggtttgggttgtgcgggtggtttcttcagtggtttctacgtggcttgctatgtagattttgattgcgatttaggttgctccgttaatttttatgggatttttatgtaaattttcgtaaaattaatacataaaaaaaaaactattttaaagttcaaaaataaaaaaaaaaaaccctaaataatattgcaatcaaaaattaaagtaacaaacatttctaaatacattatactaaatttttttatagccaaaatattttgtgtctcttatatatcaccaaagtcatctataaatgaatttgtacattaaatttttcagtgatttcccaatgcaccctaacaaacaattatttaaatattcattttctataatttatcgacatgtcatatttttaattagtaaatgaatttattaaaaaagaagattagtggacttacgaaaatagtgtgtttaattattactgttattttttcaagttggagaattatcgacatcaaatttaaatttttggaaacttataatgtaacttttcctattaattaataatagctctctatattatatatgcctacacattccatacatgggctttgtttctatctatactcatgtccaattccatgtcctcattcaatattttgagctcctctaaggatttggttcgaacaaattcacttctcccaagaattttaaatgacatgtcatttcttcaatctcctagcaagcacatctgaagccaattgggggcattggaccaaaaaatctagttgatcttttattatatgaaaaaaaaattatagttttttttcttttgtatatatagtggtaaaaatttaaatgtactattttgaaaatataattagaggttttttttaataaaatatcaaatggagtattttaaaaaataaattagatcttttttaaaaaaaatagttattatctcaaaaattatcttgatggcgtagcataatgctatatgacatgtgtcaagcatagttagtaatgggtggatgaaagataaataaatagtctactcaaaaaaggccaaacaaaacatacacatacattacccatttgacatcgtatgagtaacattcggaacatgtcgtatgccttttcgggaagccaaaaagatattacgcaaaagaatatccagacgggaacaagctccccgtatggatcttctagatggatggaataatatgctttctagaagtacatttcggacttggacggatacccacttatagttccgtccagatcacttcagagtagttaagtttaaaccttcatatttaccatccgaccaggcctcgagccttgcactactccaagtagattaggcatgtcggacaagtgtcactttttaaatattaacatacactgagtaaatatcttcagatatactttcctcaaatatctccacgattatagtttatttagaatccctattttcgtgggatatgattatcaaactgagaaattcgtgagactttatgtataaattccttttccaaagattctctccctttattttttaaaaaaatatatatttaatattttgtaattaaatataaaaatgctagaaccacttccctataaatagtgagccctattcactaaaagagggaaggcttcttctgcctcaggcactaagaataaagagagaaatacttagaaatatttgtaagctttcgagaaagatcaataaatttacttgcttcttttctcacaagtaatacaacaaaaagggagcagcctattactgctgaaaggggtcgaacctctataaatttagtgtgtcattttctttacaaatgatcattattatcattattacaatcattcctatcactttaattgacttagtatcgttaggtaaaagcgagatcaacattttggtactttcattaggagtctaaaataccttcttgctctcctcaattttcgattctcaatccattggtgaatcaacatacaatggttcaaacaagaagagttgaatccactaatccacaaggtctgatggttattggtcccaatgttcaggtttctctgaacacatagaatcttaatcctattgcacggcttttgccccatagaagccaggacgaaactcgtattgtgctgaatcgtgcgttcgagcaacaacgacgtgaattcaaggagtggatagaccatcaaactcagatcatgcgtacccagcaagaagagataaaccaccactccagggatgctgctaacctgatcaggcaatttacccatcagactggaggcgaaatcaggaagcccagcaacaacagactagagtacgagcaggaaggatcatctagttccaggccccatgatcaaaccattgtctgcctagcgaataagcaagtttttcttggtcattaccatgggaggaatgaccagaccaacttctgacccggacttgaaagcatccttctgactcggacctaaaagcaaccttccgaatgactcaaactaaaggagaagtgatctagatggacatttcatccctccgcgtaataaccagccgatcaatgtggaaaactatgttcttctaaatagagataacctcgtgccctttaaggctccaaggggtcaacaggttgcacaggccgatcaacaagcagaccaagttgatcaagggatacaagcccaattagatcagtttaagagcctagtacaaagcttaaccggcccaaaactcactgacttggagctcaattggataaggggtttgtcatttactgcgcagatcaattcccttgaccttctgaccaagtttaaaatgttgacttagaagatgtacaccgagaaaaatgatccattatctcacatcaagtattttgagatgcagaccaatctccaaggcatcaagggaaatgtctgatgctgaatttttccagctactctatcaaataccgcccatcaatggtatttctgttgggatttatgccctaaaagcaagtaattaatggacattatattataaaatatatgaaatacaattacaagataaatgaatatactaattatagaagtataattaataaagatctaaaaattctttatttatatggagaaagtataatcatataagtatatacaagagaattaagattatacaatatgaataaaattagttgatagtgtattaaagtaaagagatcttttctatagaattactatgagaacggtttaatatacactatactctagtgtgtgtgatattaattcgaatcgcatatgtggatacacatgtagtaaaggtgttgtgtataatttgattatacatgactggactgatatgtaataacatctttcattaatatgttgtttaccatgaaagagttatttatatcaaaaggatgatcatgagtgatcagtcttaatcctgagtatacatgaacttctatttgtgttcattgagttctttaattcactcgttaaagtttctctgagaagatgattcttacaacttctattttggaagcttaataacacgagtggctgggaacatgttatgcaataatggaatccaagattttttaaaggatcgaatattagttctcttatagtattaattctaggagtgctaacagttggatccaaatctataataaattatagattaactgttcacattaaattaatggtacatatggaatcaagagataattagaagggtaaaacggtaattttgaccaactctaattataaactaataattgaagggaaaactacttatattaattatatcaatggattactagtaagaaatctataaatataattctatattatcaaggagtgcaattctatatttatagtaaagtaataatagaattaataaactggattattctattgatgagatcaataacaattaagtatttattgaagctttgaaatataagtcaatggtctccaagtcacctctatacaacactgtatatgggaaggttatttaatttgatgagaaattctgagtgagaatcaatttctatgagaaataatacttaagtggaaaatagttttttgtggaaattattattttgaataactacaacaattatgaattgtgtaattaaatagtatttgactatttatttttatttgataaaattatattaattagttaaatataatattattcttaaataat

SEQ ID NO: 121696 - DNA, 599 bp, Cannabis sativa
agtctgaagtaaaatgttggggaagcacgtaaagaccatttttaaccctccctttgagcaggacaatctctgtgagtttgtccttcaccaaacaatatttagaatggaattcaagaaagacgttgttatcattggttagttttaaaacactaactagatttttctttatttcggggactttaagaacagaattaagcttcaagggttgagaaatagtagggatagagtgattaccaacatgggttatgagaagtttcttaccattgctaactatgagagattcagttccagcatagggatgtttattttcgaggtgttcaatgccaagagcaatgtgattggtggcctttgtatcagcataccattcttgatcaatagcatagtcaagtagcatggatgaagagttagcttgaggctcctcagagtcatcaatttttgtcaagaatgcacgagaatcgccgacttttggtgtaacaaatcctttgtcgaatctgtattggcacatagtagcattgtggccaagtttatggaaattattttggtgtaacaaatcctttgtcgaatctgggtggaccacgatgttggaaattattttacca

SEQ ID NO: 121697 - DNA, 6272 bp, Cannabis sativa
  modified_base (2954)..(2956): a, c, t, g, unknown or other
aaattatgaaaattactaaatgacataaaatgcatttcaaaattcaataataacagcataataattatttaaatagctatgaataacttttccatgattaaacgtaattaactgttaaactaagcggtctttacaagaagttgagcttaaacctgcccagccaaaagctccctctgctagaacatccgtccagctccctcagtacccaagaaattcaagctcgggcagtaaacggtccaacaacaataacaacaaacaaggcaatgggaaaaagggaaagtttactggaaaaactgaacagacccctacggaaaatcctgccaagtttaccactttttctatcctgacagaagatttagagactatcttcattgctactgagtcattagctctatacaagaaacccgctcccatgaaaaaggacgtaagtaagagagacatgaccaagtttttccattttcatggagattatggccatgacaccaacggatgcaccaatctgaagcgggaaattaaatttttaataagaaagaataacatgcacgtgcaaaaatatgttaatcaagatttactgccaccaccggtggatgggcatttacaagtcattattggaggcccgcacataactagagattctggcaaagcccgggagaggtatgcccgaacattacagcatgagcaagaagaattggttgttgctgtcgaagaaaggaagccaaaaataccacaggcaggggaacccaccataacattcaatgatgaagatggtgtcaagattcatttcccacacaatgacgcgttggtcgtggaagtccagatagccaacaaaatggtggcccaaactatgatagataatggagcctctacaaatatgttgttcaagacacaatatgaaaagatcgggctccaacttaaagacttaacccactgtcttcagcccgtgtatggttactccagtcagagcgttgcacctctacggcaaattttcctacccctcactgttggacaagctcagaagagcataactgtaatggcacaattcttgatattagacgttccatcagcctttaatgtcatgttaggctgaccagctttataagacccaaaggctgttacgttgatatttcattctttcctcaagtttccaacaaagaatggggttgggttccctagaggaaatcagtaggttgcccgggaatgttacagccttgccctaaccaaggctaaaaaggaagtatcctctagtcagagttcagatatgggaaaaaacattgccaaatagggaaccgcccaagggggagatgaagatgtggatccccaacttggggaaccaaataccaatgttggtccagtggaagaactagaagaaatagaaatcgacccaaatgttccgaccaggaaactcaaaattggaaaaggtttgttgctcgaagtaaaatcagcattgataaaatttttgagagcaaacctggacatttttgcatggtcacatgaggatatggtcagaatcgatcacatatcttaaatattaatcctaatttctgacctgttcaacaaaaaagaagattgttggacaaagagcgagccctagcgctgaaagaagaggtggaaaagttgcgaaacaataattttataattgaaactttctacccggtctgggttgccagtcccgtattggtacccaagccgaacaagaaatgacaagtatgtattgatttcacgaacctcaacaaggcatacccaaaagactattttccactttcaagaatagatcaacttgtggacgcattagcggggcacgaaatattaagcttcatagacgcctattcggggtacaatcaaatcatgatgcatctactggacctagaacatacaaatttgttaatagatatgggtctatattgctataagatcatgccatttggtctcaaaaacggcggagctacataccaaagattagtaaacaagatgttcaaagaccagattggacaaaacatgaaagtgtacgtggatgacatgctaatcaaatctaggaaggttggggggcatatagatgacttggacgaatgcttcaaggtcctcaggaaatacaacatgaaacacaatcccctaaagtgctcctttagagtcagctcgggtaagtttctaggcttcatcgtcaatgcccaaggaattgaagccaatctagagaggattcaagccctggtggatatgaaatcaccaacaaaaaccaaggaatttcaaattttgactggacgtgttaccgcactcagcatatttttttcaatgtcaacaaacaagtgtgtcccattcttcaacatcctacgaggaaataagcaatttaagtggacagaggaatgtgaaaaagcattttaggagctaaaaatgcaactcgcaaaacctcctgtgctttcaaaacctctggacggagaagaattaggaatatacctggctataacggagcatgctgtaagtgccatattgaccagagtagaaaataatatccaacacccagtctattacatcgataaaagactcattgaggctgaaggccggtatcaattgatagaaaagctcacttattacctaatcctatcaacgagaaagctaaggccctactttcaggctcatcttgtttggttatacactggccaaccattacgccaaatattgcaaaaaccagacgcctctaaacagttgctcaaatgggcagtggagttgggccagtatgatattatcttttagccctgaacaacgattaaaggtcaggccttggcaaattctctagttaaatgtaccagtaaagaagagagcatttttgaaaacaacccagagccagtacaaatgcttcagccaagtattagtgaagacaagccgacttggaagctacatgtggacgggttggctacagatcaactatctggtgcaggaatcgcccttgtcacgcctggggnnnaacacctgcacgctgcagtcaaattgggatttaaatcatctaataatgaggctgaatatgaagctctgatcgcgggcctaaaactagcccgagagatgagggccgaacacattgagatctgcagcgattgacagctggtggtaaatcacgtatccagagagtacgaggcttgggggaaaaagatgatagcctatttgagaaaaatacacgatcttctcacacaattcaaaagctatgcattagcttgacttgggagcactactgtaaatgataaaggaaatctgattcctatcaattttctcaaagaacttagtatcaccggcacggatgaggttgaaatgattgatacatccccaaactggatgacgccaatagcggcctacctcaacactggggaacttccaaacaatagaaacgaagctcagaaaatgaagagaaaggttgcacagtacatcgtggtagagggagttatgtacagaagaggattttcaatgccattacttaggttcatgtgtaacacaagaagaagctgcacgacttttatcaaaagaacatgacgaatcttgtggcaaccacgctgccaggaagagtttatctaagaaaattctaaggcaaggttatttatggccggcaatgattgaagattccaaggcctacgtaaagaaatgtaataaatactagacattttcaaagatccctcgggcaccgcccaacgaactaactcagatgcaaagtctctgtcctttcgccatttggggaattgacctgatcggacaggtgcccaaaggcaaaggcagagtgtagtatgcaatggttgcagttgattactttaccaagtggatggaggttgagacactggcaaccatcacgtccaaaaacgttcaacacttcattgtgaagaacataatttcttggttcagattaccatacaagatagtctcagacaatgtcaaacaacttgacagtcaatccttcaccgatttttgtgcaagccatggcatcataaaaagtttctttgcagtagcgcatccccaagcaaatggtcaagttgaagcagtcaacaagacattgaaggacaccctaaagaagaaacttgaggatgctaaaggaaattggctggaagaacttcctaaagttctatggtcataccgcacaactgagaaaacgacaaccggacaggctccatttgccatggcacagggatatgaagctatgctgctcatagaaatcgacccgccatcccacagaatattaacatatagccaagaggccaatcacatactccttgcagaatcacttggtgaaattgaataaacacgaaccgcagcaaacttcaacggatagcccatcagcaaaaagtagcttggtattttaacgaacaagtgaaagcacagaaattatttgtcggagatatggtcctaagaagagtatttttgaacaccaaagacagtacgacaagtgtggtcagaccaaactggaaaggacaatatctagtggtcgaagttctagaatcaggggcatacaagttgggtaagtacgatgaaaaaatgcaacttgttctagtactaaggtattggaacggggaacatttaagaaaatactaccaataaaagtaccaggtcggacgaccatatcaagtacaaaataaaagaatattttctcttaagtaaatggccttttgggtggaccacgcccaaaggttcagatacaattttcaagtactcaggtcggatgaccacctttcaaatgacgattttattttctgaaatttgacttgttcatgttaagctaaagatcagatcagataagcataaatttaaatttaatcgagttcattagcatgttattaatttaccatccagtgcatacaaaaggtttggtcgaacccgaaaccccgaacaaaaaaaatatacctgtaataaaaaaaagtgaccaagagtcataagtctgcttggtcatttgggcggcacttatacctatacgaagcatttggtaaaaaacaaaacaaatacaattgcacgattattataaacaaaggatgaacttcactaagaataacaaaagcattcaaacccaggattaaaggctacccggtcagctagttgtttgaaaaatgaaaaatatattccaagtttaaagaccgcttggccggtcaccttctcttaaaaaaggccttatggccgaacagatataaaaaagagatagtaaaaggaaagaaattaagcggcaggagtcccaggctctttgtatgggtcagctaggtttgaaggggcctgagaaccgtcattctgagcgaaaggagcctcaacattctgatcagtaggtgaggtggaagtggtttcgtcgggctccccgtaggccgcctgagaaccgcagtagtcgagaaacatgtctttggaagcgcccatgtaatcaaagtttgcgttgggattaacgttccaaatgtcataaaatatctcgagactagctgtctctaaggcatttactttctccctgagcctcaccagctcagatttttgcttctcaaactcggccccaagctcctcctccatagctattttctcttcctccaacctgcgaagaagggtctggagaccctctcttttcgtcacagagactggtcacttcccgagataaagaggcaatatcagctttgagctgctcggtggacggcatgtcctgcaatctttgggcagttcggccacttttgtctcagctgggagaagtttcttattaacttctgcagctctatctacacagccccaacttgaacctgggcttcctctgcgtccttcttggcctagtccactttcattcgcattgtgttagaaatggcaaggttcttagcagcagccgacttagctccggaataggcataagccatcttcagaccagtctgtgtgaaaagaagatattaaaatttgaacaagttaacgaagaaaaacaggaaaatgtcagaaaaggcttaccctcgaaagcttcttcaagactcctcccataaccagctccaaatataggtcgttgtctgccccagccagctgctcgttcacctcagggactgaccgactaacatagtgagtgagcatatctctgcctcgtttagtctctcagtgtagtactagaagtgtacccgcttctaattagctcagatccaccctttgcctattcaggcctgtccgaactacctcctcgggaatccttggacttggtaacttttaaactaggagggtgcacaacaatttgatcttcagaaaggtcaatgaccacttcagctggtgccttctctctagatggtgttgtctcaccgcccctagac

SEQ ID NO: 121698 - DNA, 3071 bp, Cannabis sativa
  modified_base (796)..(815): a, c, t, g, unknown or other
ttataaaatgtcaacattttatctaaaaaaaaaagactatttttatatatataaaatatatatgtatagaacacttcttaatgggtaatacacattgataaatactaaaaaattaatgatgtgacaatctaattacttactatagcaggttaccaatatatatacatatatatatatttaagaaaaattatatttgtatttttatgaaattaaaaataataatttcaaccaataaaattagagaattagaagttatttttagaaactaatacttatattgttgaaattactactttataatattcccaatttataaatctacaataatattgaagaaccttataccttgatttttagtatatataccatgatcttaattgctgggattgtaacaaccgatccatcaagttctctaaaatctcaagtattatttagtttcttatttataagtaatgcttaagtttttttttaaatcttattcatgaccttgggaaaagtttattttttcactcagggcaattaaatctagtattatgtagtaattaattgccacctctcttctctagcattctgtagtaatggattgtcaatcttataatcaagttaaattgaagaaccaatgaataacaagagaagagattttctaaatttgaggatgcaaagctagttcttttaattaattcaaggtctgattttacaaaaattcctcagaaaaaattaattttaaaaactagttgatttcttatgataggatattattttttgaagggtgtagtctttattattattattattnnnnnnnnnnnnnnnnnnnntattattattattattaattttacaggttttacaagaaaacatattttctggaagagtcttgccaatgatgaacatgatcaaaagtagagaagatctttttatcaatgaatgaagacttaaaatattatttttagagaaagaaaagatagtccaataaataataataaaattcattacagaacagattatgtataaatacttattcatttatgtataatttattccacatgaaaaaatgacaacaattaaaattggcaattgccatattctaatatgacaactattttaaagatttttattagaatctctaccaaaaaaagaaaagatttttgataggatatttattattattattattattattattattaaaattattattattattattattatgttttgaaagaattagctatcaattggaagcttaaatttttagtttatttaattattaattttaacaaactgaaaaaaataataaaaaaaaaagaaagaagacaatttataaatcaaagttagatatttccttttaaaaatatgtaattgaaaaccgtgaaaactgaaaaaaaaaaattaacaaaaaactttaatgaaatatgtaagatttattttcaaagaatatacaataaataagttttaattaaaaaaaaaaagtttggttgcaattggaggagttttgagcagttttgggggcttagatctctgattttttttgagttttttctacccatacaatcgaaattcttactaccaaaaaaaaaaaaactacctttagtggtaaacttttagtcacaatataatttttttgtgattaaatataacttttagtcacaacaatttaatcacaacaaatagttaaatgtgactaaaacataatatttagatacaagatgtcactaatttagttttaatcacaataaatattgtgactaaaaatacatttagtcacaacaaattgtgatttagtttactgctgatgtgacttagaatctctgatcgatgagtaaaattctactcaagttttcttgcacacatgattatggatatcaagtaagaaaaatattcagatgcacatatgcacatgtttagctacacctgtatggtatttctatatagctatagcatattatcgacatcggtatgaacatatagttgcatcaagatactgatatctagtatggtaggccgtattgaatagtatggattgatgctaccaacatcaatgggactagagtgctggaattaggttggtattatggttaatcatactataggtacgaatgttcagatctcaatttacgcgttagatgtggttagtagacttataataactgagtgtatgtgctctcagttacaagtcagatttatgattgtattatgattgcttttcttattgagttcgtcgactcgtagttatttcactatgtgtaggttatatgattgtatccaaaccacatagacactctcgtccaatgtcactcggccaaggacttctcacctttgcaaatcttcttctcagttttctatagcaacttgaatcgctcaaatcaaattaatattgagggagttgtgctcaaaatatggacatagtacaaggcgagcaagacccacttagcaaagaagccttaaaccatcctcaagtcaacaataaataattgaactcatatcacatctgaatatacttaccagttatactaaatgataaattttgtttgaattgatcatattaattaattatattttgttcataaaaaatatatatatttttttaaaatattattgagttgaattaatggctataattaatatatatttttttacaaatataaatctgttatttattgtattttataatatatattttggtattaaataaaaattaatttattaacataattaaatgcatggagtaaggtttttataaatactaaaaatcttattttcttagtactcaaaaagagatatgaattcctgtcaaataaaagaatcagggagggacgaaagatagagataccaattatttatgcaaaaacaaaaatttgaaatttatttattaaaagatttcttcaatcacttcatatcatctatatttggtatatacaaattgtttccaaaactaattaaattcctaaaattcctcctaatcaaagaacatattatcctaaaattacaaaaatatatattaagaaaaccatatatcatatattctccaacaatattgtaacaaaacttaaatccgtatatcactaattatg

SEQ ID NO: 121699 - DNA, 1174 bp, Cannabis sativa
tatatactatatctatataactataattatcatctcatcacttttcgttcttcttttttatttttctatatttgattgatatatttatcttgatttgttttttcaagatataatatattaatcaaatattaaactggaatttgagtattacttctaagcctctaatcaaatttataaaaactattcattgaaggtacgtaataatcttttaataacatggtaaagtaccaggaactaatgttttaaacatatagtttttttatccattcacttaaatgttttacctcattataatcacttgacctccattttaatttagttgtgatgatgataatagtatcactataaattactatcaaatataattattttaaaaattaaataagtaataaataatttataatttgtaatatttaacacaatactttttttttttttataaaattttaattatgattaattttattttacaattaattttttataattagttactaataaaaatattttagcaattaatttttttatttaaattattaaaatatttatagcaaaactatttataatttgaaactataacatatatataaccttgtaatttaaaattatttcacatataatcttataatttgaaattgttacgaaaaaaataaatagaagaagaaaatattaaaaacaaaaagggtttcttcctcttcgaaatctatctgttattaacgcttaagataaaacttcagaaatgtgtaagagaacaaaccagatacatgagagctcgatacaactcgtagagactcagtggattgggattaaaagaaataattatttatttaacatatttatttaataaatttattttaagaagtttaatttttgtaaaataaaatgaaattttattgcaattattataattaaattgtttgacggttaaaaatattataatatagaaacttaaatataaaaataaaatgatttataaatattaattactctattcaatattttaattatttaatgaaaaaataattttagattgtaccaaataaatatatataaaaaaatatctaagtcaaaagggataattacataacgtattattttttgtaaaaaaaattacattttgtgtttaaagaattttttttacatttttacagttttttataaaaataacatgaaa

SEQ ID NO: 121700 - DNA, 1701 bp, Cannabis sativa
aagtaagtttatatattgtaagaacaaaaactagccgttaccacgcttttcgaaaaagaatattgtgaaaagcggtagaccataaataggacagtggcaaaaagccacttttttggctctaaaacgtgcataactttctactcgtttatctgatttaagatattccagttccgttctcttagttaaataatatgtgatcttaaaatcaatgtagaaatttaatatatcatttttgtgaaataacttttcgcatacgttagtgggctaaaattcgcacttagaactttttaattatagacttaaaaatcaatgtacaagattgtgaaatgtaaataaactttcatggagtcttttctagagttccttgcgtcttggaatccacttccggtcattttgagaatttcgataaagttaccattttgctctcggagttaatttttccttaaaaattttaattatcttctattgtgctacaaaatcaacaacttattagtgacaaataataatcaaatatttgttaatcatcaatttaatactcatattcaaataacattattagtccaaaaattgagtgttttttttgccaaaataaaaataatcactatatatagaatttctctagacctaggtatttcctgccgctagtttcatcttagtgaattaggaaatggcacttcttactattcaacatctcataaggatccatccatatcatactttgataattgttgttgtacgaaaactctatcaagggtagacacttgttccatgaatccttaaaattcgtcacatatgcttgtaacatatcttttagtatctaccatcctttagactgaccatcttcctagggatggatagttgtaccgaattcaacataatattcacggtcctttggagattttcttaaaacttaaaggtgaacatcatatccctatccgaaataatgaactttaaaagttccatggagacttacaatctcctttatacacaactctgcatactgatctacaatccatatggaatcaaaacatacctgtgattctaggaaatcgaaccacaaaatccattataatatcttcccacttccactcgagaatttttataagctgtagtaagcatctgaatacataatctatcacatcattttgcatataacatcattagtaatagaatttcaagtcttggtacatcttggtagtaccaggatgtaatgatcaggaaatgatctagggtttcttttttgagctcaacactacttgagacacgaactcgactttttccattaacttcaaatccatcaattgatcacttttgattttgcctaataaatccaagtgaagtgtcaacttgttgagtttgcccaacacaaactcaatacctgacttcaccatgacagtcgctaactaaagagaaatgttagttgtgctgtcaacttgcctgggacccttcttacttagagcatccaccactacattggccttcctagggtgatagagaatcatgcagtcataatctttaactaacactaaccaccatttctgtctcatattcaaatctttctgagtaaagaaatatttaacatttttctctgtagagatagttttgacaaatcttaagaacactaggtgaggctacacgtgcaatgcacgtgcctaactcttcatgttcaatttcatttatatttgagtaatttgcggcaaa

SEQ ID NO: 121701 - DNA, 1452 bp, Cannabis sativa
aaaataaataaataaataatcttgggttttatctaaaaaaatattatcatatcttaggtcaaaaacaacaacaacaataataataatcttatgctattatttagtatagtccaatccaaaacattatttaatttgtatgaaagataatgaaatatatttgtaatgtcttttttcttcttgttttattatattcttgtgataaggcttaatttattgactagtgctatggttcaaaaattcattcaactctatcaataacaatccatgtacatctccattgaactttatgataaagataacacttgcttgccacatatcacgttttaaagccctaaatataggataatagccacatcttcattccatgttcgacaagtgttcacgttcactatatgaagcttaagataaaattaaattttacgaatcttatataaataatttaataattataaaataataattatagtggtaaaattttttaaaatttttaaaagttttcatttaaaaataagaataactcttaaaagttactattgtccaaaggcatacatttgatatttttaaaaataataaattaagaggttgggaattgatctctttaccactatacttaaaaatattttaatatattttcttattatttattttttttgtgtatataccaataatattatatattttttcataattttaggtgcaggtcttgctcacctcacctccagacaaaaactagttcagtatgatcatataatagctcgattaagattttataaaattttctttagcttaaagaaataaaaattataaaattttaaataatttacaatgttcatattatagtttataatctttcgtgttatacgtgtatttgtttgtttttttgtttctttattttttttttttatctacatgtgatgaaaatctcacgaaaatttacaagggcctattgtaattttaacttagaatttcgtcaataataagtgaagctttgataattaatgtctcgatttaactaaatatagatattataagtaataataacaagaacacaattctttacgtggtttagtatttaaaatctactaagtacacaagtctcttttatggaatgtgtttataatttgataaagttttagtaagtaaaaagtgttccttttttattgagtgaactcttatttatagaaatagaataacaattaatctaatcttaatagaaagtgggtaacaattaaatatgtattggataaatataaggagaactatactttatatataatttttttaagtttttttttttaaaaaaaaaaaattacagtttaagttgctctagtaatttttatgtaaattgttatataaattttagttgtgaattagattacttcgttggttgctatgtaaatttttgtaaaaaaaaaaaaattattttaaactataaaaataataataaaaaaa

SEQ ID NO: 121702 - DNA, 1718 bp, Cannabis sativa
agtaataggaaagaaatcaccagatttgtttcagagttcaccccaaaaattagggctacgtctctgtcaagctcgtctcagagattagcttgatatccactattatcaacgatgagatacaacgttttggagcttcctgtcacaagatttgatcaggtaagctcgattcttcatttgtacaatttttgtgtttattttcttttgatttgcttctcgatctaactctatttctcgatgttgttgtgcatgtacttctccttcaaactcctcaccatgagaactggtttctcatctctggatcttggagcagaagcctcaactagggtttatttctcctctctctctcaatcagttttttgatctgtgatctgtgtagatctatctgttgtttgctttgatttcctgcttttataatagtgtagagtcggttgatcacagatctacgagttagttacaataacagttgtaactaactcctatttcttgttccactagaggcgaagccacctaggattgagtccttgttgttttgtttctgttgtaaatgttgatgtggatatttatgtgtataagagactggttataagtggaatttactcaacaatattcaacaacaacaacaacaataataataatttctgggtggattcaattaacaaataagattacagggtggtcttttttaactttaagacacacaaattcataagaagatatgaaaaccttaagtaaagataaatataaaagggctatatatatgccaagccaagcaaagttataacaatttactcattatagtaacttcactaaaaccacatctagtatccatactcagtctcctcatactgcttgagaacatcagcacacccagcaagggcatcagtcctagtgaatcccattgcgttgacataacggttcttagttgcaatgccattgttctcggtgagaatcacaagggcacgatcacggcctggagctgcagtggcgcagtcgaactgaggactgctcactagcacagcattacagatctcatcaccatggtcctctggaatgaccgtcttgtaggttccagatgagtctgttgaggcctctttgctgtagatgaccctgtttgagaccctgtccttgcattctattctcaccttggctcctatatcacacaagtcaaaaataaatgtaaattttaatgtattaaaatgaagaatatcttttgagtaacgattgtcacacacacacacttaaattatattttttacacttaaaaactataaataaaagtacaattaaagtaacgtaatctccacttgaaactatttataactaaaattaaacacagatcttgtttaatttaagtatgtatatactggaactactgatataatttttgaaattaacaattcattatcctctctaatccaaatctagcagcctattcaaatttagacttaataaataagttggatttaattattttttttccttttctaatgggtaagaggtttggcacaatttttgatagaaaatgtcgggaaaatatccatattgaaaatctgaacaaagatttacaagatccagttagctcttcaacgtttctattcgtatgtataaattataattttttttacaatttaaatataataggatggtttccacaaataataatataataatagaaataatcggatgtttacaagtccacacagttccatttcttagtc

SEQ ID NO: 121703 - DNA, 2884 bp, Cannabis sativa
tttaccaacgaaatgtcctcattgatgcgcaatactgacgaaaacaggggtttttaccaacgaaatttgtcctcattaatgctcatttttcttgtagtgtacaggtctttccattacagaaaaaaattcgtgattgtggcaatgttctgcttgaatggggaaaagaatacactggtaactttggcaagaggataaaggattgcaaggtcgaaatcaagacttggaagaaagggcgagatgctaattctgttgatcgatataaagctgcggagttgaacttgaataatctttatttgcaaagagaaattttctagaagcagaggagtaagcagctttggttgagagagggcgatcgtaactccaagtatttccatgctaaggcaacatcaagaagaagatcgaatgtcattcaaaaactgaagaatgctgatggtgatttggtcggctgggaagatggtcttcctacattggtggtgaattattttcagcaattgtttcagcactctgatggtgattattcttctgttattaactgtgtttcccaatcgcttactgaagaacaaaatgacttgctacttgaggaggtgactagagaggaaatcaagaaggcattgttccaaatgtatcccgataaggctcctggtcccgacagtatgactcctggtctttatcaaaaattttggaatttggttggtgatgacgtagtgcgagtggttcagacgttttttgctactggtgagttcccatctgttttgaatgaaactaatattgtccttattcctaagaagaagagtcctgaacaaatgggcgatcttcggcctatatcgctctgtaatgttctttataaagttgtgtctaaggtgattgcaaatagactcaaagtggtattgcagaatgtcatatctaccaatcaaagtgcatttcttccgggacggttaatttctgataatatcatggtttcttatgaggttatgcactatatgaaacggaagcgtattggtaaagatggttttatggcgatcaagctcgatatgagcaaagcctatgatcgagttggttgggcgtttcttaaggctatgcttattcggatgggttttagattgagattagtggctccgattatgttctgtgtatctacggtgtcttaccatgttacttatggaggaaagaagttgggtccaattgtaccaggttgtggaatacgtcaaggggatcccatatctccgtatttgttcttgatttgtgctgaaggtctctcttctcttttaactttgtatgagcaacgtagatagttgactgggtgtaaagtggccaggagtgcgcctcgtgtttcacacatgctatttgctgatgatagctatgtgtactgcaaagctaatgagggtgaagctacacatgtgatgcaccttctccaagtttatgaccaagcgtcgggccaacaggtgaattactctaagtcctcaattttttttttcagtaagaactgttctgtggatactcgtgctagtttgtgtgattatatgggaatggtggaggttggagataatagcttttaccttggcttaccttgtattttgggacgcaataagaaagctattctcagttttttacaagaaaagatgaaaaagaagatttttacttgggagagtcgtttcttgtcaaaagcggggaaggaagttttattgaagtcagttgctcaagcgttgccttgctatgccatgagcgtatttttattaacaaaggagatctgttctaatcttgaaggcatgatggcaaagttctggtggaaatctcaatcgcgttcgggttcgaagggtgtaaattggataagttggaaacgattgagtagacataagactgatggagggatgggtttcagggatcttcgagactataatctttctttccttggtaaacaagggtggcggttgttgactaatgaagactctttggtaagcaagatatacaaagctcggtattatccttctggtagttttcttaatgctaccttgggacaaaacccaagctttatttggaagagtattttggaagcacagggactagttaaggctggtgtaagaaagtctattggcaatggagataatgtaagcattttgttggatccatggcttcctgacccttctaatccctttgtattatctgatcatcttggcttagtgaatcaaaaggtgtctagcttactctcgatgcaatctaagagttgggaccatgatgttatcaatgatctatttgatgagagggataagaatcttgtgctgtcaatacaattgagtgtacatgctacggctgataggtggtgttggaatgaagaaaccaatggcatttacactgtcaagagtgcttaccgactgctacagcaggattctggtgcgcatgtttcggttgaagatcaaaaaatgttcaaggctatatggcagttggaagttcctccaaaagtgcagcaattcatgtggcgtgtgctagttggttgtctcccaactaaggttcaacttagcaccaaaaaggttaatgttgacttgtattgtccattttgtaatctggcagtggaaactatctctcacatcctgcttgagtgccgatttgtaaaaagttgttggtgtgtctccatcgttccgactggtgttgataatggcggcttcaacaactagttttctgcattaactgagcaacagtcggctgctgtggttaatgaagcagcgtgtatcagttggaagatttggtatgttcgtaatgagcttctatggaataacaaaacttgttctgcattggatgtggtccgatcggctaggatggtgcttaaccaatattgtactgctcaaactcaaaagacgggggcattgttgattgatgatatcaataatgt

SEQ ID NO: 121704 - DNA, 735 bp, Cannabis sativa
taaaaaaattccaaaataaaatatataattaatttattaatataattacatgccaaactctaccacctaatatatataaagagaagagagaccgtatatataaatatagaaacaaagaaatgtaaaatggaagaacaatatcacatgagaataagcggtgggcagcgtggaggaccaacgactggtggggcctgagattgggaagaagacgttgagaagataaggagaagacttagacgagaaccctaaaattaaattggtacaaattgaattttattattaaaataagagtaatttgtcaagttaaatattcattaaactaacaaatcatcttccagcataagctagttaataggtatggcaaaaaaattcatttattcatattgggttggagatctaatctgaaagattattactgatacttatcaaatcttggattatattcgctttgcctcacctaattgttttaccaataggatctcacctgatttatttttagtatattaaaaaaaaattcaaccttatccaaattaattcttacaaaataacatatatatataaatatatatatagaatacttttttaatgtatattactggttactaaatagatttaataatatatattaattttagaaatatcatgatctaataactgttgaccgagattttcggtaactaataaaatattataaaattattgagctgtaagaaagtgagagaaggatttttacgt

SEQ ID NO: 121705 - DNA, 1769 bp, Cannabis sativa
taatgggacccaaaacataataaattcatgcataattcttaaaatattaataaataccgctaattgcctttactaatccatattctaaaatgcggtcattacaatttcaatcattttcttcatcttcataaaaaatgagggaacaagttatttcaaagaaggaacagcgcaacttggagggtaaaagtggggcctagcacctaggttgacacctggtgcaggccgagtgcccaaattgacacatactgctcgcctagcacccaagtttacattttgtcaaactgggccattgccaaggagatttttttagatttttttgagaatattctctatttttgtcaaatattaagatacaagtgtttttgagaagcaaatggaaccatttggtggcctgaaattggacccagtgcccaggttgacattttgtcaaccttgactatttccaatcatattttcaaaaaaatgttttgagaaattttttgtcatcataaataaggaagatacaagtaaaattgagaagaaaatgagaatccctaggggcagaaagttgatcccactgcccaggttaacatagtgctaggcctagcgcctggttgacaatcgacctagtgcgctggttttaatcatctgaatgcaaattctaattcgagcagcctctccgacaatgtcaaaaactaggtagtagacctagccctcaatagtagggatgtcccctatggatttgtttttgggttaattaattaattcaaaagataaatatttatttaaatttaaatttcaaaagtagttatagatatctctattggttgagatattttctgagctagttgagaattccctcaagtggctgagagattccctcagtcggttatatgaaataaatatatatataactgattcggttatattatttattcaaataattaaatattattctataaatgatttgaatttgaataattaattgaataaaatatttattggtttttatttaaatacactatataagccaaattcaaaaatatgaatgaggtattattattttttaatagcctaaaaaggattaataaaattaatctcttttccattatcactcaaaaagattttttactcatgtgttgagaattaaattaagaactccatacacactatatcctactagcccacactagtccttgtgtgtggtggaagatttggaagagtatggtgtgggttctttgtcatcatccaaggatacaacttacgaaaaaaaataaggataccctaataagtttcaagagataaatttcttttcatctattttttttttttggatttaatatatttacgtaaggtgaaccagagaatgtggtatgatgataatcagaaaagattatttcattgtgtaactaatttagtactgaaaaattttatttttgcaagtgccaaaaagttttcttaataacactaagaaaaattatgatgtaaagatctacagtagcaaaattgaaacttgttactatagaacacaaattttcagtaacagaatagaaataacaatgcagaaaattaaaaagacttgacacaagagaattatatgtggtatcaatattctttctagcactcctaatctatggggccacgcccagagaataaaatcaattagtaaagtatcaaaggttaaaaaagtaattgagaaacaaaattagactccctctaataattggtcgcaaccctttgtaatccatatcgctaatatgatctctgaaacacacaaagtagttaattcc

SEQ ID NO: 121706 - DNA, 1004 bp, Cannabis sativa
tccttctctgaagtgccaatcgaatttcgggtataacacatgtcgtttctcatggagctattggatatctatgcccaagtgtgaggtaacattcttgtgatggatcctttacctgtaattaatagacttaaccgaaataattgtcctactgacaagtaacaaagtataaatgaactaaactagctgaacgactcaaggctcgactggttgcacaaggttattcacaacaggaaggctttgactttttcgacactttctcaccaggtgcaaaaacagtaacattcaaactcctcctttccattgtggcaatcaagcaatgacacacattgcaactcgacatcaacaacgccttcctatttggatgagaaagtttacatgcaattaccccaaggactcaagcttccatccaacattcaagctccaaatcttgtcagcaaactccacaagtcgatttatgggcttaaacagtcttcacggtagtggtataagaaactcactgaagctctccttgaagaaggattcacccaatcacaggctgattatacgctcttcaccaaaggcttcgaagacactttcgtggccctccttgtctatgtggacgaaataatccttgcaaaccccaatatgcacatactacaacttgtaaaggatagtctccaaaccaaattcaagctcaaaacattggggccactcaaatatttcctcaggtttgaaattgctcgtgccacatctggtctcttcctctcacaatgcaagtacacactgcaattacttgctgacacagggtataccagcagtaaacctacaaaagccacaatggaccctagacaacaacttgatgacaaagaaggtgactaactcgaaaacccatctcactatcgtaaaattattggtcgacttttatacttaaccctctcacggctagacatcacctatgctgtcaatatgctcactaattcatgtcttccccacggactccacatttaacaactctacaccacctt

SEQ ID NO: 121707 - DNA, 3122 bp, Cannabis sativa
  modified_base (3075)..(3084): a, c, t, g, unknown or other
tatataggaccatctttgtctcaagttcagcaactacttgaacatatataggctaatatttcattttttatctatcattatttgacaagaatatgtgaagatcatataataagatatattaatcttattcataaatatttacatatacataatttatttttctaaaatagaaataaagagagaatggtgacaaaaaggaaaggaataatatgatatgatatttcgcttatgtttgttctatatactaattattcattagtattcatgaaaagatcagaaaaacttaattacatagttaaaggaaaagacaaccataaagattaggtttgcaactgaaagatatggaaattatgcatatgcatatgcattatcatttgctagttagagtttgtatatttaattacttgaacatataggacaagactagtacctttaattatatatcattaattattttattatacaagtttaatatgggagaatcttttcaagaaaaaaaaataatttacggtataaatatttatttttaactctcaattataaataaatatttaagtttaattttttatggtaataaaacttaaattatatttttaaaactttcatagatacttgaccgttaagtgcaaagttaaaatctatatgttattttctaattggtatatttaaataaatttttatctaaaaaataaaaagttaataacttacaccaaacaggaactgtcatgtggccattgacttgacacttaatgatcaggtacgtacctacgaacattctagaaatataaattaggtattattggaaaatcaattacatactttttcattagtaccttccatcttcctcttgaatttctacacagtagttgtcctagcataagtccattattattgcttcaacaacaatcctagaaattccttcttggagttagcataaagatgcctaacctcagatcattcgtacactattcccacaaccttttccaaccccttctgtctatccgaaatggaagtgagttatgttgtgccctccatatctctgttctctttcactagttcaacaaaccatgttcatgctatttgtatcaatttcaatagctagaagcatcctacctctacaatattctttcaagatgcaaccatctaacccaattattggtttgcaaaatgtgatgccaactttacaagctgcaagacaggtgtaaaccctctcaaaactcttttgtcagtcattaaatttcatttgatcaaagttgtacttccaggattaagtctcactatcggtctacaataatcatcaaagattgcatattgatctctaatagttctttctacttggccatagttttattcttagctctatacaaagtccaagaagagagtttagaatacttgccctctgaattttcttttttgaaatcaccaaatgacatgttcagattcatactgaacttgtccaggaactcctttgcaatctaattagcatctaccagcttgttctcccatacaattccctaggtgtgtttattctcaaacttgttaattagaactgtagaaccatcatctctcatcctctgagcatacaataactatttacgtccttctcatttatatacaactctaactctcaacatgtcattgtgaatgtacttatactataattgattgatgaaatactccttcaaagcctctcttaggtgcttcacagtaggaaatttcattcccaatttgaactcaatttctttaggcctaaaccgtggatcaaactcaatgtgtctctttccaagaactggtccatctttatcaccacttaccaaatttatcaaatcatcttcctctacatatcttccactgccatctttatggttagcttaactggcaaaatcattaattgaaccccaccattggctagggtttactatgccctcatcctcatattctggatcttgtgttttttgggcataatcctcttccacaaaatcagaatcttgtgtttcttatggtttctttttttgggttgtatttggtttgggtgagcttttctcattgtttggattggtatttgggatgtctgtttcctagtctgggtgggtatattagtaggtgattaggctagggttctagatctggtttggcgtgtgctttaggctgagaaatttttttagtaggtattttggtgggtatgagatacaattttaaaattggtttgtggtgtggttttggttggtgtattggttgtacttttttctagttttaggtaaagcattgttgctttttgtgttgttcttcttttttttttttggtttgaggtggagttttggtgggtgtttgcgcttttatttttctagtttgaggtggagttttcattgtgattggggtagggttttagatctggtcttggttggtgtcattgattcttttctagtttcaaatatttgttttagttggagtgagccttggatggattggattggatttaatattatgggttgtattttatttcatggtttgaggtggagcttggttgaggttcgccttggccttttctaggattgggattgggttaggactaaggtttaggtaggtgtttgggctatttctgtttggtcttgttatccacataaaggttcaatttcctctaaattcttaaagatcgcaacattttagtcaatatcaacacaatcaccattgtcatcccaataaccactatcatcttcactttgtattcaatatctagcatgtacatgaaaaactcatcaacatgttaatctaaatcaccactatcggcttctaacaattctgcaagtttctcctcaaggttcctaattgctaccttgctcataacatagtgatcaggttgggcacttactcgagcatcaacaatcacatcttcatcataaggtagttcttctatatcttttcaacttaggtccaacttttggagggtcttttgttgttgtcttcacagggccaccaacaattttcagttaaggaggactgtcctctcctccaaaagtcccaaatagatccacataaacctcaaggggaccatgtgttgggctttatgccctaaannnnnnnnnntttcaatgtaatctctattatttaaatatcaataaaga

SEQ ID NO: 121708 - DNA, 832 bp, Cannabis sativa
atatcctgatcgtactttcagtttgggggatgtctcaactgagctgttatcttgtttggtaacagagtttgatgcttaataaagcttgaattttcattcaaaaaaatggattaagaaactctcctgaatatcaaaactgaaggaaagtctatcttaatatttttggttattttgtaaggtaattggtcaaaaatatattagcaagtgttatgttctttcgaaaatattgttatagtagaaatgattgagtgtattgtttcatcaaactagactcatcttgactttatattagataaaaaaaaatgtattgctattatctaatttaatcatatcacaatagttgactataagtgaactaagccttaatattgaatgatagacattctaaccgattttgttatctgagttcttaaatttgttcttacgaggttatcctatagcctaattcatacttacatattggaatttggtagtacaattgagtgagactatttatcatagatatgaaatttataatttctatatatgaaagttaaatagtaatttccatagaacttggttcaacgagtttaaacgaaagagttctcactttagtttttaagataactggcgtttcatgaacaaggaactgagtgttttaagaataaaatacattaagaggtaaaacggtaaattgacatcgcctcattagtagatcacctatataggattaattgatagttataattgtaataaaggataatgtgcctatattgattacgaagtattttgtgaagggcattttacaattttgtatacattattttaattaattacaaaatatgtgcaaaaa

SEQ ID NO: 121709 - DNA, 744 bp, Cannabis sativa
  modified_base (702)..(702): a, c, t, g, unknown or other
aattaaagtttaatttctgccgtaattttattagtaatcccaattaagggattagggtttcataagtatcttgggtagcgtgcctaattatttagggtgttacaggctccatctcatgatgttgtgtttacataaatatgggaacaattaggttagtttaaatatttatgagcataaaacttatgtcataaaatatggtaatcttagaggaaaaaaaagaaattaaaaaataggaatcttaacaaaagtctataaataaatttaataagatttcttagaacaagtatcaccagaaaagtcttcggagcggctattattatggaaaaagttgtcgaagaaaccattaccgctaaaaaagttgtcagagttgtcatagtccccaacaaagttaccaaaaagttgacgaaattgttatcgtcgctagaaaaattatcgtcaacgaaattaaatattggagttggatgttggaatttgatatagagaaaccaattatatagttaaaaatttgacatagagaaaaaaattatgtaaataaactaaattaaaattagtgatgtaagttcgtgcatgttgtgctggcccggcccatatttatccgtgtattaactcagaattctagactagacttttaagccacacccgctccttagattggcgagaataaaaaagtaattaagtaattataagagagacacaacaaanttatagtagttcactccctgtatcacaacagtaatggagcta

SEQ ID NO: 121710 - DNA, 986 bp, Cannabis sativa
ccacatcacagtgcaaaaaatgggataacagtttgtaagaaggaatatttgtagatttttcattttaacatttttagtcgaatatgcatcttatccccagattcgtacataagtttagcctttgaggaaagaattcaagtgtgtttcccttaggaagacttggttgtaaacatttcctgcttttggttgcataagtatgctgagctaataactttggcaagtggacgtaagaaattgtagtcgtcagcaaccgggtgcaccatacccccaaaatgagctgagaattttggttttaaattctcggtcatttgcttgaaatttaactcctatcattttccaatcttcaaggaggggctccgagtgcggttctactttgctccgggaagcgtattattaatccaagccatgtcttccctcttcatgactacttggaggggaaatcttgaaagtttagcagtaatctcttggctttagtaggggaagagtcgtgggattataggtgaaaacttagatggatggatgtcctcaaacagttccttcatgacatgggcctcgtaagggagagtataggctctcgcggaatggcaggcttttggtttcctagagggaaagcttggcctgtgttcttgcgtgagaatttctcctatgctgaggtctgtttccaataagcaagagtcatgcattttcgaatttcatagcggcaaacttttggctttcacaaggaaaggctggaagtgcacaaaaaattcggacaataactttgcttgcaaaagctaaaggtaaccatcactgggcacgcgacagaattcaagcatttcttccactccaggaaggaaggttgaagacgtgttacaccctcagtgaactttcctgcacaaaaacaacatgcattcgagagtcgtgttgaatttttataaaaaaagctttggcttccacaagggaaggctaaagttgcataaaaatttaagcaatgacttcgcttgaaa

SEQ ID NO: 121711 - DNA, 651 bp, Cannabis sativa
attaaaagtatagttaaaaaatgtgtagtgagggggaatattttaaaaccatgtgtaaccttttagcataaaatgtcaaatttccctataatatattacttaaaactatggttaattaacatatttctatttttttaataataaagtggagggcattttttgtaagtatttatatatttattattaggtcttccattgagacttaaattaattataattttatgattagtgtcacctaatctaatttatatatatctacacatatatacacacaactctcctaataacgaaatacttagaaataaaagctattcatctcagcaaatcctccaactgcgcatttaataattacgcaacttcaagctaccaatcgagctctctaacctatttcttcatcatatcatgttagtgcatttattatttgctttatatatatataatcattatattataaattttactcacaattaatattttttttactaatttagtttggccaataatcaagtgaaaaactttatgctaataaatatctccatttcaaaacttatagagaaataactattttagattatttattatttatattattttttatcacataaaaattaataattttttttcatattctttttagaattagaagcaaat

SEQ ID NO: 121712 - DNA, 1085 bp, Cannabis sativa
  modified_base (1005)..(1010): a, c, t, g, unknown or other
tcgtgacgcccttggaggcatatacaactgtggccttatgtgtggtttctcttagaaactctgtataaggctaggtagtgagtccattatagttaattgtacaacttaggacctactacatgtctttgtaagtgtacttaagacggtacttggtcgttgatcgatcttgtacattttgttttacctagaaggtacccttgggtactgttgacttgaatgtgtttgtagctttgtcaggttgctcacctctccttatttctaccatgcaggtagtgctggatgtttaataggggaggtgacagctacgtaggcctcttataattatggccagaacaaaatagactctacgtagggagcttctgtattacccctacgtggccaaatgggccacaaggggtcgagttagaatggtggaggagaccgctgagcccctgctgatgctgagctagagatagaccaaggggctgagagttttgatctagaatctgagctggaggaggttgctccagtgaggaagaggaggtataggacctgttctgtcttccctaattttcccttggctcactatgacactcgtggtaatccactgaacatgcttggtgagccttcaaaactaggactggaccatgtcctagagcaatctcttgagccgcagatagtggatgcgagactacatggagtttgttttgtcttgcctgcttctactctgtctgaaaaggcctttagtgagattcttgcttgtggcgtaataggggatgtccattatgagattccccatagaaactgttgggcgcacaggcttaaataaaatccattttaatataatcagatttactaattaataaaacatcagaaatcatttatatgttgcatggttcacatgatttatttcatgattgtatttaacaaataaattctattaagtccagaatatatatatatatatatttgttcatgattataccgtcgttagcacagtggaatatatgttgggttttgtgcccnnnnnnaaatccatttcaatataatcatatttactaattaatcaaagatcataaattacttttatgtttcatggttcacat

SEQ ID NO: 121713 - DNA, 2970 bp, Cannabis sativa
cccagctcagccaaactgtggttgacttacaacaacagctgcaagactctcttaataatcaacatgaaaagtttcaacactagttcgtagaaaattggaagaacattgaaaaccaacatattaagcaggagcagcagagggctaacctatctcaacggattagagaagcttatcgctctaatcgcagaactactccctgcaagggtctttccgagttggtgagagagactccccatcaaccaactagtcacgttggaactagtgctcaaggcaaaacccttaatgatcggtatgccactaccacagctggtaaccgagcaagcactaagtaaacaccaactgtggagacctctcgaaaggaaagtaccttcgaggaagagactgagaggactcaagctcatgggcgccaaccaatgggccttccacctagtgttgagcgacctcgtaacaacgagagaaccgacatgactcctccaccaagtccttctcattgttctcatgaaactaatcctcgagaccctgtaaggcaaaaaggacctgctacttaggctgaagaaggtagtaggagacactacttcgaaatcagaggctacgagatccggcgaataaggaccgatgaatcgctacatactctaaagcacttctgagattaaatgagtgagttgtgtcgttactttgcttgtggcctcgatggccaacagtatgagtacttccctcgagtacatggaaaagaaatgaacatgagtaaccaattcaattctctacacacttgtgatccagttgaagaatactttaagggaagtagccactacaacactttgaatgaacactctcacagcgggtcgtcctgagatgatcttgagttcattccaaaagtttcaccaatgttgccttcacgaccccgtggtcaggagacaactacaagacccaggtcgaccggagtacaagatcaacctagaagactaagagacctgcatgacctcttaaccaagaagagaacggtggatgcaacaacttctagagaaaaccctactcgagtaatagaagctttgattaggacgcaaaccaccactcatgggatcaaccaggcagagttcgacaccttggctgttttagtgaagggggatcacgctcctaagttgtctgaatttgagcttgacagagagggacgctcaccactctccgaacaaatcaaagctcttcccattccttcaaagttcaagaaccctttctggcataaatataccaagaaggaagattcattatctcacatccactacttcgagcttttgacagggccagctatttggaaggttatgtgtctcgatggaagaacactgatataaaaatactcttgattgtaaaggccgcagttactcttggtaatattttctataaatgggccgaattgaaggaagtggtaaaaaccttcttctttgcgggttggactctttttcaagtcacaaagaaagtttatctcatgaggagttaaaaatggccagttccaaaggcagtaaaatatgaagaaggtggcaataatcctatagccatttagatttatcttgtaagggtagacaccgaagaaattaactatagatatgaaccatgaatgcaagggtaaataagcacctgcattcatgtgaaatctcaaccaggcactacagcaagtgttctgggatcccttgggagcaccgtattgtggcttccggacagtagtttcaggaagacagtaatcatcttgaattatttgagcttgatgctcagtgagagtagtagacacgagaggccttagcctaaaggcacgatctcttggatcatcactctcaatggcagctttgaaaagctcagttgccattgcctttccaccacgcaccttgtctaagttcttagacttaggcacagttagcttagctctaatgaactgagccacatgggagtcatactcctcaggtaaccttctacttctctttatcctagccatcccaagctcaacaactcaagttgcttacaactcgagaaaagtcaaattgggttggagaagtcaaagccactttggaggaattttcaaggcactaggaaagtgttttggaattttggaagtttagcgaaattattttaaaagtttttgggaagtctaaaaattcttggagtaagaccaacaaaggaggagaagaaaaaaaacaaaaataaataaataaaaaatcggcgtcaacttcaaggaaaaaaaatattttcataccttgaagtgaagaatgcttgaaggcttgatgaagatgaaatctcaaagccctctctaaaagctataggcatgtgggggtgagaagagaaagtgtgaaaatttgattgtcaagtcacttatttatcggtgagttcaatctcataatcctaaagctaatatgagttttttaaatttaaaacttttaaagaagaggtaaatgaactattataaatttattgtgtctctcttataattatttaaccacttttttattctcaccaatctaagtgtggcttagaagtctagtataaatttttgagtcaacagttttttttctttgttttttttttttcaaatggaacatatagtttgatttttatcatcaaccgtttatacatttccatgcacgtgtatatatatagtcttttttccatataaagtacttttgctctcctactaatgtagatagaggcattatatatagtcaagtgtcaaattggtcaattatttgagctatgccactaatatacacatcaaaattgaataaatggacataacatcatctacacatttctgcctataaatggagataagatatctctacgttccaacatatcacataactaagttagaaaagaaacactactagctatatggctcttatgtcatcattagttgtgatgtttttcaaacttgttttgttgtttcatcctctcctactactctctaatcatcatccttttgttaattct

SEQ ID NO: 121714 - DNA, 596 bp, Cannabis sativa
  modified_base (504)..(506): a, c, t, g, unknown or other
  modified_base (533)..(541): a, c, t, g, unknown or other
ttccttttctgtcctttgtattaagttgtatttagtcttaatatcagtgtaagtggaggtttaatccaacaattatgttttggatatattattttttctttgttctgtatagtctccttagtaaaatacagcaaatgcaccaaatttaaacaaaagatgaaaaaaaaaacatcaaaactagcccttaatcattttactatttctattactcattgtaaaagattttataatgttgtgactcattcttttgctcatttggttttgtctcttgattattctcgagtttggtggctagtttaccgaaaaagaaaattttgatatatatatgggtaaatggcgccaaaattcccaaaatttttattttcgtttcacttaacccccaaaatcgaaatttgagtggtaaaacccccaatactcgtattctgttagcaatttaacacttccgtccaaatttaggagttaactgccaggttggacttgacacaatgtacacgtggcacaatnnnattggtccacgtaaaaaattatttaannnnnnnnnaaaattaaaataaaattaatttgaaatttaaaaataaaaaattataaataaaaaa

SEQ ID NO: 121715 - DNA, 1480 bp, Cannabis sativa
taataactattatgtatatattttaacaataatacattacaacaactacatataactatacatcaatatatacaataaacgttaacttatttaaataatacactcaaaaaataaaaatatatcctaattatatgaaaaaagtacatatataacattcctataatatgcaaacacatttttcaaaaataaaaaataaaaaactcaaaagtatacagtaacaaaataacatttctatgcagtctactgaaatgtctataaaatagggaaccatgattgaaattgtgaaaaatgtgagcaggcacgtgaggttacagatattggggagtgtgattgacgcgacagctctgtactctgacatcacctgcaacgcgtgaaccaaaaacaaaactaattaaagttaaaacagcataaaacaacggtaaacttaataaaattaaaaatcacgttaatactgaaattaaatggacaaaaacgtgtccaaatgtaaattatcctattttatataatatctgatgaattatgtatatatcgttttatatttttctttttgaaacccaataatttatttatattctatactaataatgtgaatattaaaagtattacgaataaagaaagaaaatattaaaatgaataaaatatattaaaagtacaatatttaaatgatggaaagaaaaagaatagagaaatctgtaaaatagagaaagttgtatttttaataaggtaaatactattttgtacattgtgttttgtaaaaaataacaattgaaacttctgttttgttaaataacaaaatagaccctgtatttttcaaaatggtacaaatagaaccctaaacagattttttatcaaaattgttatctctcaaaaaaattaaaataattgtgcatgaatttttattctagatatggaggtccaacaaagaggagctcattagccaaagaggagctccttatccaaataggagctcattagccaaggaagagcatattagccaaagatgagctccttagccaaataggagctcattagccaagaaggagcatattggctaaggaggagctcattggccaaggaggagcacattggccaaagagaagctcattggctaaggaggagctcattggccaaggaggagcacattggccaaagaggagctcattggccaaaaaggagcattttgggcgcgctaagctcccaactccgttaggtgctaaggtgcaaagagctcctcaactgccaaattatctcaaggacctgatgggcacgaactgacccaattggctcccctcatgtacccatgaccatccgggtccgctaaatacgagagacacgtgcttttaaagctattttaaaaatatagtcaaaaaatgataagtgaagagatattcattttttaaataattatttcaatattattatttttgtatcttgaacctaaccaactataattacgggaaggtatacctatgtttaaggg

SEQ ID NO: 121716 - DNA, 894 bp, Cannabis sativa
aaattaaaaaacaaaagtattaccaaacggtacctaaataattcctatttatagagacgaatgaggtcctatcatgtacaattttgaggatatttatgtctgatgtataagttttttcttttttttttctttatttatgcagaagatgtacttaatacttgaattttaacaatccatttttcttttttctttgaagttttcattttgcaatgaacttttataatataagttttataatttcgtctttgaaaataaaagtgatttctaaattaattatagagattatttcatggtaccccatataggtcaaattttaacaatgttcaataattattttagccttttcttagtttttttttaaaaaaaaaataattatgttttttttgcgcatgagagagccaattgcgttcgttcttgatgtatattttttatgaatctacaattttcttttatatattattatggattttatattttcattatttttacattgttaatacctaaaaataatgatccgtaaatgtatacataaagaatctgtaaaaatatatactttttttataattttttttttaataaaaatcataagctctattaattaatatattcattcaaaataatagaacgcacttcaaaagaatagtcctccaactgaagcacacaacctgtagagaaataagagtttcttgccaagcaataagtcaacctatttgcagatcattttacaaaacacaaattgtgaaggcacaaaataccgctctaaatcgcttagacagacaccaagttatatgtttccaacatgactctatctcacgaatgagttgcaatccaactcaatgcttctttaatgcctattatctcagcaatttcgagttgaacacatccaatcttctc

SEQ ID NO: 121717 - DNA, 1663 bp, Cannabis sativa
  modified_base (1627)..(1631): a, c, t, g, unknown or other
agtaagtgtgggggagaatgtgtcagcagtcctccaaaagaagcttcctccaaagtgtaaggatcctggaactttcactattccttgcactattggaaacactaggattgagaggtgtatgttggatttgggagcctctattaatgtcaagccattcttcatctataactccttgaatttgggtccatttgaaaaatctgggagaatcattcaacttgctgattggtcgaatgcctaccccaggggtgtcattgaagatgtgctagttcaagtcaatgaattggtatttccaacagatttctatgttccttatatggaagatgattccattccctgctccactccaattttgttgggaagaccatttatgaaaacaacaagaaccaagattgatgtccaggagggaaccttgacaatggaattcgatggagagacaatccgattcaaccttttggaggccatgaggtatccaagtgatgttcatgctatttattctcttgatgtgttagatgacctctcccaaagggtgctagatctgtatagtgaatataatctggaagttgctaaatgagagaacttggagttaaattctgacgagaacttttctgaagagatgttggatgtcataactgcacttaataatgacttcaacaagctttataagaaggtggcctatgtggaattgccagtcataactgataaattacaaccatccattgtacaagttcctattcttgaactgaagacactgcctagtcatctcaaatatgcttacttgggagagaatgaaaccttaccagtcataattgctacaactctcaaccaagtgcaagaagaaaagctggtgagggtgctccgagctcaaagatctaccattgcatggtctgttgtcgacatcaaaagaatcggtcctgctacatgtatgcacataattctcctagaagaaggagctaagccaacacgtgatgcacaacgaagactaaaccccctataatggaggtagtgaagaaagaaatgttgaagcttcttggtgtgggcattatttgtccaatctcagacaacaaatgggtgagtcctgttcaggtggttcaaaagaaatctgggatcatagtagttaaaaataaagacagtgagctagttcccacaagaatgcaaaccaggtggtgagtctgcatagattactacaagttgaatgtggcgacaagaaaagatcacttcctattgccattcattgatcatatgcttgagaggcaggtcatcgttactattgctttcttgatggttattgacgatataatcagattgctattgctccaaaagatcaagcgaagacaacctttacatgcccctttggtacatttgctttccgacgcatgtcattcgggttatgtaatgctctacttttcaacgctgtatgatgagcatcttttcagactacatagagaacatcatcaaagtcttcatggatgattttagtgtttatggtgattcattcgataagtgcctacacatcctcactctaattcttcagtgatgtattgaagccaacctggtgcttaattgggaaaaatgccattttatggtgaatcaaggcatattattgggactgttgggaatattttaccannnnntagatttacaaacaagtatgttgattaacatc

SEQ ID NO: 121718 - DNA, 1495 bp, Cannabis sativa
  modified_base (1433)..(1444): a, c, t, g, unknown or other
ttaattaatactcaaaacacaagaaattaacacaatataatctttctcatttttattttgagaggataagaaattaagagaagagagtatatatcttacatgtgaagatggtttgccagatctgatgtgaagagaggcatgagttgtgttagtttgattttgatagtattgtacatttggtggaagagtagatggaaggagcttcttattaagaccattctccaccgttgatacaagatcaaccattaacttcttttgtggacttgacacgtatggaaactccatgaatgcttttctacctttcttcatcataatcttctcaatctcatcattatcattatgatcatcaagcttcatgtgaaacggtgtcgttgagaacctagattgcaattgatgatgagtgaacactaccattgctctttctctgcattaactaatcatttattaattaaaaatgtaaaattaattaaatcaatctcaatatttcatacttattactttgatttcatttacttccacacgtttcttatccaaattaattatttatatatacatttattaatagggtccacacgtttctttatattattataacttttctcttttttctttttctttctttttttacttaacaattttttgtaactattttgaaaattcacaaaaataaaaaattagtatttattatttttgtgtgatccaccctattatggttgatattaaatttattgttaaaaaaatagtttgtgataattttttaatcacaaatataatatagttttactaaaaatatgttagttttagtaaataaagtaatctacttattctatgtagatgatatgcaataatcaacaaagaaaagtctaatgttgacaaaattaaaagaattaaagctcaaattagaatttgagatgaaggatgggtagcaactaagattctgcacagtataaccatcctaaggaacagagacaaggggagattgaagctacaccaagaagactacattgacaaaatcataaaaaatattctaggaaggatgctaaggttgttgcacaaccaattaccaattaataccacatgtccaaatctatgtgccttaagaataaagtggaatagataaaatatcagaagtaccctactcaaatgcaataggatctataatgcatcttatggtcaacaatagacttgaccttccttatgcaatcaatgtgttaagtacgttcatgttagggccgaaaaaatgggtcagacccgataacacgattcaaaactcgcacgagagttagtaggtttgggtttaccttaaataggttcggcttgactcgtctaacccgtttaatatatgggttgtgctcgaattgacacggctaacacgaaattgactaattaataacttatttaaagctattttagtactttaacatgtcataaannnnnnnnnnnngtgttgaatacttcataaacgtgtaattggttgacatgtttaaacaaaata

SEQ ID NO: 121719 - DNA, 1201 bp, Cannabis sativa
gaagtctttcccctctcgttacaatagacataaacagaaagatcttgagattaatgctgagtacaaagatctcgggattgatgcagaatacactgatcgtgaaatcgtgtggatgccatatccctgtaatctgatccccaagttatagggatttcgctgatgactcataatgtaaaagctgaattcgctaagtgttggttgccctgtgcggattgctgatttctttacactgggcatgccagcgaggcatcgtgctcaaagtgtcccctccgagcagatactccaagtggattccatgtgtcaccattacgcgatgccatgtcagagtacaaaaattgggataacacactcaaagttggctcaataatggtgctttgagtttctatgaataattgattttgttattgcttgaagtctattctaggatgatattgcaggtattctgaaaagtttggttgagtttgggaatattttgagtgagatatgagattttttagggtactttccagagaaccagttctgctagttctgtagaaccagttaaccatttctccagacaggaccctaggaaccagtttttcatttgggaaatctagtttaccagtttgggtagtttctagagccttagttttaatgtttccttaatagttagggtattggtcttgccatgctatatattgatatgaaaacttctagttttgagtttaggtctccaaaaagggttttagcaagttgtttacccatttatgattgtgacataggacctctgttcaacgagtgattttctatttaggttgatcagaacacttgaatttagaaacgaggtaagactagcatagaatatatatatatatgtatatgtgtatgtgtattatatacatactgttatgtaaatattatgctaccaacactagtatggtagcggtactgagtgtattggtacaatatatgatgttgaaagggtacgatcaggtgttaccaacactagtacgattaagtatgtagtgcatgtggtacaacacttagtagtactcgaggcacggttcaatcctaccaatactagtgcatgtggtatagagatcgtacgtttattaagaatgtttttctcatctatttagccttgtggataggtgtatgggtgcctaaatacaagtcggtaatacatttgtgttatatgcttttcttactgagtctgtcgact

SEQ ID NO: 121720 - DNA, 743 bp, Cannabis sativa
ccaattccattggaaagaaaaatgctaaagaatatttatagagcttaatacgaggtataatatcattattggtgcaattaatatcgaatcctatttatttatttattcatttatttgacgtgtaatcctatttattttaatttaataaaaattataaaaaattgataatcaattataaggcgtcatgtcatagtagtgttaggcaccttagtgttccataataatgctaataaacttataaaataacttcttggggttgggttgctgcatctttctttttcacgtaattcaaatatgcaatagtggcattcaaaactttcttaccaaagaatattgaaatactcttgtgagacaaaattagattcaacataactaagcaagaaaatgagttgttcataattcttccacctaaacaatcctgcaatatattcctcaaatatgtagtagttactagagatgcattgcacaagaggaaaaagggtgtcattattagacattgaaatagtgtaattttatgtaattgtctcttattttctttggccaacaatgtaggagttttattattgtgttttataagttaaatttttatgatattctggaattacaaatttacggtttagattaatttagggattgctccaatagtttttatgtgagttgttatgtaaattttgattgcaatttaggttgatccattgattgctatgagagttgctatttgaattttcgtaaaaatacaaaaa

SEQ ID NO: 121721 - DNA, 880 bp, Cannabis sativa
  modified_base (550)..(551): a, c, t, g, unknown or other
attttagtaatatatcaaaatataaatattaacttttatatttacatatttaactttatacgtttttttttaaaaaaatcaattgaaagtaattagcaagttaaaattataaacatatacgattatttgtaaatattcataaaattatatagaattatgtaattattttttttttacatattttttgtaacattgtacatttacttgtatatttgtaatattgtacatttacttgtatataaatgaaaattgcccttcttttatatcatttttaaattttactttatcaccatctaatgatgtaaaatttcgttgacagaaaaaaaaaaaataatgtgagtaataataataataagggtaaatatcattttggatcctgtattttgtaaaagttactaattgaaccttctgttttgttaaataacaaaatagatcttgtattttttaaaatagtacaaatagaactctgaattgaattttttgtcaaaataaaatttaattataatccgatctaaaagtgttataacaaaactgtttacattttcagtanntgttcgtgttaggaattgttttcaagttagtcatattaaaaaaaaaagttgttaaaaattaagattagggtcttattttttctattttgaaaactatatagtttattttattatttaataaaatagatgatccaattaataatttttacaaaatacaaagttcaaaatgatatttatttctaacggtaaatcagaagtgttggttcggatcacgtgggaagcatgtgacctcttcgactagataaacaatatttaaggagtataattggattatttgaggaaaatttacatggtatactaacttttgcaatttttttacaaaaatactg

SEQ ID NO: 121722 - DNA, 968 bp, Cannabis sativa
tggtttgagtttgaggtaatttcttgcaaagtatatttgatttttagtgttgtaatttcttgctgaaattcttggggtaaaagcatattttgagttgttcttctcttgaggttgcatgtgcttgattttgattttaatcttagtaaattgagtgagaaattgcatgatttggctgggattcatgtttgttaagcttggattgtgcttttaggttattttttttttgggaaatcagcagtgtttttcattattccaattgactttttacaacctattcagcaccttttataaaacaaggtctggttttttttttttccttctaattgattacattggttacaatttactaaaccatgttgtatcccctattgaaccctttcttggccatatactttgtattctagttttacaaatattttttgtcatctgtacaatggtcttcgggtcttcttttgtctgcaaccacaaccttacgttccttgctctccaaatgtggtataataatgctgcacaggcagcagtaagaacctgtcttcggaaggaagatgtggttctcttctctataactcgcaccagatcatttcagttggttgatggagtcttccatcccagccaagtcttgacctggtttagatattcattagagaaagggcattgaaaaaacaaatgctcacaagtttctgcattccagagcagagcaaacaagaggcatcagttgcaatttgaatttgagcaaatggtctctggttttcaatctattttgaatagcaagccagaaaacaaaactgtgtttgggagtatttaaccgattccaaacttccttactccaattgaccctagataccgtgggacacagccacttgtagccatcagctactttatatttcgtttgagcgaaggtgataggatcaactaaattcagcaacataccttttagagctacaatcttctgttggaaatattttacc

SEQ ID NO: 121723 - DNA, 1312 bp, Cannabis sativa
  modified_base (53)..(57): a, c, t, g, unknown or other
  modified_base (676)..(676): a, c, t, g, unknown or other
  modified_base (1213)..(1213): a, c, t, g, unknown or other
  modified_base (1255)..(1272): a, c, t, g, unknown or other
actaactaagataatattgttttgtagtctcaattaattggttttaattaatnnnnnagaattctaaataagactatgtcttgtttgtgaatttttaccaaggaagggcttaattgaaaagaaaagagaattcaaaatttatttattaattaagagacattagaaggtctaattaataaatatatttaaatagtaattttatttgataattttttatagttcaatagtaaaattagtatttaaataactagagcagaaaaataatattactgaagaaaaacaagtttgtttcattaaggaaataaaataatgacaaaattctaactcatgggtttcattaagggattttgccatgaggtgaattctaagtcattgaatctttctaattagctcatttagctctaaccctaaacccaatgaatccctataaatagaacattaagagtttttgattcaaaagaagactctagactctctcttgtctaacaaactgaatcaaaagcatacctcttaatttctattattatttttcgaattgctcttgagttttcttcatagaatttcgtggtccatgatgattgagagtatgtccactcatatctaagcaatacctaacataatgtggaagactctgtctaaccaaattgaaagaaagaagatccagattcagatcttnataatgctctgctacagacaagaatcaagggctaaagatctgaatggatggaattgggacccacagaaatgcaggttgtattcccctccggactcccaccacacgcacttgaacgacacaatcacacttgagctttgtgtgatattcacggtcactgttggaccaacttcccactcccttttcatgaaaaaattaactattatacgaatagagaaatgctaaaagtcaccaatggtgcctagtactctcttatgtgttattatcactattagtccaattaaatatcaagtctcatatggtttaatgtaataacttttagggacgattgctagtcaatcgcaaagtgatcgacatgtgtctagagatgctagttaccactgatgaccaataacaatactctatatcaatacaacacaatatatgtatattttaattctttacttttaattggtctaaatagtttcggtataatatgagaaagaatatgcaccagccctactttagagttaccctatatataaagagtaatttgcggcntaaatatttaagtttaactcccagttgtaaataaatacctannnnnnnnnnnnnnnnnnaataatacctaagttataattttaaaatttttgtaagtac

SEQ ID NO: 121724 - DNA, 1555 bp, Cannabis sativa
  modified_base (1500)..(1515): a, c, t, g, unknown or other
caaagtattatcaatagttaaaaaacaaagtttatattctgtaaaggaatttgtacctaacaaatgtatgcaacctcttatttaattttgtaagactaagtgacttaaaaactggtcttcatgccacttacggggggtattaaggcatatcgtacgggcaaatataaacatagattgttcaagaaagagagtcttaaaaaaaagggcatggggacgggccataaaaagtctccccttaagaaagaagaaattgtcttaaaagtgaggggaaggacaagatatgtaaaaaaaaaaaaaaacaacaataataacacaagagatataagcaaatttcttagtcagcctgaggaggaagacgagggcccctgtgttcctccagcaccgcatccagcctcttcttcttcttctcccgtaagcgagccagaacctcttcaggcttagggtaaaaatttaggcaaagattctggtcattagctgtctaggccatgaaaaccctatcgtcaaagcatttcttgcaatattgacaggtaattggggcctagagagcatccctcttcgccttagccgcttttttttcggcccgctccttgaactcgcgaagcctcttcacttcaacggtcagggtagctgttgtttgcaagtctgcctgatgcggctcctccaaagacttaagcttggcggtcagttcctagactgcctcctttgagtcccgaaggtcccgcctcgccgcagccacaatctcatccctggccttcaacgcctcatccttagccttcaacacctcccgatggctctgctccataagggactccttctcggctttctcacggattgctttcttttgctcctccgactcctgaagactctttatggcctcctccatgcccttaaattcggacatggtgtatttatgatcaatcagcgtcttcgagagacgaccgatttctgcaacaatctagcaaccaacaaaaaatatgatattaggcaccaaaaagaaaagaggcttgcaaagtctaacagataaggactcacctcagtatgggccgcgcttacgtccttgatttgatacacaggattggtagaggcacaggtcgcatatctcttcattgggagttaagtcaggccgacaacgaagtggctcattaattctgaagcgaagggagccagggtaggaccgatgaagcggctaaaccagtcagtcaagggatccaaattcaagtctcagacgttcccggtgtattcgctatgagtaaatctatcatgggcatccttacgaatcttcttcagggcgtctacctctgcgttccccttggtatactcctccgtggcataattgtttttgacaattcggagctgagtcctttcctcatcggcatggatggggttaagatgatgccaagaggcacagtatactcgtccacctcggacggaatccctgaattagaactggaaacaggagtatctacgcgcctcgacctcttcttcttcttcttcttattnnnnnnnnnnnnnnnnttcttcttcttcttcgtcgtcgtcccctaaaaagttgttc

SEQ ID NO: 121725 - DNA, 1896 bp, Cannabis sativa
gtcggtagcgaatttcgcaaaaactgacgctgaaaggggttaaaaaccgcctctaaagggggtttttgtagtagtgtaatttgtaatgtaagaaacagtctatatatgcatctttatatatactagatgaaagttacgtggcgagtcacgtaaatattagttttatttaagttctagtgtttttttaagaattcaataactaattgtaaattattttttaaacgatgtgttttataaaagtaaacttgttaagaataccataattgtgtatataacttatgatatacacattgttattaataataaacattcagtttatctcagtatattcatgctcatatattaattatccttaatgtgatgaaataatttatgataagtcataacaacatatgacttcaacatttactctttgtttcgggaaaattaaaaggatcaatatatgcgttttggaaaataaagagtaaggaaatattatgtaacgaaaatgaatgaaaaaatatcatcttaaatcaggagaaaagaattattagttaaagtttcaatataaaaaaccttatgaaaaataaaactaagtttagagttgcagttattttacaaaacagcttcttgtaagagaaaactacatccatttcatttatgtagtaactattgcagcaccaatacaataaaggcagctgcaaggcatatcctagtccgagaataatattagcagtagccctaacaaaatagtttcaatatgtaatgcaatttatttctatattacacacacataataacaatgtgtgaaataagggtgaatttatgtagattgaagcaagattgtcacactcagatcattagctacaagaatctcagctatggggttttcttactgtgtattagtaaatgaacaagcaactatgagtcattaataccaacagaaaatatgaaaatcaaaataggttctacttatgtacctgaacatgaatatgtctagtccttgaagaatcttcttccaaagaaagcaataatacaaatcttgggtttatactacaaatctttgaaagaaagaacattaaaaaccataacaaaatcaggttagattatctaaagaaaatctcaagttagtgttgaattaaaggtgatgaaaatctagtgtacatacaaaagtaatttgtttacttgccagaaattggcattcttaccaatatctttatgaatttaataagattacaattataaccactcagatttcttctcataatttaattttccttttttcggctattatcccctttatcaaatcttttacttctcttctcacttttctacttataatgttaaatgttaatggcaaaaaaattaaagatttgttatttaatttcctaattggttatactgccatagtattcatagtttttcaagttagattataattaaaaccacaggtctcctctcttataagaactttctcttctgtctccctaaaaatccccttttctacttacttgcttgccaatgacactaaaattagcatacaaagcagaacataccgagtctcagtcacagtcaatgaagatgtcatgctcgttgatcaaattatttgacatctctccctttgtccacatagtggacctagagtggctgaagaatgtagcctttcgtgacaaaattgttgtggccacagcatccctgttggcaaacccttgcattaatatggctctagtgtcaacattttgcgctatcgccactgttaaacctttgtcatcccatttaacattttgcgctatcgccactgctaacccttgcattatcgggcaacgatgaacaccttcaagagagtccaaaagatagatgggaaacccatgaatcaaatttccttctctagacttccttttccaaacatgtaacagt

SEQ ID NO: 121726 - DNA, 1598 bp, Cannabis sativa
ttgtgactaaaaataaaaaaatttgtagtgtcatttccatcaaacataaattaggtacaacacaaatatagttaaaataaggaacttgtagttgtactgtaaaaataataagccaaaaccaactatacatgtaaattaacaatccaatgtgaccaatctacaatgctatttttgagtcaaaaaatgagaaacatcaatcatttaaatttaaatggccatgcagcatactttaatttctatatacatagtaacaaataataaatactattcggtattaggtatacatcaaatttaagagactcacatattgtgatagatactcttaagtatgtatgtttgaaattatatatattaattcgtatacatatacttatattatattatttattattatttataattaaggaaaaaataattaagcgtgatgtgtttgtctaacagtaacatataataggaggttataaaattttaatacaattataaaaaagagtttgcgaattctcgaaaaatgatgatcataaaattgtgtaattcttttatccacattaccactctaattaaattagtaaaagatattactaattgtttatgagtgaaataattgatagttattgaaaatgtagctgttgtagaattgatttatttatttataaagtgtataaatagttcaaaattaagtaatttggaacactttagagaaaaattgaccaaactaaaaaaattagtaacttgtaaccaattactatttttcttttcatcatatcaattgcatgtattattgaatgttgagagtttttctaacaactcaaaaaacttttcaaatcacctaattaatactaacacgcgcccactttataattggtaataaccaagaagctttatggtagttattcattttcatataagagtaaaaaaatgacttcataagacgacaaaaatcattaagagccttgattaagtttattgtgtattcttgagtattcttgttcttattcttttctcattattttgtaatcttgatctaatacatttatatgtgtattttaggtatttcattgtaatcctgcatatatttttttgagaaaattttcaacaatttaaaattctagaaagtaataatcaaataatttgtatatacattttagtggatggtatataacatgtagtaactagtaagcaatatgatctatattcatggaacattatgtagaaactattagatgtaatgttaggtatgcatggaacattgctttcagtcttatgtatatacatatgacttaaatatatatatatataaatgctggcctggggggcaatagtctacgtctgcccctgcctatatgcaattatgcatggaacattgctttcagtctttattattttggtgagcgttgctttcagtgtctataatttcttattttactttttcttagatatgtatgcatggggcaaatcatgatcactactatcttgtggctaaatataattcattatcaaaattaataataattaacatccatctcaaaactaacactactacaatgttagcctttagagactgttttttcacccctatttataaaaagggaagctaaagg

SEQ ID NO: 121727 - DNA, 720 bp, Cannabis sativa
tttatatgtatttaataaaagtaaattatagtatttttatattatatttttatcacatgtaagaaaaatattaaaaacttaaacatataagaatctttagagtgatgtggaatattaatattaaaaatataatatataaaatatttttaagaaaaaataaaaaataagatatttaaatattattaattttaaatattttatttttttaagatatcataatgtaacattcttacttcaagctttcattgggtcttctcccacagacttatgcctcttatacacgggtacgccactctgactgcttcatagactgacggctggcccttacagactaacacgagagttttcagtgtgttttgttctcacttgcacgcttcctaaaaagtttaggtcacctatatgaaattactcaaagtcaaagcacgcttaaactgtggagttctttcgtaattggctaccagaaaataagatgcaccttgttgatataggtagtacaaattaatctatttaagtcatcttcaattgtgtagtcacatatctacacaatttcagaatcatcacacttgaccttcctccactgacttatggctcttatatacgtgtacgccactttggttgcttcatggattgatggctggccctacagaccaacacgagtgtttttagtgtgctttgtcctcacttgcacgcttcctaagaaaacttcccaagaggtcaccc

SEQ ID NO: 121728 - DNA, 1735 bp, Cannabis sativa
  modified_base (1671)..(1671): a, c, t, g, unknown or other
tctgagaattagaccctccactagcgtctttttgttgttgattctgttggctttgttgagattaatttctctgtgggtagaactcttgttgctgctaatttggaaactacttttgaaagttctgccgacgacccctttggttgaaaccataattgttgttttgatagttttcaatggcttgggcttgctccattggcaaactgtctacatctacatggcaggtatcatacgtatgaggtcctccacatagtttataacaacttgagcttgttttgcttgagcagtcaccaacttcgttaaggcctccacctgggctgtcaactttgtcattgcatcaactttatgcatacccgcaacttttttagattggcctctctctattgaccattgttggttagtgatggtcatctcttcaagtaattcaaaggctttattcgcacttttcctcataaaatccccaccaactgcagtgtctatgagtttacggatgttgctaaccaatccattgtagaagttgtgcacttggagccacttttcaatcccatagttagggtatttcctcaataagtccttgaacctctcccaagcttcgtacaaagattcattgtcttgttggatgaagttgttgatttcagctctcaacttggcaatcttcgcaggggaaataacttggaaaggaatgttagggtcaattcatcccaagtgttgatagaattgggtggcgaaaataccaaccaactctaggctcgctcccttaatgagaatggaaacaaccttaacctgatgccgtcgtcactaactcttttcaccttaaatgcctgatagagctcttcgaagctagcgagatgcatgtttgggtcttctattggcagtccctaaactggactaaagattggaccatctgtagtatggtcggcttgatctcaaagttgttagcatcaacgacaggtggccttatacaggatctgacccttgtcaaatttgatagcaaatagtccctcaggctacggtcattgtggttgcgaccactagcctggtcttctacagcacctccattgttaccattattgtcgacgttggcgttgttagccatatctacttcgtgttcatctctattgtagctttttccaatattttccttcttctattatgtctgcaagtcttctcaattttaggatcaatcgacaatatggcagttgcacattgacgtctcataaactagttgaacctgaaaaaaagataagaatttgaaattagtactaaaattgaatagaaaaaccaaattagaacaaaaatttaatttttcatgatattaactaacaattctcggtaacagtgctaaaaacttgttgtggtattctcaacacgcaagtatacgtatcgttaacaagttatatactcacaaagagtgaggtcgataccacaaagattgtagttaagtactttaaaattaaatctttacgtctatttgcctatatataaatttaaaagaaaattaaaatcagaaaataataaaaaacagtgaaagtaagaagcatgtaaattaataagggaattaacaatgaataaaagttaaggctttcgattttaactgtatctattgattatggtttaatattatgttcctattaccaaatctatgcaagagcaggtttactaaggtaatttatngtcttctcagatatataaacctcaattacatgcaaactttctactctcgtgataaatttaacat

SEQ ID NO: 121729 - DNA, 830 bp, Cannabis sativa
cttccatgagtcacttgagttgccaatcttgcccagaattaagaccccattcgataaataccacggcattcttgctaggattcgagattgtgtttgttcggaattgaaagaaaaggtaaggaacatacctgttgtgaatttcttttgaatcttaatattccattccgattccttaaatttccagatcctccccagcaagttcttcaagaatcctctgctgtgatccactttcgaacatagccttccccgaagattgtatttggcaatcatggtggataggctatgatccacctcccaatcttcttcatccgagacatgaagtttactggtttttgctaacagttcctccattgtgatggcgagtacacaccaggccgatcaccggaatcccttcgtcttgagggaaaagaaaggcaggggttcgaacccagagccctagcagagagcgcgcgaaaaaatatcccttttttggattgtatgaatttaatcgcgaaatacggttatgatttcaattgccttcatggcacgtataccgagatgaagttatattcctttgcgtggctgatagtttggtacacaaatgcacttccaacaatttttcttatttatttcttcaacttattattattattatcagtaaaaaactgaaatagtgagccattcacacattgactcactttaataattttaaaatgaattaatttaattaccttttgttttatttttgaaatgaattaaactgaaatcattatttcacttctatgtccggatagaagctatagattacatatctatgattagtgctttcactcaattgtactatcgtgttc

SEQ ID NO: 121730 - DNA, 834 bp, Cannabis sativa
actttcagcataatccaatcttgtctagttcagtccaatccagcgtaccaaacgggcccaaaaggtttttatacgtgatatcaacaattctttaaattgtaactagtccacatagctacgcccagatataagattaattagatagatctaaaaaatataaagtaattgacttatctacaaatagactcccttttgttatatgccgcaagcttgatgtattctaccttctcaaataaatcttactgaaacttcaagtgctcgaactcccttcgatctacttgaagagtgcttgcttcctcctgaggtaagacttgaaaaactttctctcgaaagcttgatgaaccttcccctaaaggcttgcactttatttgttcttcttctctttgtagacttgattacatacactcaagacaatacaaaatacataaacatagagaaagagatgaccaccatctcctctacacaacagatacactctttttttacaaaataagaatgcaatacaaagagatgaaagagatgctaaatctagctgctataacatgtatttattattaatatacacattatagaaagcccatacacggtctgaacaagactacagttcacaaaaaacttccctaaaaatgatcttcaatcaacttaaaaatttatgtttctgtacctacagaattgtgagctgtaagtgtgattttcttattataccaattcaattttctctaattaatacctgatcaaatattcaagttttctaattaaagttttatgctgtttttttttttatgtttttttcaggtagaacttcagtattttattgagttaggagtgttgttt

SEQ ID NO: 121731 - DNA, 2033 bp, Cannabis sativa
tggtaaaataaattccaatagaaacatgttagtagcctaatagctgaataggcgcatgttttaatttctaaaataagttataattactaatttattcttggtcgcaatttgactaggctaactccttgtttcccaggatgttctattagaatggaggccaggcgaaacacgaggagccaaggtaactctgtcagattaagtggcggttagggagttcaaattctcctgaatatacatggctgaggcagggcatgcggtcaaggagatgataacccattgcaggttgcccaggattgggaaaatacatttgcagcaatgcaagccagaatcaatgaataagacgaagagatcaggcgtttgaggcagcaaggtgcttttgaaatcccactctagagatgcaggtggctcctgctcctactgtgcaggcaagagaggttgctactatgaaccagatggaaccactatatgaaaggttctgcaagcaggcacctcttgtctttctaggaggtcctggtgtgatgaaattcgaactgtggctgatagttattacataaatcttgaacttcattggtgtcactagcaacgatagagtggcttatgccatattccaattctaggatgatgccctggtatggtggtttatggtggctttgactcgggatgtcactaccgttatctgggaagagatccaagaatttttcaatgcaaagtattataatgatgcagttggatgtgcaaagagaaaagaatttatccaatttacttagaaggaaaatatgtctgctaccgaatatacaactcagttcaataggctggcagggttggattcgagaatttcaccaaccgacttgagtaagaaagaaaagtacctggatggactcaatcctgaaatcagacatgacgttatgatcaccaataattatgatacaacctatgttgatatggtggggaaggcactattagctaagggtgcaattgagtgcatccaggagtctcgagggactcaagttgttgttggagccactactcctcctacaactagttatggtaggggttgtagtgactcgatcgctgaccagaagagaaagggaccagctacacctggtggcttaaataagaacaagaggtttcgagggaaccagggtcgaggcaaatgtcaaggtggttctgaaacctgatatacttacccagaatgtcccaattttaagaagcatcatctaggtgagtgtagagggagatgatgtttctagtgtggttttcctagatactataagagggattgtccgcaactcaagaaagaagaacggaaggcaagagcaaagcccactccaacaagggtgtttacgcttattcaggcggacgcagaagccaatccttcagttgttacaggtcagctctcggtcaacaactcttacttctctatattatctgactcttggcccactcattcctatgtggcggctagaatttttgataaactgggtaagccatttgatagttatgataaggggttcagaaccctactacctggtggagaattagttatctccaattggtgggttaggtctatgccgataagaattgaggatagagagttgagtgttgatttagtagaattgggtttagcagattttgatatcatacttggaatggatgttatgtccaaatacttagctagtattgattgtaagtagaagatggtgatctttcaacctgagggcgaggaaacatttatttttgtgggatcaatttaggtatcccaaatttcagtattctcagtattgaaagctagaaaattattacaagatggatgtctagggtttttggtattggtattggataccacatgacttgaatccattcggccagaggatgtcagagtggttcaaaaatttctagatgtatttcatgatgaacttccaggtttactaccacagagagaaatatattttgttattgacttagcactgggagcacaaccagttattaatgcaccctaagttgggttttgtgccctaaataaaacccattac

SEQ ID NO: 121732 - DNA, 621 bp, Cannabis sativa
gataagtactatatatatgtacatatatgacatatataaacaatatatatatataaaggtatataggaggagggagctcccttcagtccaaatacaggaagcttaagaatcaatttgtctcccaattcattcactcatttactgagttactaattaattaattcaactcagcatttggatgaatgattcagcagctaattgactcataactgccacccatgagtggactaaagaaagctctctctccatctcttctcatatccacaaaaaccataataatatatatataataagccaactattcaaggatatacatatatagaactagctagctagggtttgtataagtatatatataaatatatatagagagagagaaagaaagagagaattcaaggctaggattggcaaaactctttattatctttctctttctagctaggtcgtggatctaaaagaagggtaggaatggctttatataagctcaaaaaaagggagggttcaatgatcatcatgactcatcacactactatatatatatacgtatttatttcttttttttatataaaataccattttggacctctgttttacaaaagttatcaattggaccctgtattt

SEQ ID NO: 121733 - DNA, 764 bp, Cannabis sativa
aagagaaaattactagatctgaaaaaagtggagagcacgtcgctagagatgacgattgtggccagaatctaccgagaagggagatgccggtgagtttgagaactttctgacattttatataaaaatggaaaaggaataatacctgcaggagagagagaggccgccggaggagaggagatcctgggttgggcagcgttttcagagcttgaagagaaaacgagatcaccggcgccgcttgtatgagtgagagagaaactttagagagtgagagagatgaaggaaccaaatgatgaagaatagctgaatagggtttcgggggcaaatgatatatcaccacttttaccgacgacacaactcagtcgtcgttaatatcaccaaaaattaagccaattcccaaaaaccccatgcattaccatttgaaatgagttataactatactatatacactcttaaatatatgcttttatatatatatgtaaagagtgtttctgtttacataaaaatgaagacttttaacttaaagttgtaatataaaaaaacattacataggcatcaattgttgatgggaatatatttcatgattatgggtgaatgaatttttcaactattctttgttgttttcatttgggaattccaagctgacagctacccacttgtcttctctaatggggagcacagtaatgtcttctgggaatggatgattgggcaactgtgagtacactctcaccttgttgcaaagcaagtaactcttcacatcactgctc

SEQ ID NO: 121734 - DNA, 837 bp, Cannabis sativa
  modified_base (786)..(799): a, c, t, g, unknown or other
aaatactacaaaatattgtagccaattagacttatgacccacaaaactcagaggccaaaattaaaaaaaaaaaaaattaaaattatataaattttttttaataatttttaaaaatatcacgtttaaaaaatagtctataacctagggtcttgcaaccaatattactacctgctagtttactacctactattctacctactagtttaaattcatttggaaaaatatgcactctaaaaaaagggggtatattgatgcacattttttattattttttatatttatatttattataatcttgattttcttagtatgataatttatattgtagttttttaatatattttataaaattttaagaaattcaaaataatttattgtgctaaaaataatattcaaatagcatgttgtatgcatgtctcttttcttagtttataattaaacatgtgaaataaattgtttgaaatatactttatatactataaattattttcaaaattcataaaaagttttaaaaatgtgtaagattaaataattacaatttatattgtcataaaaagatattgaaattataactacctgaatataaaaaatacaaaagtgctacaattatacatctattttattattttatttttttggtgggagagggtgcaccatattatttaatataagcagggctggccctagattaaggcgagttaggcctgtgagttaggcccgtgtttagaggccattcattttagaggcccgaataaaaaaatactttttttaaaaatatatatattnnnnnnnnnnnnnntaaaaatatcatttatctttatagtaaggatccaaaaa

SEQ ID NO: 121735 - DNA, 2483 bp, Cannabis sativa
acaataaaaatgtaaccattgaaacctcttccttatatatatatatatattatatatatatatgaatagaataaaaatttattgttttcttttttcattttatttcttccaaccaaacatcacttaattagtattacaaaatacaaagtgtaggagtatttgttttcaatatcccaaataaatattaaatcacctcaagatcacgaaaaataataaatttgattaacttaatccttcataatactttaaattatcttgaactaagaatatattgttcaaagtcgtagcccggttcccaccatgaaattattaaatgattttcttttgggtatcatgatatgcaaaatcctaattcctaattattaatctttataaggaaagatatgttacgtaaaaaaaaaaagggttgaggcaaggcgtgtcgcactcgtactataataataatattaagtttttcccgtgatcttttatatgtggacttgtggagatatttcaacatataataataacaattttagctactttaataagtgtagttgttgagattttgattgtattttttttccttattataaattataataatttaacaaattttcttctttcttttcactttttcacttaattacatttacatataacatgtcaccataaatgtgttataatatatatttccgaatcttgagtatcagtttgagattgcatgcatacatgcatgagcatatcaaagtaataaattggttatattataacatataacatgcatgtttcaaattattttgagaagatatttctttaatggaatagttgagttgttacaatatcagcaaacttccattaaagttaatgatattggtcttatgatgttaaataacatataaaaataatataattattattaatgtaattaatattgtttcatacatattttaattaatagttaatactaagtatgtttgatgtttggctgagctgttagaatgaactgcttaatttgtatcaattaaatattgtatgacatggtgtcaagtacttccagcagttgtggggctacttgctgtggacctctggtgatcataatggcatatataggcaatgtattcggctgaaactatgttcccatataatgttgggagaacgtacgtgccaaactacaacactctcttcgagactgactagacaaaattctcatcgcattttttggatctacatattttagttttttgagggactcaacaaaattatgaatatttataatgctgactttgatgcatgtgtgaatttattggtttttgtcagaattaatataatcaactttctatataatttatttgcttattaggctaaaatggaggccacaaatcatgctcctgtcgaactcttgtggctggttaagttcatgaagaagatgaacaagaagaagcaaaaaagaaaaataacaatataaaaaaaaattatgattttaaagtatattttttagtttttattttatgttaaaaatttttaattaaaattattatttgacccaataaaaaaattggcacgtagtattttatttgagtttaacaaatcaattgaagcgtgactttagagactattactgtcaaattttgaggttggctactaatgtgcatcacccttaagttttttgaaacttttatcgtaattattccaaataaaaataacactattatatatatatagaaaaattaataaaataatcttaactcaatgaatattagattttttatttttacattttaaagtagtttttttttttttttctttttgcatttttataaaatccacttaacaaatcaaactaccagaataattcaaaccgtaaaaataaaaataaataaataaataaacaaaaaaaaatggtatatgagagtgattctccaaaatatatataaaatagctaaatggaaaagcttaattttgttattatttttttatattttaaaattgagctattgagttattacattagaaagccattcactttaaatataattttttttttgtaagttattatttttttatttaatcacaaaaatattaaaagtccaatacacaaaaatattattaatggataagcttaattttgttattttttttataatttataattgagttattgagttattacattagaaagctattcactttaaatataattttgttttgtaaattattatttttctttatttaatcacatattaatagtccaatagacaaaaatattactttaatgagagaaaagaaaatatagaagaaaaaaacgaattgtttgatatgatagaaaaatactcgttctagaaaattatgaaatttccctgaggaaaatatcaaaatacattttcttctctcaattttcatcattcacatcctatattttctacccacctcctcttatcttctaccaaacataatgtaactctttattttcaatagctaacaaacattctttcaaaaagaaa

SEQ ID NO: 121736 - DNA, 1841 bp, Cannabis sativa
  modified_base (1776)..(1799): a, c, t, g, unknown or other
tgaaagaactctttgttattatgtccattgctaagtatttgttctttttacttattaaagtctactattaaatctttctttttatttaaaaagaactcttattattatactgtgattttttaatttctaattatgtataatttattttttatttgaatatcttcttttcagattgttttaatatattttaatttaaaataatatataattctaaggattctaatttcttaaaactttaaaaaaaattgtatttcacatatcttataataaaattctgcatagtccacgagtcgatcttattcagtaatgatttcacagtaatgatttcacacagaaaaataaaggctgtaaaaataaaagtatgaacaaaggtttttttacgtgattttgctgttaaaattctgcatagtccacgagtcaatcttattcagatttctgattgtttttcagggctcctcttgtatgagtttttttttcgtcccccttttcatctcacttgccactgtttataataatatagttagcagttaattataaggttgactgtattacaacaattattccctcaaatcatgggatttgagttacaaatcacactaagtaaatgtagtttttatttagaattcacacagctgtgaatgttttgctttcattgggcagagatgagcgcacattaaagatatgcggtaagccttatctcatgaggatgcctcgctgggaatggaaccgagttaactttgatggcgagctggggttcgtcatataacttcttgagattgatattgctttaattctgataactgcagtttctgttgtcgagatgatctttctcctgtgcatcccatattacagcaagataaatgcctcgctgtctatcaccttcttttacccctctactcacacttagtttgtatactgtgttatacacgctaagtattattatatctcctccacgcgacgaggtttaatgcctcatcatgcacacttgcatttacatggtttctcgttgagacacaaatcaacagttagtacattttatctcgcacaagactgttcagtcatccgagttacaaacatactctgctaattatgtttttaatgagttattccatgtcaagtgtacttacgattgtgtgattgagttcttcattcttcccagctagacacatgtcttcttttgatgtgctcgccgaattttgggtataacagaatggtacatgggtccactcaagagatctgattggtaaggaattctagaatttctttggtggaatcttctgtctaagttcaagcaatccggtgcttaattgcgaatacttagtctcagagcaactatccattgactgtgaggaagacttgattcgtcttcccgacaaagaggaaattcgcaaaattttgtttagtatgggaagcaataaggtggcgggaccagacgggatgtctgctttgtttttcaaacattattggtagacggtgggtgacgacttttgtgatgctaccttggatttctttagatcagggcccatacacaggggagtcaatgcgaccaacttgattttaatccctaagactcgtaacccgaccaaaacccatcattttagactcatctctttgtgtaatgtgacttataaggttatctcgaagattatagcgaataaaatcaaatccatcctccccaatgttatttgtcccacccaagccgcttttgtgcctgggagggacatccaagataacaatgtaacaccataactagcataagcgtattacgtgattttnnnnnnnnnnnnnnnnnnnnnnnntaatcaacgaggtttatggaaattgtgattaattaaaatttt

SEQ ID NO: 121737 - DNA, 1755 bp, Cannabis sativa
ttctccttcttttcctttatccataaccatttcaataccctctttaagatgatccctcttaaccaaaaccccatatttctcttcgtctccaattggaacaactacctcccactatctcccctttcaaaattctcatttaattgatggtaacatgagtatattatgttttttggtaacgaaagataaatttattgtaacaatcactgaataatacacacggtaaaagaataactaaacaaattacatagtgtttaacatatcaattacctcttgatctttttttgctaagtctagaaaattcgataaattagaatctcgccttcacaatcatcttaacatgttgacaaatcgatgggatagaaccacaaaaggcctcaaagatgcatctatcccgattgcaccaaacaaagtagaccattgttgccactgcagccgaagcaaatttagctaccaggcctttcaacgaacttaaccacttgtttaccctagtcaaacaaatggctcgaccaaacagtcaaaccaagtaatttaatagccacctgaatgattttactagagaaatgcaatagaagaaaagatccttgtggggtttcaattcagcttcacggacctggcataaaaagaaatcaatggagatgaatcttccaataagatcatgagttaacaaatggccattaatggcttcccaaaggataaacctgtgtttcgaaacacttagtctatgccaaacaattttgtggtagttcaccttatctttgtaaataagagaaagatagaactttttcaccttgaatttcctcaaatgaccaacctcagtcaaagcctctttatcaatacaatttctgagtttggaaagtttttttaaagtacgagcttgcatcttggattggagacaaagactagaagtttatatttttcaggtaaacaacattgatccatcgaacccataatcaatcttgcttggtagagatgacctagatatattttgacatcaaagctatgttccatttcttcccctcacaaaagccaaggccgccatagtccttaggtaaacaaacatgctcccaagaaataaaatgcattttattacgattcccattgctgccccaaaggaattcaggacaaagtttatcaatggtaaataaaatttctcaggcataatgatgttacgcatctagaaattctaaatactcaacaaaacatagtggattagttgagcacgactagcaaaagacaggtggcggctagaccagtcatgtaatttccttctaatcttctctgaaattccctcacaatttgttgctctccatttagtagggcgaagatgaactcccatatattttaacagcattgttcaggtttctatcttagagatactcagaagctcattcttacaatcatcattaatgccaccaaaataaatgaaagactttccatagttagcaaacaatcttgtagttgcacaaaactccataaaagccccatgaactaatcttaaagatctcacatagcctttgcaaaacataataaggttgtcttcaaaacaaagattgaccaactcaaaagatttacacatagcatgaaacctaaagcccttagcatgagaggcttgggttaacaacctagtgagataatccataactaaaacaaaaagcaagggggaaatatggtcaccttggcaaagaccttttttccctttcaaagagtcatggaatcttctgttatattatttatcaataatataatgtgtagatt

SEQ ID NO: 121738 - DNA, 2720 bp, Cannabis sativa
tgtttattttatatcattttagaagttcatgtttaggatgttaaaaacatacttgttaggaaatctagatcttggtaagacatattccaacacataattccaccctttttgacaatatgccctttgaaggacacttttgacaaacagaattcacattttttaacctttgcatacagcttatgatctttgagtcattgtaaaaacatttagagactgatgataacctgaacacaggtccatcttggagaacacagtcttaccctgaagctgatcaaaaaaataatcaattctgggaaatggataattgttcttcatcatcagcttattcagttgctaataattaatacacattcgaagggatccatccttctttttcactaacaaaactgaagctccctagggtgatacactgggtcgggtaaactctaaatcgagcatccattgaaaacgtatttttagctccttaagttctactgaagccatcccatatggtgccttagaaacaggttctatcccaggtgctagatcaattataaaatctatctctcgtgtgacggtaatcccaaaatttttctaggaaatacatcaagaaaaactcttacaactctgacatcctcaggccaaaatgtttcaggtctgctagagtcaatgacaaccgctaaaaatcctacacatccattgtgtaataaatccttagcctttaaaattgagataatcaggatttgataaccttaaacagatccaacataaacaaatagatctttgccctccggctggaaagctgccatcttccatttacagtcaatgatatctgaatacttagagagaaaattcatccaaagtatattatcaaactctgttagttccaactctactaggtcaacactcaattccatattttcaatcctaattgggatagacctaatccaacttttggagagaaccaattctctatcaagcagcagggttccaaaccctatatcaatgaaatcataaggccgacccatttgaatgtgtagccctagattcaaatagtactgtaaaatatgagtcattgacaagaagctgacatgttaccacagaagggctggctgtagcatcagcttgagtaatagcaaacaccggagcatgtatgagctttgcttcttgcttctattcttctctctctatctaaggaagtccttctaaaaatacccaaccatgccacactggaagcacgtcttccgattacactctctaggatggtgtttcttacaccgaggacactcaagataagagtaactatggcgtcaacctctaccttggttcccttggaacctttaattctaactcgaaccactagatgtcgcaaaagtcttcctcttatgatcaggaatcaccaccattcctagcatatctagaattagaaagagtggtggtcccaaccacacatggagtctctaaaggctctaaaagaaatttcactgagccctcggcgcgcagagccttctcaataattttagcatagattgttgtatcacttgtagtaattaccaaatcatctttcatgtttacatttaaacctgccaggtacttctctttcttactaaagtctgtgggtactataccaaaagccaacttggctaagcaatcaaacttcattatgtactctgttaccgacattctttcaccataaactaagttaataaactcttttcgcttggcattgcggactgcctcattataatacttggcattaaatagttctcaaaactcttcccaggtcgtttttaagacgtctcgggtgagggatactaactcccacaacatgagagcgtcttcctagaattgaaatgtggcactagtcacctgatcattccaagtgacacccataaagttcaggatcctctcaatcatcataagccattccttggctttcatgacatccagacatcgcaaaagcactgcagtgcttgtttccaaaaccactcatacaaaggctccatatggttaccaacaagaggttgttttgctggcacaatagtgaccaaagcagctgacacttgctgtggaggcagagcaagtggaccctgttggagtatattttaccagaacctagatttactaacaagtatgtttttaacatcctaaatgtgaatctctaaaacgatgaaattttaacacatataaagcatcagaaactttacatttgttgccgaagaattaaatgactcattcttcttagatctctaacccttgtttctttttgttgtagaatataatcaagatttgtgcccgacactcctttagttgtttggattcattacagtcttacacaatatgattgaggactaacttgttatgggtgggcatgcactcaatcactaaaggctcaaatttttatgtgaagaacactataggattttgaaattagaagagagaaaagaagaagaagaagaagtctcaaaatctctagttgtctgacaagatgtaaactaggtttacagtcatttattggattatgagactattttttttttcattttatactaatttacttaggattaggattaaattatatggaataaaaaaatgataaaataatagcaaaaatagggtatagtggccgaccatgatgtgggcacaacactagttatatttttgccatttttcaaccacttatctattattttacaaatgccatattttccaatttgaatcctataaatgccaaaactatt

SEQ ID NO: 121739 - DNA, 629 bp, Cannabis sativa
gagtccaattatggattattactttgttcattcattcaattcaattcaaatattttgattgtaaattgataaggctaaataaaaaaaaaaaaaatcaatttacaagcttctcctgcactggaaacacattccaatcaagtagtgcttgggttccatgaaccaaggtaagtaacttcactatatgagttgcaaatttacaaatactagttctgtacaaattgccaaatcccttacaataagaaattaccccaaatgccaactaccttggcaaacacaacaagatcccattgcttcttaaacgttgaaatcctttcaacgaaactctagatctgaacaccttcatatctgcttgcgaagatatagctgaactccctttagctcacactaatcaattctaggtcttgtaccgaaacttagaatcttcattcacaaagcttcgagctcaggcctacaagaacacgaacaatagagaggatagattgagtgtgatctcaatctccgatcaaaagtgttgccccaatagaatcaagaaactgatatatatatatatatattatatattaaaagtgcctatctaacagcaattcttggtttaacgattcttggtttaacgattcctttttttattt

SEQ ID NO: 121740 - DNA, 1432 bp, Cannabis sativa
  modified_base (1329)..(1332): a, c, t, g, unknown or other
ggcagtagacttggctcgggagtatgtgtaagtcatcttcaaattgagctgcataggaaaagattaaaacttgcacgggcaaaaatacaagataaaaaccaaaggagaaatacgtactcgggttgcctccttcaggagcccgcccatcagaagctccacagacatctcgtccccttcgaacagctggtcgttcatctcaggaagtagccgatcttggtagtgctgaagcatctccttgcccttcttggtctcagggttcaacatgataggagtgtttgagggcctgggcgggccagacccttccgtgctacctcccttggcacctttggacttgggggccttcttggttggtggctccacctcggacaccacctcctcagagaggtcgataggagactcgaccgagctcttatccttgtgtggtatctccttcgacggtatctcatttccctttgatcgtttgggcagaggggtctggccggagctgtcacccgacctcttcttcagagcctggaacaccttctgagacatagctgcatatgaacaaaacaagaaggttagaaacaagtgtgagataagccaagtcagatgacaattaaatatgagttaaaatatcatgcatgttggcaggagcattctcccgaacaagcaaagatggaggctcatcatctgaagagtcttcttgttcctgctccgtcagaacggcttttccctttcctaccactggggtggattggcgagcaggtctttcaggctcctccctaatcttgagagaccgttcaacaagtgcttggcttcttggatgggccttcttcctctttttgctcggagtctcctatttgggtacaatctcttgttcgggctcaaccttttttgctttcttcacagcctttggtacaaaattggctggaaaaagtttatacttgacaaaattagcctcgaaagtgaagagagagatgtttcgtgcagcaggaagcatttgaagaatcttttgtgccctcttcttgagctccaatgtgaacggagggcggcagtaggatgacacatgctgaaaactggtgtggacagtgtccattcccttgacaaagtagtattcgtccacaaagtaccctatcttagtcacctcagtagtcgtggtgcccgtcaaccatttcttctcgatctgagaaaaatagaagtatcctgacctgttctgcttaggacttgacttcagatcaaagagccaattggtatcatgcggggacggctcaccgcatccttgtgaggcatagagaacgaatagggcatataagtaattgatgcccttgggaccatgggcctatataatcnnnnttccaataagcagatttagaatttaccaagtaaatcctctaacttattaattcctccttgcactactatagatttaaaattccactctcaattatataga

SEQ ID NO: 121741 - DNA, 1349 bp, Cannabis sativa
gtgttcttggttggtagatgtatgaaactgctgaaaccaaactgggatatcaagttaaaataatttaaaactatatatacagaacctgaggcatatttataggctgcagagaatgaattaaataaacgttctgatgctttagtcaattggaattttgcaatatctgaggttgacattgattcctcatcaacttgtggcaacaagtatgtcaaatagaatcttaggacataatgaacaagataaggtaaagaataataataaaagtttgtagaagcaaagaaaggaatacattctttgccaaagctaaaaaagaattgcctacaaactttgctatcctgttctcctaactctgcctaaggagacggttgtcaagggctataataaatatatataaagctaactttcatgaagagagaagaaaagaaaaacagagaagattacatttcaccaagatgattgcacaataccgagttgcgaaaaattaaacaataaataaaaattctactgttctgggtcacgatggatccagatcctccattacttctatgtccttgcgagctgtaaacttctgaacatatcctgtagttatcaaccaatcagtatcttgtgaaaataacacaattaagttacaaaacaaaatcctatttacactcagttacacaaaaggaaattatcatagaaaatatccaacaaccttaagctaattgtgttaaatgtaacgaaactaactctttattatgtaacaaagcaacaactaacaagccctcgtggacaaatctgttcctttcactttgtgggggaacaattttcaacttagctcatccctataattaccaagaaatcattatgttcttacttagttttttcctcaataaaccttcagttgagaaatctaataaacagaatcgcagggtgattgtatatgccaagattcattcaaggagtaatctttctttattccaccatttcataaaattagctgtaaattgagctatagaaacagcacacaaaaaacatagacaattatattgaaattttggtgaaaataaagagagcaaagcaataccaattccaaggcaaggaatgcatttgcagagaacctgttttcctcttttattataataactaacatatcctgaaccttggcaacttctacattttccagtccattcatatactacttctttacaatcctacaattttaaacaaaatcataatagttaaataagagaactaaaaagactatatttgataccactttttggggaaaaattgaaacctcaattttgggatcgcattggaggcggcgttcaatctcgtccgccgtgaccggagaagaatcgggataa

SEQ ID NO: 121742 - DNA, 691 bp, Cannabis sativa
tctagttttttttttttttttttttttttaaagtagaaaaacccgaaagttacagaaaaagagaattaaattctccaaatctagttttaatgcttcccttgcatagagatgtgtatcttggttttcactatgggaaagtgtacagttgtcctttcaggaactttagactttagaaactaactgcagacaatccgattcaatgctgttgagagggacacagattgctgaacactattcaagagtagaaaagagggcttgagcttcagcaaaaattggagttgagactccccatttgcaacttgatagacctgttatcctctgattatgaccgttgataattgaagcaccaaaaccagatattaaaagtttggagttaaaggctgcatccactttcaacttaaaactggtatgttgttgaggagaaaagcattagatcactgcaggggctgaaatacttgttttggtcgagtcttcatgggtggttgattgggaagtaagcatctgggcttcttgataatcctttcaaagattccacacaaaactttctacatcaagaagattgttagttatgcaattaaaaatcttattatttctcatgttccaaatctaccaggctaaacccaatactaaccaaaatttatctttgctaagtgtctccaaacgtatagggtaaaaattctttatatcatat

SEQ ID NO: 121743 - DNA, 978 bp, Cannabis sativa
attttcttgggatttttgtgtattataaggggtattttagcaaaaatatatttttgaagggctggacgacaataaaagtattttgaggggggtaacaattactatgtatagaattacattagtttggttaatatatatagtgtatatttattaacttaatataaatatcaggttgtaaattaatatctaagtataatttatttatcgttcaataaaaaataaaaatatttaacctgtctaataattttattgatttgattagattaattcgatatttatttatttatttgttttttttttattatttttgtttgattttagtgtttaaataattagtttgaaaaaatagatgtatagtatgcatatttcaagattgaaagaggtatagtttaaattaagaacgctatattttgtaaaagttatagattgggtcatctgttttgttaaatgaagaatagatacaaataggatcataaactcattttttattaaaataaaacttaataattactggacctaaaggtggtatgacaaaattagcactaaagcttaggcactagtacttaatattctccttagtatcatattattatggtgtaataattaagtgttagatcttatatataacttaagaaaatatttttaaaaaatatcgctaaataatcgtaaatcaccacttatagaagatgttgagcattagtacccaatagcaatgcttaaattgagcattactatattaggcactagtgttgctcagtaactctagacatgtcggcttacgattgactatcgatattctttaaaagttattatattaaaatatatatttaattggaccaataacgatattaacacgtaaaaaagtactaaacatgacagatacttttagcatctgatcaaatatattattattggagagaggtaggtatctaacataggcttgaggcttcattgggttgcgttctatctatgagttct

SEQ ID NO: 121744 - DNA, 2181 bp, Cannabis sativa
aaataactaaaacaacaactaactaaaacaacaacattactaaaacaacaacattaccaaataaacaacattaccaaataataaaaattaccaaataataaaatagaacaataataaaatagaacaaaacatcatgaaaataaatacatagaacaaccaagttttacaaattcaagaaaaataaaaagccattaaaaatataattaatatatatttttatttttttattacttttttattatataaatcaatataaatattttttaatatatagaaatgtaattggatatttatcaattttttattatataaaatcaatataaatattttttttaatgtatataaatataactggatttgatcattttttaaatagattttgaaattaacatctaataagtgatcaaatttaattaaaatctaacttttatcattcaatctactttaattgtaattggatatctaattttttataattgaattaaactgaatcgcttcggttcaatttaattggattgaatattgttcacccctaaaattagtgagccaatgatttttgtttatttatttattctatatatatttttatcacaagcacatcattatgtgttgatcatatgtagctttcatactttactttttcaaacaagtccaaaatgtgctcctttcgaagcaatctccatcaaaaaactccaataatatcttcattactattctttagatattctaatctaaacttctttataaaaatcatcatttttcacaagatgttgaaaattaggctaattatgagagtacatgacttcttttccagtcttgcttctctttggccgtataaggctaattgttaaactcgactttataattgttattttagtttgttaaaaaaaatattggtacacctacttatacttctaacatttaaataattataaattaaattttatttatatgatagtttatattataattatagcatacattaattaattttttaaaataattaaatgatttacagtactaaaataagagttaacaatataaaaaacaagcacgcaacaagttatagtaatgttaaaaatttatatgaatgatgtaagatctttgtttttttttcttttttgacaaattagtttcaatcttgtctagagtgtgtgtataattagaattttaagtatgtacttagttcacgttagttaagttgtagatatttttagttacaactgtcgttaatttttggtcttgtctctcatctctagagagaactaacatcttagatcgaaaaagttttttgatattgttatcatcgttgtatttttctctctatctttgtttttgcaagttcatcaagattgatgatccatggtaggtgttcttggttagatgaagatgagcttggactgaggggatcttagaggcaacttcttcattagatctgaaggatttcatattgaattgaacattgaagggattcaatgtataaggcaaggggatcttgcttgtaaggctaagggatttagctattttgggtaatcacttaatttaatattagaattgtaagattgtacaaactgattgtaaatttacaattggaaatagtggaattattaccctggttcaaaggaacccaagtaatatcagttggaatttgttttcaatgtccgaggaagcttgtaaattggtgttgttaatttttttctgcttttgcttttaaatttctatggtaaagtgaagttgataacggattaatctcaaaattggtaataagtgaatcgatcttagacattactagtacaagaactttcaaatgatatgaaacatatatgatcatgtatgaaatgtagaataaattgaacatatatgcattatgaacaaaagatcgaaatacttccagctattgattctttgagcttcaatcccacacgagctttggatatgcagaagaaaaaggaaactgattagtgttgggtaatcagacttctaaactctctgtactctctttagatagattttctatcttttcacaaaaagagtagtgagctcgggcttccaagttgttttcttcgtatagaagaaaaaaaataatgcgtcatcagggccggccctgagcataggcggactaggcctgtgcctagggcccacctagttcaggggcccaaaaaaatttatccctttttaaaa

SEQ ID NO: 121745 - DNA, 1281 bp, Cannabis sativa
  modified_base (119)..(122): a, c, t, g, unknown or other
tggaggcttgaagcggggacgttacaacgggtaccctactgtccagaaaaaggtaaatcagtctgtgatcagccatgagtgcgagagcttggcggtgcttgtacatgttcgggccacannnnaccaagcgggttggggtctactagtgaatgtatttgaaaatatctgattttgctgcttaggtcggcacgtgaagtaaacttgtattatattgtgaaaatgtttatgggatccaaaggattatatcttttgatttattgtaaagttgaaaactattacaagtatatttttattatgctgcaagataagtttaaatttcccacgcttatctttctagtaatctcgggttagcgggattagggtttcattatcggttgtcgtagagttcctaattgttagggccttacatactctgtcttggcctatgtgaacatgccacgtcagacagacaaaatttgggataacaattacattttaaatccccaacccaatatgtatctatcttccctaccttccttgtattcaaaaagaattttctattacaaacgtcgtacttaattttttgtacaacactagaaatcattggaatcaccttattgcaatatttttcatttcaagattttcagatgtgatggaaactgacactaagaggacataaatcttccttcaacaagcattatgtctacacctattaatctatttcataaaccaatgaggttctacctgttatacgtaatatcccgctacttccaaatttgctctttaatttgcattctaaaatgacactctaaaaataaatggtcatgcaactcgtctaaatgcccacagataacacaaagcgaaacagaggtgatacaaaatttaacaagcctatcttgagtttatagtcggttctgtaaggccaaccgtaaaagaaatttttgcttgggagtatgaagcctttccaaaatttgagaatattttcatgtcaccatatttttattttttttttcaatgtcttaaacattatagctatattatacctgtgtgatctaaaaaaataggagaagagaaatgctcttttacttcattcttttgaacaatgttaccgtagtactaactactataagaaggagcactatagctacaccaatcggcaccctttaaataaacacagtgcatccatttaacccacatacttgcctgtaggaatgtcagtctgggctattttcgcgggccgggccgggcccccggcccgacgggccgactgtggcccgaattattcgggctcttctcgggctt

SEQ ID NO: 121746 - DNA, 1587 bp, Cannabis sativa
tttattctattccattcctattcttatttccattcccattcctattcttatattttcattccttccaaccaaacgttccgtaaaagttaaatctcgcaattattacaaaagacacttcaacatgttttcttttcagtacttcttagtgaccatggttagtgtgtgtgactatgcaaaaatgttgtagatgaatatggaccacatataccaaccaatttgactcattaattaacacacaaacgttcaaaaaagaaagattttgatattcaaaattcaaacggctcaaaaacaaagttgagtagtgaaagaagaagaaatgtgactttttttgttgcacacacaaaatccaaaactagcaaaaggcaaagcaaagcaaagcaaaacaagccttcttcactcttggccgacagttgagtgagtttgtgtttctcagtgtgacaaatgtacaagcctatgtagttacaaaaggactccctctcataccaatcaaaattattacacatttttcaaatgtaccaaaatattagagtaaatgctaaagaatactagtagtagtattactagttgtgtttatactatatagatataattaattatttgattttacttatatttaatttaatatttattgtaaagaataattagctatctttaaattgatattatgtggttgtgttggatactacaatgatattattataaccacatttaatatgaatactattacgagatatcatattattattgatataattaattatcggaatatatatatttaaatttaatatttattgtgaaaaattgctaactattcctaaattgatgtactatctcgtgttggatactgtaagatctaagtatttttatgtcaaattttgtccagttgtgtctagggtgtttgtcggttgtaactggaaatgtgtgtactaatattatctacgtcagttatttttaggtctttattgttaacaactctcatcgttttgtttttttattactacttagctatttcagtatatataagttgttactgtttgtggagataactaatttttcatatcgtgatttttattatcgaactttgagctttgattgttgtattcttccttttctttgttctatcaattttgcaggtatgattcatgaattttgtggtgttgatccaaagttgcagatcaaaacttgaagatcgcgagttcagactaaagagattttagctacgtctttatcattagatctgaagggagttcagattgaagagaagtattgaagtgaactcgtcattaccataatggaatatatatatatatatatatataaccaagggattttattgattagggtaaagattcattgtattttataaaagcttgtaatgattatgatttgtatttggattggtaattgtaagatacatttttgaatatagtaaaagttattacccactaacagtagccgcctgttaggctaaaattagtccaagtttcgggacgtattttcggttagttttcactctttgtttctagttttaggactattttacgcttgattcttttgtttcaggtccccgggtgtttaaagaaagta

SEQ ID NO: 121747 - DNA, 2117 bp, Cannabis sativa
catctaaacttttacttgtaggcgagttagtctcatcaaaagcaacatgaatagattcttcaacaatattagttcttttgttatattttctataagctttactatgtgttgaataccctattaaaattcctacatcggatttgtcatcaaatattccaaggttttccttgatgtttaaaatatagcatttacatctaaaaactctaaaatagccaatgtatggttttctccctttccaaagctcataagggattttattcattttgggcctaatgagaacatgattcaaaatatagcaagaggtattagtggcctcggcccaaaaatattttggtagtgaaatttcatttagcattgacctagctatttcttaaattgttttattcttcctttcgataactctattttattgtggagttctcagagctaagaagttatgattaacaccatgttcatcaaaaaattattataaggcatcattgtcaaactcaccaccatggtcactcctaatggagataatagagtagccttttttattttgcacactcttaaaaaatttaacaagattttccaaaacatcacttttgagtgtcaagaaaataacctatgtaaatttaaaaaattatcagcaatcacaaatgcatagtatttaccaccaagactagcaattctagaaggaccaaataaatcaatacgaagcaattctaaaggtctagtggttgacatctctttcttggaatgaaaacatgttttaatttgttatccaaattggcatgcatcacaaattttatctttgaagaaagggatagatggcaaaccaataataagagcttttctaaccaattttgaaatagaatccatactagcatgtcctaatcttctatgccacaatcaagaattatcattcataacggctgaatatttatgttttctatcaaaggagtcaacatcaataacatacacattatccttcctttctccaagaaaaataacttcattagttgaagcatttttaatggagcactttaaggattcaaaaaacacgaaaacctttatcacataattgactactactaagaaagttatgtttaatattattaaaaagaagcacatttttgatacatagagagtagacattaccgatatcatcaatgcctaaaattttcccttttgcattgtctccaaaagtgacaaagccactttccttactcttaaagcttgaaaatcttgaagggtcaccactcatatgctttgaacatccactatccaagaaccataagctatggctctttcttgttaattgctacaaaaacaagttcatttgttgtcttttggtactcacataactttgggtcatttctttttagttttagaaccctttggtacccatttagtcttgcctagatatgtaaatttcttcacatgaccatcttggttacaatatgagcatgtaaagtgaggtagactagatgattttacaaagaattttctcaaacacttttgttttctactaggatcatagccaatgccattttttgaaaaaccacatgattgacttcctagcataagatcatagtcttctttacctctagtaattgtatatatttcattctttaggcttatcatatgagcatttaaatcaacaatttatttcttatatgaggagcatgtagcacgttgagacttagctaaaagttcattttcatttaatttaaaaatctcaatttcttttagtagcatgttggtcttctctcaaagatttttgtttttagcaagtaatttaccaaaatcatcaaatagttccttaaatgaattagacaactcatcatatgacatatctaagttatcatcatcattttcactatcataaaaattttggctagaaattatgaccccatcatcaagtgtcatcaatcatgcacatgtttgctacttcattcttctcctcattttttgagtcctcctcatcactattgagcgaatctgccaacatcgcccatcatttgtatttgttattctttctcattggataatccattttcatgtgtttgagcttcttacattcaaagtaaatcggtggatcatctttgctctttctttcttttgagtcactctct

SEQ ID NO: 121748 - DNA, 1309 bp, Cannabis sativa
aaaaggtgtgaaatttaatttggtgatgatagttcaaaggatatgttttgtgatcacaaagccagtttttcatttaatttgcattcttcttttttattaattaaatttattataacataagatgatgaatataagcatgtgtatgatattccagaagtaatacaacatttttttatagtgtatgtatgttattaatttctttctcaagtactacctaataagttctaattattgtttaatccaaaaaaaatatcacaaaagtggtttcttgtcttttaatgcctttttcaactgaattaataaaattaaattcaacatgtccgatcaatataaggaataaaacgaaaaacgtagtgagatattttaatttttattatgagatgtctctccagaaatatatatattattaaatctaggtagtgtaaaatttctttttctccaccgtccattgcttcctgttagtttgtttttatatgatcttataagcgataatagctcgagaaaaaaaagatgcattatttatagctagaaatacagtattaattacacaatttaattattataataacactattattcttgttgaacttatttcaaataaaggggcttccttttggactaataccgtggggaaagagagaaatcatatgcatggaggagagataaatgaattaatgattgcattatgtatacgcgtttcaaacattattaattggttacaatttacaatagaagacaaaaacattcacctaaataattaatttgccacatatacatactatattttgtatagaaagagattatattatatcatatataatatacatatatactttttttttacatgttagagtgaaataaaaactctgatatattaaatgagtacagctgaatccaacttggctgattaggtttttacaaaaaagaataataataataagatgtaaatgtataatacaaaagtaaaggcctaataataaaatgggttgagatattgggcctaaataagttgtaatacttcctttaaagatgaactatataagttttttaagtttatcttggcagtttaatagaggctttgtaaaaatatcaccgatattgtttatggtggtgacatgaattagttttagtgtgccttcttggaccttctttcaaacaacatgacagtcaatttcaatatgctttgttcgttcatgaaatacaggattcttaaaaatgtggatggcggttgtattgtcataatttaggggtgagcaaaaaattcaagaacccgaccaaaccgagtaaaccgaccgtccgaacaccgaaa

SEQ ID NO: 121749 - DNA, 1026 bp, Cannabis sativa
aactgcaaaaccacataaaaatcctgtgttcatattttttattttatagcttttattttttctgtgtgcgattgtcacggttaggctcaaatttggttaatgaaatttgcgttaacagtttggtgctttcattgagagcctttgtgaaaaagctcagaaaaaaccctcctttcttttgaagaaaacccacctttatggctgaaaaacccagaaaatgttaatactccacatgagaaaactcatcattgttctgggaaagagcccgtgggctctagaaggtttaccaacccatggtctcgacgaaccacccgctccaggaggactcaacctgagggtggccctggtatgcggaccacacgttcacggaggactcaacctgacattggtcctagtacgcaaacaacacgctcgaggagaactcgacgtgggagtggcgagaatcttgggacgagggacgaagaaccaaaacgtggaggtgcccaatctatgggagaaggtacttatgaaacggaaaaccaccgcttaagacaccgtctcgaagaggcacaacggaggaacgctgaattagaatatgatgcagtcgcgaccagggcggcacaggagacgaatgctgaaaaccaacctacacctggagtgagaagaccacaaggcaggcctcgtggctcatgaactaggagacaggaacatgcccgggaagaacagcccagggaaaatgagataccccttaaaaattagaaggatcagtcagaaccctctcaccgaaataaggatgggaggaaactgaaaactgatgaacgagaaattcctcatgacaatgaggaggatcttgggactcaatcgggagaatgtaggtcacctgcgagaaatcaccagcgttcttcccaaacccatagagtgaggactcgtacaggccctaatgggggaaatacaagaaaccatactcggggggaaagaacagagcgtgaagaagcaagtgtgacctcgaggcggtcaaggacccacagtcgatcaactcgaagaggagaa

SEQ ID NO: 121750 - DNA, 1805 bp, Cannabis sativa
tctaattggtatcattcttcttgctttcttttttcgggactttggcaggtatgactacctgtttgaccccgatgaaccagatgaattcaaagtcccttgtctatgtaaagctccgaactgtcgacaattcatgaattaggatagaacaacacattgcacagccattgtttatccgcaaggaacactaaccccattcccctctttggcgggatctcacagttcttacaccgaaaaagttgtaatttttgttgagaggaaagaaaaaggaaaaaaaaaaggtagtgtattctttttgtttcttccataattttctttgcagaaatatttccgagcttaataaaagctatagctttgccatcttttttgggttcttggcatttgtacatagttgtgtttactaacatttcaatctcatatgagttctcaacatttgatctcttttcctttaattttcttcttttactttgttgaaacgcatcaataaaaagtgggtttataaagattggaatataaagtgttatgggaataaagttaagaagacacataatatgtacaagtgtaactatggagttagattgttgtgtttgaccataagaacacggcgttttcttccaacccaactggtctgccatggcggatcaaccgaaacaactttatagcctgcgtttgaatacaattctctggcaccataatcatcttcatatgctctcagaactaagtacttgaaaccccatagatttgatactatgtcacaagcttttagcaacacagttgctatttttctcctcctgttattacttatcattatgagtcaaatatgtacaatgtgtatatataaatacacagtattaatatttatagattgggaagaagcataaacctgaaactttccaagacagcaattcctgagatgtaaaggtattcttgtgaatcaggtggaagatggttaagtacgttttggtctcccaaaacggtgacgtctaccactccaacaagtccttgtttggaatctgaactagaactatcctcattatcatcagcctcagcaaccaagcaagcatacctatgtatattaattattcaaataaatgaattgaatcaaatttcttaaactctaattagaaaaaaaataataaaataaaaatttgttcttcttataaagcttctattgtacctatcttggggtgagtttctaagtttatacaaaagtccagcaagcacttcagcctgtaaataaagcacattaaatcagaataagttaagaagtattttttttattacaaattaattaaatataattataaaataattttaattaatgaataccctattttataaattaaagagtaataaaaaaatgtaaaaattaatataatttcttttattaaatctcctaattttgatgattcctatagataattggtattagatagatgttataaaattaccaaaactaaaccttaatgcaatataactttaaaaagtagaagtgaaaaagaccccctttttttaagtaaaaaaataacccattaaagaaataagtactgatatcaaagtagggagagtaaaacaaaccttaaataactcaaagaaaaagtcattaaagataaaagtgggttcataaaaagatagagcttgaacttcagcagcttctcttatctcatcaccaattggagccaatcttctgactttccaaccaaactgagtagccaaatctaccttaacattactcccaatttgagttgtctcattctccaccaatcccacttctccagctggcaaagtactacaactctgcaccacaa

SEQ ID NO: 121751 - DNA, 2002 bp, Cannabis sativa
accgtaaatttaaaaaaaaaataaaaaataatatataaggctaacttttcttaaatatatagcattattatgggtgaccaatagtggtcaacactatcataaaatgacgtaagcaagtaattttttataataattatttaaatttaaatttttttacatatttacactaataaaaataaataattataattttattaataataaaataatataatcaaaatatagttattatttttagatttataatttgttttttgattaactttataaaataatccaattcttgtaaattactctaaaatgcaaaatatttccttatataatgttatgcattaaattattaatgagtttcctatataacaatagttaggtaacataataagtgtttaaatactaattgacacttatcatttttttttattattaatagtatttatttagatactcatcaatataaaattatacatgatatatggatatactattaagtatgtagtaataacacattgcatacataacacattatttatataataccaattaatattagattatatataataccaataagtatataatatagtactaataaacagttaaatatatgatactatattattaaatatgatattgaatagtataaattacaaaggaaagtgtgcgaatactagttattaatattttgatactatttgacaatttatactaattataaatgtttgattctatttttattgtattaaattatattaaatatatcgcaaacaatatatcaaatcctacccaaaaataaaataaagaagtatctattaattttcattatctattagtttttattttattttatttttcaaagaaaaaaattttaattgtaaatgaacttagaataccatataaaatctaaaaactaaaattatataaactcaaaatcatcaatatatcaatataaaattgaagtataagaagctgacatgatactctaaagtcactctaaatagttctatgtatccactccttaattctcgtatttttttaatattttattaggtttataaatattaatagattattatattataaaaaaaaaccctgcaatatttataacatttaagagcatctccaatggtgcactattttacctgctagttgtaactgatctgttaactcaacagagccagttgacgcaacaactttcagagaagttggaacagacataccagaaggcaaaattccaccagaaacaaaagtagttttctttgaacttcgagattttgatgttccaagttccacatgattcctttgacctgaattctgtatctcctccaaatagaagaaccaggattaagcattcttatattttttttcaattgcatttaaatcctctgacaacttactaattttatcatttttttgaaactatttcttttttcaaatttttcatttaactcggaaagttctttgatttcaaatgacaattcttcagttttgcttaccaaggatcggttatttaagagcaggtgtactgggaatgtgtactacaactagattcgtgggagtatgtacacaaacttgacttatcaaagcataaatgtccatttttgggactaattaatgaaaaagttgaattgaatgccatggcgcataaataataaattctcacaataaatacactgtcggacaggtcaaaaaaactcaagactcaacctgtgaggtgatctcatctaaataaggatgacaagattcatgaagtgaaatatttcagcattgtcgggatgttattttcataaatattcaacatctcgcaataaagattttatacctgctcgtaatacgcagcagtgatgattcacctcataatacacaataataatgattcacctcgtaatacatagcagtgatcatccacctcgtaatacatagcaatgatgattcacctcgtaatacatagcagtgatgattcacctcataatacacatcggtgatgattcacctcgtaatacac

SEQ ID NO: 121752 - DNA, 3899 bp, Cannabis sativa
  modified_base (35)..(44): a, c, t, g, unknown or other
taggatgttaatcaacatacttttgagtagatctnnnnnnnnnntaaaataatttccaacagtactgacccagtaggttgttcactggcgcacaccacagtaggcgcatcctccttatgagatttggctggctcaatggtgagttggcctgatgacttcttcttgttggcagttgttttagttcttttgggttctttgatagaacccgaggcatcacttgcttggtcagcttgtttttcggcccttttgtcaacgagtggagggctactgaacatattctccaagtctagattcatatctacgagacaaaggaaatgcatcaacacttaatcaaaaataaataaaaagaaaatagggaacaaattcccacttaaagaaggttaccataatcatcaaatgatggagaaggaggactatagtaattactaaattccctagatcttgtgattaagaatatgttgtaagggttaattggatctaaattccaatctaaatctggatggctcgccctatccaagttggtcccatactgctcggcaatcccatagttagagctagtgcaactaagttggacaaaaaaccttaggtaccaactatcaaacctatgggttatacaatctatgaggaaagggttccaagtataaaagttatatcgactatcttggaatgttactaacgaagtacgttctgccctaagcacagtaggtgactttagcttctcgaggggctattctctcgagataatgtacgcgagccacataatcctggctctcttcgtcggctggaactgggacaattctcctacgaagagtactttggaaacttgtaatcacaagtgtactcatttaaggcaagaaggccaatagtctttagattggcttcattcaagagcaagtctgccgatcgtaatccgaagagaagacttagctggattttacggcactcggccatctcaggagtgggaattggtctcttagaaactgctgtcaacacaataaatgaaataagtcagcaagctcaaagccataaatatgaaaataactcaaaatcaagttcttgagacaaaatttacttacgtattatgtggaatgcagttgtgttgataggagaaagactagttgtccaaaaaaaaattctccttaaactcagttttatttggcaacctcacgacaatcctattgtcatttgtgtgggtgccaagataatagaaaccccctgcacatcgcttcctcatggggattgctttaagggagtaaaagtagactatttctagaggagtggggcactcccatcctaaaatgtgatacagaacctttagacttgcaaggattctgtaggaaattggaaccaactgaaatggggaaactccaagatagttaataaactctttgaagtaatctcttaaggggagaactgctccagccttgatgtgctcgaggctccaagcgcctattccaaacaagccactagtacttgtaccaccacactcctcgcgaataactctttctaggggaaacacctaaatgcgtcatcctcgcctttgattgatgccacaggattttaaaacaccacccacatattctccaatggttttgaccttggattcgatgagttcagcctcaaaggtgacattagggtcctgtggggtctttgatttacgaggcttggtagacacgatttcaaaatcaaggttacctaatgaaaaagcaatagtgactctgggtaaaaataggggtttagccaatggaatagaagataaagaccaaggttcaggccaagctgcatcttgcaaataatgacgtttaccctcggttatctcttgtagaaaacgcctatagcgacttgtaacttcgtcctgattggtttttattaaatggtccctaatttttgcatcatttatctcaagtttggattaaggtttaagaattctgggtttgaatggaacggctaattcctttgggcattctatttctaagaattttggagttggaatttcaaaactagattgggatatttctataaaaaggacaaccccaattcttggaagaaatctatctaaaccaggagcttacgaatgtgataaacctaagtgttttctctaaataaaaccttagaaaattacccagaaaattaaatcaaaattactaaaaccaaacgaagcgaacaaagatgtaattaattacaaaataaggatcataactcagggaaaagaaaagaccagaaagaaaggaatgaatcacttactgtttgaagatgggttttcgcacgacgaaaagctttgcaactgaaattgagatgagtaacgtgatatattctgagaactcctgaggttgaagaatatatctaaagaaattttctagaaaatacgtcaatgacaaagagggtatgcaaatttttgaaaaattggaaatagttttttgcaagaaaagcttgagtttttgaaaagcataaatggtgaaataatggtttcttttcagttttataccatgagaatgatcacctttagattaaaagaatagagatctaatggataggaacaagagagaattggaaaagatggcatttaatgctaatgatgtgcctcaaaatcataaaccgtaaaaattcaaaagcatgcaatttttcaaattgggttaagatagatatacccttgtaatcatttaaaaatctctctttatcaaaaaagaactttttaaggggcaattgttatacttaaaattcggctacactttagaaggtgacacgtgtcaattagtggaatatgaaccgtttggtataataaccttatatcatttaatgcaaacaggaataactcattaaatatagaattaatagagtatattcataactcactgactgtatagtcttatgcgagacaaggatacaaaactattagtgcctatatggacgagacatcaacctgcttcggaatacgtagatccaaggacaagattcatttatttaaaaagaataagtgaggttactcaaatcaaccacggacaatatatagcaaggcatcaatatttctatacataagaaatattgacgaggccaatcagttgttaaacacttagcatattttccacattacaataactaagtgtaacaactgggaaatatgcatgacacaattgcccagtctgcgagaccttatggtcaaagagcagttcttaagtttgctcagtacattggtgctcatgctattgctggaaggcatataattgtctaagttagcattgaccatctacaggcaaagagagatgttgttgttcaattcaacatcaaccgtctttaaagataagaatgataaccagttatgcggttatcaattgttatccacacgtgtttaattgaaacctaatcgatttccacgtttcatgaaacgattatgtatttcaaatttaaatgtaaataatttccaacctatattcctataaataggggcagattctacaaaaaaaaggatgaaaatctttgaaagaaaaactatcaattgtatattgtattaaatactcagaaatatattgaataagatagactcgtggcgtagatttaactgtaaaatcaagtaaaatacctggtgctattattatatttgttatactttattaatcttttataaattatgtgacaaatttattacgaaaaaagcttattattggttaacgaaaatctatgttaacattggcccatactcttcatcttctataaaagcatattctaatggtggcgtatcaacaaactcttcttcatcttcagaatctacctcgccattttcacgtatcaccataactctcttattcgggcattggctagctatgtgtccttgcccctgacatttaaaacactttagctcactagaacgagatgaaataagggttgtttttccttgaggggtt

SEQ ID NO: 121753 - DNA, 1050 bp, Cannabis sativa
ggctgcacgatcggcgcgtcaagctaatcgtacactcgtctcctcctattgagatcgtttctaacatcatgagttttctccaacttatcaaatacggaaacgcctggctgtctatatgactgattggtttggccaatttattgactggcaccataaacttgattggaattgtttggtatgacttctctcgattaattactagacaaggtctgccggcctaccacttggcccacaggtggaacttttgactggggatttgagggctgaccatttatagtctgagaggtattcatcgctggatcttcgtctgtttcacccaaaggaataacgttcacgggctgctgcctggcagtttgacaggctttttgtataaacacagtggcttgcctgctgcgatcgtcaatgattgcttgttgagccttaacgtctccatctgtttgtccctccattcagtaaacatgcacctctgctcttcgaacgcgagatttaccgcagcacagagttcatccagatcatgatgtagggtgttggtatgaccctacatgatccaaagagcggcagggacgttctggatctctgtgtcatctccaatggttgtttgaacattagtagcaggtggaatgactgtgttttgaatgccctagtcggttgctgaacttgtatcccagtctcttacacactaggcgcgatttcgtccacaggagtcgtcacaccgtgacccgcagtctgtagctgtctgggatttacggctggcggaacccttgggtttctcgagttctgcagtgcaggatccacaacttgtggatttgctggatcaaccacgcccctacgagtctgtactaccatcgtacttgtgattaaatttggaataaagagcgatccttgattctgctctcagtggaggcaccaaaatattgacctcacttttagccaacgatagtgagtctaattttgtaagcgacacttagtttaataataatgaaatgtaataaagcgaataaagacacaagaattttacagaggttttgccccgagcagttcggtaatagc

SEQ ID NO: 121754 - DNA, 1305 bp, Cannabis sativa
  modified_base (936)..(937): a, c, t, g, unknown or other
aatgtaaataacttacaaacttcaagatcgctgctacagaattcatcgttgcgcccgagacaagcgaagaggctagaatcccactgattccgacgaatgggctcgccaaccacgctgccgtgtcctaaaggcaacccatcggcggtccagccatattcagcgccgcaatttacatatcccggtgccggagacttctccggtgaagactccttcgagggttttccggaatttttgtcgtcagctccatcgacttggttggcgaggaaagggctcgattcgtcaacgccattgttgtaggcatcgttatggttgttgttgttggtcgccatgatggaagaaatcaaagaaaaaggtttctccaaaattgaaattcggacaggaatttgagacctaaagtaagcactttgtaataagaatatcgataaaaagggcggagagagaagcggtcaacaagacgcgtcaaccgcgtgttttctactctcgtccacgtctctcaactctcaaggcaaatgccgcgagttttatctgctgcggtcatgactacggtaccatgtaggagcataattatactttcgtgccacgtaatcaaatttcagacgtggggagatttaattgaaccttattgtatgtattgggtttctgatctgtagcatactatagtcgggtccacgttagcgagacaccgattattactacctctaactttggaattatttcacaaaatatacaaataacaaaaaaaattataaaaatacagttttatggaatttttaatatttttacgatttttttgatttgatttacagaaaatacggtctttttatgttgtaatcttattaatttgttgttgattttttgttatatgtatgttattttttgttgttattttaatattattttcatgttacttttatgtagttttcttgttgattttannttgttttcgtgttatttttttgaaaaattgttaaaatgtaaaaaataaaaaattctttgaacgtaaaaatgtaattattttataaaaatttgtaccttatgtaattattcctttaactttgggttcaattaaaagcccatttcgcccataaagaaattaatatttgagaaaattacattctataccttttttatattgtcctattttatttttaccctcttttttaaaatctatcattttttacctctttttttaaagggttgagatggaaaatgatcttaaatttggaaactaatttagtaaatgtccacttttaaaaaaaatttaaaaaaatagccaaatctaataaattaactaataaaaattat

SEQ ID NO: 121755 - DNA, 1874 bp, Cannabis sativa
tatgatcaataaagtctagtgacggctactctgtgaggaatcacatcagtcaaaaaggattaaggagtgccctcataaaatccctacagaacctaggttgactctgggagctccgtgatggaagttagaacttcaataacttgaatccaactcactatctttcagtattttgtagcatgaagacaaggaacaacctaatacagggtctgggagctgaaactagatgaacctgcaacccagaagccagcctgggcacctagggtttccactcggcgcccaggttgacatcctcaactaaggttttagttttcggaaccatcttagtgcaaagtgaccaaaaattacattgggacatcaacaagacataccacgtacatatttgaggcattagaatcatatttagaggaagttgatttttgagcacccaacgcctatgttgaaaatttgtcaatctgggcaccttccaagcatctgttcaaagatccgacttttgcattgaatatgtcttcatcaagaatgggtaaatttgtctttttggaggaaaaaaaataagttataggcacaaataacagggcctaactctgacaccttgggctggccctacacccaagttgacaatttacaacttggcaacaaaaaatggagttttcccagaattctttcgagcttcatctctgtctttagaaaatgttgagaatcaactatttctagggactaaatggagctttcaaaagggaaaaagagggactcagcgcctaggttgacacttgggactaggccctacgcctaggttgacattttgtgaacctgggctattttcaattcagatcagcaaaaagtgttgtgggaatttccactgtcataagaaataacgaagaatcaagttaacttagagagaaaaccacaaacctgaggccctagaaacagggtccaatgtcgaagttgacctggtgttgggcccaacacccaagttgacaatcaacctaggacgttgccttcaattgctcgaatgccaaattcgatctgacttttgaatttggtatggttagaaatgggaggagggactccgtccgcatgttcaaaagccatggatgcgttaaaagtattaaaaatagaatcttggagctcgattcaaaggcccagcgcctaggtcaacatttggcctggtacgcagggttctgctcacctaaatttgatgttgttttgactgttcatcaagtttttcacaagtagaatgatccatgaactaagatcaatcaaattcataactttaattttggctcatccataagtcagaagtttcgagtcttctatttccgcaaaatagtaacatctctgagaatgtgtgaccaacttcaccaaaacatataaaaggactaaggggagtcaaaccatcactgaggtatctcaaaggacttcccttggacgtttctacagttttaaagcgtttaagttgacgcaagatgtcaacttgggtgctagaatgtcaacctgggcactgagacctgaactacatttagtaaaattgccataactcactacatttttattcggttaatgcgatttaacttgatttttgaagatatttaagtcctctatcaagtcatgtctcacacacttgtcaaaattcaaaaactatcatcgccaaaatttaccaccaagggagtaacaaaaatgagctctaggtaactcatagtaggacccaccagacataaaaaatcaaccatcgctaccagaagctaatttattacataaaaccatacatttaatcattagataaaaaaatatgtttattaaaactcaaaataaataatttcgtaaaattaattaaacaattttataaaaacaaacaagttaaatatttttttattaaa

SEQ ID NO: 121756 - DNA, 646 bp, Cannabis sativa
tcaaaactgcaaaccgcatcgcaccgtgcggtttaagaaaaattcaaaccgcattttttttacggtgcggtgcgggcagtttgatgaacacccctactataaaataaagattctctaaaatatttaaaagaaaataaactaaaaataacttacatcaatgctctaaagttgttcatcattttaaaatttattattcttactttatatttatagaatactataaatttaatattttatttattgttttaagttttagtgtattttaaagaaattgttgtatggtgtcagggccctctgagtaaacataggatttagaaaagataatttttttggggtcctttttataaaaataaatagtatttataaaaattattaaaaaaatatgtatatttattaattttttttttatttggcccctaataggagtgggccccgctttaacctagggtcaatcctatatggtgtgtgctgtaaaatagagaaaattaaatttttgtgatgcattttaaataatagagtagagattagttgttgggaatttttttaaattaatatgctttccaaatattttaagggtattttacaattttgtatacattattttaattaattacaaaatatgtgcaaaaaaacttattatcatttt

SEQ ID NO: 121757 - DNA, 1454 bp, Cannabis sativa
aaaataattataataataaaaattctaacaattctaaagtcatctattgtagcaatatttcttctttggtctgactatatatcactgtcactaaaaattctttgtacattagttttattattaatttgtgatgtaagtagaaaagaggcaaagctaattaccacattggttgacataatgacttaaaagtataccatgttagaaagtcctgttcaattatctctctatttttgttctcaaatttaaaattaatcctttatttattttatttcaaaatttgatttaatacatgttacacttcacttctctctaagttgtatttttctcatctcctttcacctttgataatataaatcaatttggcatataaatactataaaccataaaaactgtttgaacagaacaacaatatgtttaaacagaaagtaaaatcaaacatgaaataaagaacacaatattataaatgatattaacaatcatttcgaattgctactagttcacgggttcacgccagagaataaaatttattagataaatcttaagtgattacaaaactaaattgacttatacaaataaagattttctttttgaacttaccgtaattgttgtaatctattattctaatcaaatttctgaagtgttgagaccatgaacttccttcaaattgtagcactcgcacacttcctcctgaagagtaactcacttgtacttttcctctcgaaaagtgactcacaaataagtcttctcccgaacattgatgaacgatatctaaagtgtacaacttgcacaattttaacaagaaacaatacaaaataatgtattataataaaatactaagaactaattagactcaagtttttcacgcaatgaagaaactctcctaattttgaaaataatttgaaaaatgatgcaccaagagagatgatctaaaccaacgacctaagggtgtatttatgcactttagaaaccgtctaggtcgtggacaaagaatcaagaaacaatcaggtcaaaaaatagagaaacttcccaaacaagaaaatcaaattttgtttgaattgtccaaataaatacattgaagctggataatttttttatcatatataaataagaaaacttgacaatctttattcatacaacctttacacggtttcttgactaagaaatcacatgagaatagaataaatataattaagactttccttaaaaatataaagataataccaaatagtttaaataattaaaactcgtatttattggccaataaagtcacaatctaatttgaaagacctttcacactaggaaaagagaatatttttgaaaaagcaaatgcaaatatacaactaatttcaaaaatactatatatattatttttatctattttatcaaatatgtcaataaataattttacagaaaaattgggtcacatcacattataaaagggaaacttacaaaaa

SEQ ID NO: 121758 - DNA, 1131 bp, Cannabis sativa
tggttggactgtgaaaaagctataaaacaaataagagtgtggcatgaaaaggatctaacagcacgcgtgttctgaaaaatacccacctgggaaaagttcatttgtctttaacctttctacaccttattcacatactatataatgatataaatatatatatatatataatgtatttaaatttggcatgcatgagaaaagaaaacaatatatacatgtttctattaatttactataaaaaacgtgggcttccttgcatgcctagctataaaataataataataaataagggcaaaattattattagcaatatatattattttttgttatatatacacatcaaatgaatataatctataaatttagaataatttaaggtacacaaattaacattagtcgttaatcattataacaaatggttaactatgatatctctttctattattagtattattattaactatatttttcctgatcaactctcatcacaatactagaaatatatacctcaaaagggtaattattcaaatatatactagtctcttttcttcatcgtacattccatttgtgattggaagaaaagaaaagaaaatggataataggtgggggaaatttggagagagagagaaaagaaaaaatcagatttataatttgagcacgaggctcgaaatataacgcactaagctttgatgaactcttcctcgaatttcaaacgaacaaaatatatgaaaagactaaattaccctcgtgtacaaaccataataatgatgagtgctgaccatctaaaattccctatgcaaatagtcatgtatggtatggcatatatgtatgaggcatacgttaaaatggaaatacatgggtatgtatgtatgtatgtatgagtatatacgtatttaggtacgtatgtactatgtaggtgggtcccacaagggaacagcattttattttggtcagctgctttaccaaggataagggagcagagacgtggtctgagattggtcagaaagtgctggctcttttgggaaaataacaattattattatttacaacaaaaaaaataattaattatttaattaaaaaatttgtacttttaaagaaatattaaaaaataacaatggtgtttagtaatttttt

SEQ ID NO: 121759 - DNA, 1347 bp, Cannabis sativa
tggtaaaatatattccaacatcatgatgcgtaaaaccataagaacaaatatcgtggaatatcacaggatgtcgaaaaattgatacaaactgataaaaaagaagttcatagaactatttaaaattctcataataatgtattattttagactattttgctataattgccattttgattttgtagtggtgattgtgggatgtacaccattgaatacatcgaacacctcatgatgaatcgatcattagagcagattaaggatgatcagatgtcagtgtacagagaacggtggggtgtgaacctgttttagcagaacctcacttaatgattgaagtagaaaagtaggagcttatcattaagttttttatattgtaagttattgtttttttgtaattaatttatatatcgctaattgtcaaaaacaatgtcgctacatattgtgaagtacatcgctatatatcattaatggcatcacaatattacaaaatacatttggaatgaaattccaaattttaatgttatgtcgatacacatcgcacgataaatcgtcttatgtagctaaaatttcatttaatacttcatttgaaataaatgtattatgtcggtgatgttgtcgtgaaaatgtcgataaacatcgtaaattagccaaataatatatgtctctatgtcaataacaatgtcgataaaaagttaaaaaatgtcgacaaataaagacaaatttcccccaagatagcagctccttacaatgttgccaactttttcgaaacatgtcgataaaaatatcgaaaaaagtcacaaaaatcatacatagtaagtataaattggcacatctagtaaacttagtcgctacatgtcgcaaaatgtcgttaaaagctatccctaaccttcagcataccttaatgtcgctatatatcacttatatcgcaaattatcgttaaaacacgaagaaaaaaaactagaaaacgcataattctggcagctcgagtttcaagaataagacaactaacataaaagaacgatatgtgtaaatctattcattttaacctaaatacaactaattcaataataaatactaaataaattacatatccattgcttttttaaaaagttaaaccagttggaagtttgggttgctcttacataattagttgtcaagcaaagtttatggacttcggcaaatgatgctccggcaatgcaggcaagtgtgtgtgtgactttgtagagaaagagtggcaagaatgagatgagaagggaaaaagttttacaccaaaaatacaaaatacacactttattacatatatatcttcacacggttaaaccaacattaatattcatcaactttattttatta

SEQ ID NO: 121760 - DNA, 1321 bp, Cannabis sativa
attttctaccaactttagcatatctgtccagatatacacaccctcggcccgtgacagcagaacaccttcgacaaatgcacacaaccccagcttgtatacatcatttgcaacatcgcatgcctcaaaacctagccaaagggttttaaaggtcaccctttttgaattgttgagatagtctcgcaatatccgatcagaatcacattgtgtagtcaattcttctgacgaaggaccaccgctcatctttaggcttgtgatcaaaccgaactcagaccgcccaaatctagctttagttttacccatgtaaaatcacaattcatcattttttacctcactcactttcttcttccttagtaacagttgatgcacaataaccccaccattccaaaaaactcaaagggcgtctccttcaccttctgagtcaagtcaaaagcttcaaatttatcctttattgaagcgaagtactcgttcctctgtaagttatacgccctggaaagtgctctaacaatgggagaataagttctggagcaatctgcatttaaaaaaaaaaaataataattagtgaatatctcataaagtcgcacaaacatcgtagaaaatcgcataagacaaccaaaaaaattataagctactgccaactagaatcgcataaatatcgcatagtaatcgcataataatcgctaaaaaatacaacacaacatctgaaaatttataaggtactgtgaagtaaatcgcataacaatcgcatagaaatcgcataatctcgctaaaattgcacaacctatattgcatcctatatatcgctcaaaatcgcacaatatcgctgaacatacccataacacaaacactaattcaaaatcgcacaatatcgcacagaaattgcacaatgtcgcaaaaaaatacaaaatcgggaaaaaaaattcagcacgaaacccataattttcctagatttttcttgcacaatttatcacaaaacacatactaaatcacaattccagtttaaccacagattcatccacaaattaagccatattttaaagataaattaaaataaaattttcaaaaaaaataccttttagtcgattgggacggtggcggtggcggggacggtgatccaagactggtgcgattgggttttatgggttgatggggttcgagtgggtcttgttggtcgctggggtcgattgggtcgagacggtcgtcgttcgttggggtcgacaaggtcgtcgttcgttggggtcgagagggtcgtcggagtcatcggagcttggggtcgattgggtctggttcgaatggagggggtgggttcggggtttttgggttc

SEQ ID NO: 121761 - DNA, 648 bp, Cannabis sativa
ccttctcggcttccttctttgccttcttggcttcctccttcgcttgctcagcttcttgcttaaggtgggtattatcctgttgggcattgtcccgatgcttactcacaaccttatattgggataataacttgttaacctcgccctccaagtattcaaccgctcagagagtaaacgattggaagcaaaagaagcctggagaattgcaaacagatgaatatgaaagaggtataaaaagaataatataattataataacaaagccaacctaccatgaagtgacagtccaagctccttaaaagcatgtcttttgcactcctaagattgacaaaatcccaataagggggaagaagaatttgaagtttgcgccaacaagcgactccatatgcttgggcaaattcagtctcgacctcctctgttgcgactgacaaggtctcaatggccttgcttaaagaagcagtagctggggttgcctcgggataaggtgcattggcgtcgcaaatggctggaggaggaacttgttcttggatctcgttgtcagaaacgtcaagatagatgggctcggccagtgatttcttcttatgggcggtggttttcctttgcctcttgggaggaaccacttcggcagcagtaggagaccaaccacattgat

SEQ ID NO: 121762 - DNA, 1392 bp, Cannabis sativa
  modified_base (104)..(105): a, c, t, g, unknown or other
tccttctggttgtttcatgtatacctcctcctccagatcaccatttagaaaagtaatttttacgtccatctgctccagctctaaattaaaatgagcaactaatnncaagatgactctgagggaatctttttttgatacaggagaaaatgtcttcgtatagtcaattccttcttcttgagtgaatcttttagcaacaagtctcgctttgtatcttttagtgttgcctaatgagtcttttttagttttatagacccatttacatccaatggctctcgccccattagacaactttacatgttcctagactttgttgcacttcatagaatttatttcatcatccatggcattgtaccacaattttaattctctactgttcatagcttgtaaaaatatttctaaatcatttctaattccaatatcagattctaataaatacacaacataacctttataaatctttggtttgacaggtctagtagatcttcttaagacacctgaagaatgtcgacttttgccgacgctattaagtaatagcgccgacaaaagttacgcaatgccggcgcaagtcaacacatgcgccgggaaagaaggtcaactttgttttcccacctccagcctttcccggtgcttaatctcgccggtaatagttaattatgccggcaaagttcactcactgcgccggcaaaggttggcaccaaactgccaaaacgtgggaattgttggcaaccttttgtcggcgcatgctagtgcgctggcaaaactattcatttattattttatttattatttacttttgccagcgccgaggaacaaaaagcggtccattttccctcgcagtggaaaaacgtgcccgtaaaagtaggtgggacttttgccggggacatcaattgccccggcaaaagttgagcccttttgaccaaagggacatgttgcatcagtttttactttcaccggcgcataaacgcgccggcaaaagcgccaaaaaaattggcggtcaacttcccgcccaagtgaagacgtgggacaaatttaggtgggaaaagctcagacttcaccaacaggctcttggggagcagtagctagttcagcagattcagcaagttgttcaacagttataggcaactcttgaacatcttgatctactagattattattacccacttgtggatctttaattattggtaatggttgttcaacatccgtttgaactacaggagtattgaccattatcaatcttgctcttgaagtggaaggttctgaaggatctttctcaggacctaagtcccttgattgatcactcctactgactgatgcattttcaaaaaaatttgcattctttgatttcacaattcttgtgctatgagatgggcaatatgttgggttttatgccct

SEQ ID NO: 121763 - DNA, 1125 bp, Cannabis sativa
tgggaagtttgaattttgtgagtaggttcgtctattgtgatttgtacctccacatagggtgcactgcctacttgcacacatatttttctagtctatcaaacataaaaatagtcatcaagttttcaaaggtaactcatagttttaaagttttgtgaggataaatatgtcttcctcaaaattattaatggacactaatttatcttttgcttgatttttattattactttttcaaaaactaattttttatgcccataatatttatgttcgttgtcaagttaagagtgtggtaatctttgaaatgattttaaagcacaattagttcctctagtctttttgaagtggcagacaagacaatagagtttgactttatattttactctttcataaaaaaaaaaaaaaagaaaattctacactattctttatttatttttggtatctacatatttttttgtttcaatttttgttatattcgtatatttgtagttatttaaaatatattataaaatttgaagaaattcgaaaaaatttaatactttaaaaatatagttcaagttgactgttgcacgtcttttttattttatacaaatgtgaaataaaatgtatgaaaatcatcttttatattgtaaattattttaaatttctcaaaatttttaaagaatgtcttaaataattataatatatacgcgactacaaaaaaatatatttttttaaataccagtaagtgatacatcagtatactatttttttaggtacattaattgtaaaagcaccctttcacatacggggagcattttttttttattatttatttttcttctaaaaatacaatcttcattgcaactaaagagactacacaaaaatagacaagtctatcgccctaaaagcagaactagcaacactaggaatgctctcattccaaaaggcactaacaacacaattgagtgtgtacttggtcaaactatgagcaagatgatttgcctccctacaagagaaaacaacactaggacaacctatagcaagggaagtgttatagtgagatttctctcacctaaaaactcgagaccagactcctatttaaaggacacgtatattcagatttttattgaaagctggaatgtccatgag

SEQ ID NO: 121764 - DNA, 1651 bp, Cannabis sativa
tagttttaagccatttctccaaatagaaaacaaaatgttttaagccaattaagcatgagcactctcaaaaattttctttactttatcatttagcatatttctccatttcacctcaaattttatattacatcatataatttagggagtttttcaataatatacgtaaattgtaaaaataattacacaattgttgtcagctattttaatcaatcttataccgtactgtacaaattaatatcacctcttttcttgtcattttcttaagtcctagtttatcacttttttccccttctctttctttactgcatttgcatggcagcttttgtttgtttttttttttctttattttttattattaatttttgtttacatctatgtctaactttctctcttataattttaatagaagaattttagcttcatcattaactaatttgactcaagattggtacctactcaacctatttaattattttaatacgtaataaacatatattttttcactcttacaatataagatacttggaataaaaagtaattttttaatttcttttacatattttagattatttttttaaagaaaacaattaactcaattttaaactcaaacaaaattaaatatttcataataatctttttatttattttatatttaaaagttactatatgtaattaaaaagtaaaacgctaagatactaattagtttttctttaacaagtgttactttgcgataatattatctcatatacatttcattatttaaagaaactaaatagtatcttaaccatgacaaaattaattacattactaaaactctgttttaagtaacaatatatattttgtcttatttaaaataagtttatgttactttttatattcgtagcaacatttttattactttccaaacatatttaaaaatttaatgagctacgataaagtataagtatttaccacataacttatgagttatgagtacaactataagtataataattttcatagtataactaattgtataatgtttaaaatattatttggttactttattgttttttaaaaaatatattaaaataactttattaatagacttgttctatatatattatttagtaactcataaattcggttacttatttaacatacatctagagtactttttttaaacaacttttcaagttaattgtaagtatatttaaaaaattaataattataattacatataaaagtttcagatactatttagtaccctttggggaacttattgaaattgctctataacacaagctgaagaagaatacaatcggttaacttttaataactcgtaatttgtaaaattggttaattggttagtttattaaatttcaataaaatttgaactttgaccattttttagtttttttcattgaaatatatggttaattatttagaaaaaactaaaaaaataaatatatttttttcaatcatctttattggtgaaggagaaaaaatataggcttcttacatttcaaaatgaccatcttaaagagtaaattacaattgtgtaatttttgagcctaaataattagggaaatttgattttctatacttaaaaaactaaaatattttattcttaaaccaatacattttaaactaacaaaaatatgacactttt

SEQ ID NO: 121765 - DNA, 576 bp, Cannabis sativa
tcacaaattttaatttaataaaaggtttagaaaattgctgataaaatagtgtatcacatcggtacaatattgattaccttaaggtactatataacaattataatacaaaaaattaattataaaaaaaatatatagtacaaagattattcatgaaaaaaaattgctagccaattattgagtactacattattatgttattgaccaccttaagatgccaataataaataaaaaaataatttgtaaaaaattaaaaaaatatataaaagataaaaaaatgaaaaataacaaaaacaattgttttctattcttattatatagtagagagtagatatatatatatatatatttataaaatgattttcattcattgtttaataattatttcgcaacaaaaaaataaaaagttattcatagttattaatagttgcggtagatctaaatataaaaataaaatttatagaaaaaaacttatataatttgtaatttccacaattttactgtccttatatctaaagttatatcatactattttaaaaatgtcataatcaggtgataatgttattgacatatataccc

SEQ ID NO: 121766 - DNA, 1391 bp, Cannabis sativa
tattaacaaagtatacctctaagaagtatacctctaagaataattatatcttaataaaatatatacatgtattttataaaattatactaaaaaattattcactcaaaaataattctattatgttataatattaaggattgttaaatgtcattgttgttacattgatatttttttgtatttttgtgttttttttttctagtgtaattctatttaattataattttttaattagaatataatttacttaatataagtgttattagatagaggttctctatatatatacatatgtatgattgagctgattttaaggataatcagagtagaattgtgtttaggacccttacccaattgaagcccccaaaaaataaattacttcatattataatataaaaagttaacaatactaatatataattgtattattgacggtaagcacttcggtagtagtgctattaggcgccactaagccaattcaaactatagttaatataagtacaaaatgttattattattcttttttttgacataatgtacaaaatgtcctttaattatttaaagtctcataattctattatttctttactctccatattttcttggaccgccctcatatgtgatatactctgtataattaataatataacataattaatggatatagtatcttaaacataggcaggcttttatacattttgtgtgatttcaccttttaccaggaaatggattgtagactgtagtagtttaaaaaaatgcttaggtattttgaagctttaaaacctaattgaaatagtaattgtggaatagaagattaataataagatctttagtgggttgtatttatggtaagatttcttttttcatgttttcaggtataaatcagatttgtaaactagttcctcctagtccttttgtaaaacgctttagcataaagtacattaaaagctcaagaatatttcttttattaagtcaagaatattatttttaagtcattaacgttcttcataaaccttccttttaaaaaaacaaaagtcattaacgttcttctttaaaaaaaaagaaaaaattattacataaaaaatataaattgatactttatttacaaaaatatatttataaggtaaatacaacctttatactttttatgtaattttaattaccaaaataccacttatcattgacacaatcagacaatggtttctgggtgattacatcagatgaaggtttcaatcagacaatagttgcagggtggttgctaggtggttggccgaaggttatatcagacgaatgttttaatcagatgaaagtttatgagtggttggtcgaagattgcatcagacaaatatttcaatcagacaaaataactgtcagcaaaatatttatgcaactgt

SEQ ID NO: 121767 - DNA, 723 bp, Cannabis sativa
aaagtcttttattgctttatcttaaatagttttaaacggactagctagtgtgacgtctcgggaaatcgggtcgttacatagttttcattattattcattagatatatgactcttatacgtaccacctaccaataggagctcctagcaatacaaattatcactaattttattgtagcaacaacaagtgatagactgaaactaaacatttcttttaaaaaataaaaaaataaaactaaacatttttggtcatacaaataagcacaaatattattgtgactaattaaaagtaaaaaataattgtacggacaaggcaacaataaaatattgtggtgctaaatatatttgggcaacactactcacaatagcttctctaaatagagaagctttaaaatattttaagaaccttacaaaaaacacactacaataagtattctatttttcatttttaaagtttatttaaaatttactatttatgttcaacatttatataatactattcattgctctaaatatatatttttgtatgggaatatgtaaatatattaatagagtatatatattaaaagaaaaattgatgctcatgaagttttaaaaatagagtatatatatttgaaaaagggtctccaatcactatcactatacagtaatcagaatcggaataaattaatggagaaatgtaacggaataaatgaaaaataatcggaatcaatatttgtaatatgt

SEQ ID NO: 121768 - DNA, 2333 bp, Cannabis sativa
gtgaggagtagcgccaacattggatttcagtgtcagggcactaaaacgcaaaaatttcgcatcaaggtcatggaactcttaatttatctctgccaaaaaatgggcttcaagcgccacgacactacaagatagtgccgcgacccgctatgggaaaatttgaaggatatttcgtgcttggaaaacacaggccgcgacactacaatgtagagttgtgacccgcctgccaatctaatgaaaaatagggttttaagcctaaaccaaaactatataaagatcttttttttaacacttttaagcatccaatcaaggagggatgaaaattgaagcagaaagcagttctggagattgttatcaatattttttcaacgagttcttttcttctactctttttctatgtttctagttaattgttatcagatattttcaattataatgagtagcaagaatttttatttagggtataaatagagattgtttgacattttattctggttttaatgtgatttaattcttctccaattttttatgtgcatctattttattcgtacttaatttctttttattgtctgaccatcaattaaatgtttatgatatcaatacgaaatgtgataagtgagtattggttatgttataataaaatagacacatatttcgatatatgacgacctatatggtttatgcagcaattaagatttttatgcttaatgtctcatatggtttaaacttatcacgagagtagaaaatttgcatataagttgagatttatatgtcttagcccgaatataagtttctctagtaaatccgctattacatgaaaattggactttaagaattaaattatgttaaactaggtaaaatagattcaattgaaattaattaccctaaactataatcattattgatcttatattaattaattgtgttatttgtttattttgttattcaatttttgcttagattatttagtttaaaattcttccattcgattgccaaataaaaacaagaatttaactatttggtatttagctacagtcctcgtgggaacgatctcacttacctaagtattacttgtttaaacaatatgtatacttgcatgttggatttatcacaacaaatttttggtgctgttgttagggactgttttagttaatatcaaaataattaaattttattctaatttggttttctctttatgctttttgctaatttctttgtgtcaatttttctcttttctcagaaacaggtagtttatgtattgtcaatgaccaactggaatcgtgcatgttgatcttaaaattgagaagacctgtaggcaaaacagaagaaacatgaggttaaaaagagtgtctacaagagttgaattagaagaagtcatggctaataatggcaataatgggggtgtcgtggaagaccaggtcaatggtcgtaatccacctaatagaagcttgaggattatgtgctacccaccgtgacaggggtctaatcctgtataagactacttgccattgaagcaaacaatttcaagattaagccaatcattctttagatggctcaattcatagtccaatttaggggacgaccatcgaaagacccaaatatggtgtgaaaacccagcaattaatcttcaaagcttcgaggggaaacaaaagaaaattagctcttgaatgaaatgactaaaattgtataaagtcaaattttctcctttatataggcggttagaggggccataaggtaaattgaaatttgaatttcgggttttcctcctaagaaaagacattagtactcattagagagtgcaaacgtcacacatgcaataccaggtaatcgtcatcgcgtctttcaagataggatattaaatgtcccagacatcgaagagacattcgatcaatcacatcggctcgttagtgaagaccggacacgtgtcacccattcgattagattggtgaccgaataagtccacgtgcaactaggaagttcccacgtgaatttgggggacaaatgttatcccaatttctacacaaggtgatgtagcatctatctgggtgacacgtgaaaaagaccctatgacttggacgggcgattcctctaacaacgtgccgtacagagagatttgatacctaaatcataatagaagctgggaatatctaaggttagtacacaataacatctgacaagcttccattacgtagacaactcacatacacataccaaagaatgtgaattaaatgcatttatagatataacttatatatttgcaagcttgcaagtcacgacgttattcctaaatttatgggatagatttgcattaacaaagaagatagaaaactacttag

SEQ ID NO: 121769 - DNA, 1034 bp, Cannabis sativa
aaaaaaaaattagactaaaaatataagaagtatatcagtgtactctttttagccgtttgcattgtactactgtagaaacaccaacactatatatgcaaaattttgcttaccggttattttgtttaaaggacttatctgttatttaattacaaatattttatatatatacaactctcccataacgaaagttttttttttttttttttccgcatgcatgcatgcatggcttgattgattgaaatttgaaataacttatcttatttgtcaccatttaaattgatattaagacatagggtaattcagaatattacccaacaaagagaagaaataaataaagaaaatttagtgtaatttctctgttaaatgttttttttatactttgttaaggtcattttcaaccggtatatctaaaatatcactataatatctcataaataactttatctatagtgttccactaaatatagtggacactataaacacactatttttttttaatttttaataattaaataatatttttaagaaaaaaattaaataattatatatatatttagtattaaaatattcttattatattaataaaataataaaatgataaaaaatataaaatttagtataatttttagtgttgtgattgatattgaaaaaaaaattagtactaaaataataattttttagtattgatttcaaactaaatttaagttttactattggaaatgaactaagaagaaaaaaaataaaatttaaaatataccatccaatgtattacaacaacaagtaataacgagaccgatttctaattaattatatttatataaattgaaacctaatattttaaaaaataataccacattatgtatgaagctcatatatttcaaatgcatatattattctttttttattccaaattatattcatttttgtaagatgttatctcaaaatatttatagtttaatattataattacattgtatatccacttaattttatttgttttaatttttacttttatttttatattatttaagata

SEQ ID NO: 121770 - DNA, 785 bp, Cannabis sativa
tggttagataatgccatatttagtggcatttactttttatgtcatatttatcataaccttaataatttttcccatatttttgaaaatagcccttttttttttgttagattatataattgggcttttgatttaggcaagtgacatactaacccatatagctaaatccaaacaaactttagaaaaataccaataaaacacttgtaaggtttatttggaacatcgtattaggtcgtattgtattgtattgtattaatattttatacaatatttttatataaaattatttgtggtattaacttttatagacaccaaatatataatattttagtataaattaaagattaacatagtattatatatataaaaaaaatgatatataattcgatttaatgtaatacaatacaatacaatacgacctaatacaacgttccaaacgagcccatgatggcataaataccaagtttaatattaattaaatccaaatattcacttatacacctctacactattaatattaattaaagccattgttaaaagttatttttaaaaattggagtttctcaaccatgtttttgagctagtttttttttaattaatttagggtaaattgcggcataaatacataatgtttccaattttatacacttaaatacctaatgttatttttggtggcaaatatacctaatgttacaattctcttacactgttactaccactttcgttattaactcataaatatagacacgtggaagacccaaatacattgcatttatttattttatttt

SEQ ID NO: 121771 - DNA, 869 bp, Cannabis sativa
agatgaatagataacatatgatttggggtctaaatgatctgaaaagagttaggttaattttataatttgtcattcacttaaagagagaggaataataattagcattaataattgggtaattaaaataacatgattctttccctaatttttcatcttttgattaaacacttttattgtttaatttttttttattagtcctaatttttatttttataaaaattattgtttatcaaatgaaatataagtctaatttagtagtattcagttcaatttcatgtgagattgacctcacttatatgaatactacttgattacatgtacttgtatagttgtttataatttaggtaacaagacttagactcaaacttagcatgcattattttttatatatattttaatctaacacaactaaatattttttttaattatgactcaattgacatattaaagtaatagttaatttattattcagtgtattttgttaatatggtgtgtaattatgattcgtactgtgccatttcaatatgataagagggtgtgtcacgttataaaattatatctatttattattataaaatattaatatctatttttgtcaatctaattatggcacgtttacttaaagggaatgaaaatgaatggtatggtattgaatcccatataattgtttactaaattttagaaagggagaaagtagtgcgacccacacaaatttgggagaaaacaaagggaaaagttctccttccatttttatagggaatacctctctctttcctagcttaatttattctaatttaaattttattaattaaaaataaaaaagacaaatatgccttttaaaaatctataaacaaaataatatgattcta

SEQ ID NO: 121772 - DNA, 2953 bp, Cannabis sativa
  modified_base (2847)..(2866): a, c, t, g, unknown or other
acttgaaatacatgaggacaaccaatcaaagtgtaaaaaacactcagcctctttcctaaactcttcgcctttctaacactttcaatgcaactgtcaagcttactcttcaacgacgaaatagtcaattccaaaaaactccgtccccaagatgaatatttttatgcttagtaccactaagcaaaaaccattctacaaaataaagaactcccaacttaaaagcatcctcatcaaaatcaccccacctctttgtggtaaaacattccctaacaaattcttttgtaatagaggatgaagttggccaatatttcatacaaagactattaacgtcttgcttaaaatcctacacattataatcaccttcacaatctaaactagttatcaatgcaaactcctcaatgctaaacctaatcctaacaccacgaatccactactacaaattacactattcacgtcggtcaatgctactgttcgtagcgttgaccgacgtgaatagtactcaaataataaagaacgtctctttaaaaatgacactaataatatgttatttgcgtcgtttaggtatatgacgctaaaagctaaaccgacgagaataagcaaaaaatttaaaaaatttacgtttcattttgcatcatttattaacattcgattgttgtattagtgagctttcaaaaacgacgcaaaatacaatagtgagagttaataaccgatgcaacaaaaagtgaaatccctaaaactaaacccaaatgcaaaacattgttcatcatttcgacctaaacgcgaaagactccctgcagtctccaagaacctctgcctctccctcttcccttgtgacctccgcctccctgtagtctccaagaagaagaagaagaagaagtgtcacccacatgatgtatgatctcgggactgaggggtctctcacagaaggcgtagctttattctgcatacaattcatattttaaaaccctcctccatacgagcccaatcctccttgatccgtttccatgtaaccattgatctgtttccatgtaaccatacataccactgagactgtgcaaaggcgataaatgattcgaatggtgaagcgaacccgaatcatccgagtctgaattggagtggaattgtagatgagcatcggaattgtagtgatggtgtggcgatttcgaagctttgatagtcttacttacatcaggattgcctttccgttgaggagggagataagcttaagagagggaggaggcctagaagaattagccaactcctgctgaacaaaagtttgtaatgagttaccaatacctttaagagagagaatgtaagccatgtgagactcagcgaaggcaaaacactgttgaatcgctcggtcaaggtggtcacagcgctcttggcagattgccactgccgagagatcatcgatctttgagctggcgcagccatagccatcggcgcctcttctttttcccctataacctctgcctcctctctccattggagcttgcacgagagaataaagtaagtcaagatatgagccttagtctccaagaagcccctctcaagatctcctctcaagatgtatgtttgattgcttattttgttaattgtaaccttaaatgattttaatttccttcattaatttatttgactgtaatgtatgttgttaggttaaggagaacatttgcaagtttgcaaagaagggtcttacaccatctcagatcggtgtgattctcacggtattgctcaggttaagagtgttactggaagtaagattttgcgtgttctcaaggcccacggtaataaatccttcttagtgttttttatttatgagttcattcaagactgtaaagtagataactttagatacttttagaacctttgtttttagttattgaataacttcagggtttgcttaactttagataatgaatttttttctgatttgtttgtttaattttggtaactaggattgtagtgttattaaggttgttgttgttttcttatatgaatatcattatttggttagtgattgattatgggcttgtagcctttgttttctttatgttaatgaatattaattatattttatatgttactgggcactagcagcttacaacacaaccattaagggagtagttctagctagaatctcagtctcataactactaatgtgcccctttttgctaagtctcgatcaagatttcactacacacttgacaatttcacttattacactcactgtatagcattttttctattacaccataacatttatatagtagccgaaacagcagcaagcacaattctagacattagactggagtggagttggctgaaccaagtagaccagtccttaaaattcaaaggcgaagtagaaatccccactcctcaaactttgttgttatgtgttcaatttttattttattaatattgctaaaagctggtgtgttcttatgcatcattaagacaaagcctaggacaaaaaaaaaatacaatgtttgaacttggtttattctcttgttccaactgaaaaaaaaaaaaagacttcttaatttcatcattgagttattgccatttcaatttggtcatgctccaaaactcaattgaaataccaactatacgtaactggtaacttgtgctcttgaaatttctagacatatgtatgcacatattccattcaagattctttaaaatatagaagtgtacacaattggtctattgtaagtaagatagtatcatagtacctagataaagttacttctttataacttatgcatagtcagtattttattgtcattatattataagagatagactttggctaaggtttgacttgtttatattgttgggttttatgcnnnnnnnnnnnnnnnnnnnnatctgattagttatcaatttagaactttgaagtgatttatgtttacatgtattttacatgcttatggtttaatatacatatttaata

SEQ ID NO: 121773 - DNA, 823 bp, Cannabis sativa
ccaaaaatacgacttaggtatttatctgctactcggcataaaacttaggtatttatgccgcaaattactcaattcaaaataatatttacacattaatcatttattagtaaaagtgaagaatttaaatataatttatttgtacttatttttcattctccattaaatttacaatttcataagaaggatgatgtttgatattgatcgtatttgttcatcaatattatacttgttgttttatttttcttttcaatgattatgttttgattatatttaagccttttcttattattggatttgataattagttgtttgaatttctatttttagtgaactcttatatcttatgtattcagaatgctaatttattcaatgaagttgatattttatctaaaaaaaatttcataaattcaataataataataataataatctattattaaaatatgtagactttgaaaaaaaaaaaagtaagatgtttcaaatttgtagtccaatcttttaaaactgtaatatagggattcaaaagtaaaaaatatcatactataactgaatgaccattacctatttattaataattgacaaaaccgttattactgattattgactatttttaatttagtctcacattaaattaaaaattatttttatagtattcatatattcaaatcataataattatgttcttaaataatatatttattttaaaatagaccacataatttgattcatctatataataattcaatgttagactttttatttgggcttacattaagttttattggttttattaaaacttgggttgattggatagttctttgct

SEQ ID NO: 121774 - DNA, 596 bp, Cannabis sativa
tgatattttgaggtaaatgacctctcgtcacactctctttttttctcccatgagtgagaggttggactaccaactgtgagatttctttctcgttttctggtctttcagggttttgtgattcgcgtgtctggtttttttttacccgtttgttttaagatgtcgacttcggtcgaagaggggagtattgaggaactcagacttcagttcattgaagaggcgaccctagaacttgaagcggacttcgaggttaatgcagaggttgcaaaatctggggtgctggccaagttatgcggtacgcgagacattcctaaggggagactcaaacagattcttatgggggtttggtctttaaaaggtaaatggagaatgaaaacgctggagaaaggtgattggggattcttttttgactctttggaggacaaagaggaagttctcaaacgaaggccatgaattatagctgccagttgttgaatatcagggagtggccaacagatgggagctggttcaatgtccctatgaacaaagctgttttctgggtcgagattcatgggcttcctaccccatatcttgtcttccagaattctagagtgattggg

SEQ ID NO: 121775 - DNA, 1230 bp, Cannabis sativa
tcttattttaatgtattgatacccctttacttgttttggcatctaaaaataatataaaaaataatgttcgaacagtttattttacacccgtataaaataaaatagtcacgcgtgtaatatagtatttgaacgcaattttcggcatgttaaacttttctaaattttttaaaattttgcagggtgtcttaaataactataattttcataattatgagaaaaaatttgattaaaaaattatttcggataccaaaatagataaaaatatattgatgcatcccttttaaagggtgcattatagaatttttcaattatatatatatgttaaaaataatataaaataaggagggacatttgccaatattagcttattatagttaaggcttacattatatataataatatataaggccatttacttgtcactattttattttgtatcaccttcttcttcttttttcttcatgtgtacatttcatctccaattgtcaatatttctagatcttcaataaataaataatttaattaataaatatataaattaatgttttataaatgacaaattatatagattgataattaatatagaaatactatacatttggacttgatttacattggtagtagtattagtgtttttttttgggtaagggttatatattattgttgtttgtttttattttaatgttgttagtttaattttgtaatttaaattttatttgataatgttagtgggtttttttttttttgttattgattttttgttgtatatttaacattataatcataataataaaactaaaaattaaatatataatattttatttagagaaaactaaacgttcttaaacaaaatacgttctaggtatttattattgtctttgtataaatagtgttgcctttattattaaaaggaaatagttttttatttaaataaagacgaagataaaagtggatcattgagggattttcgttaaataaattttaactttgaaataataacaataaaaaagagatttttgaacaatggttggagaagctctaataaaaaaaaaaattaatgatcatattttaatgagtttataagttcttcagtagatgatattttaggtttataattatctgaagtacttttagaactctcctaatttatttgatttgcatgttttttgatggatctgtttaaattcaaaattttcctttatacaacattgtacattgtaattattatag

SEQ ID NO: 121776 - DNA, 967 bp, Cannabis sativa
taattaaaaaataaataaaattataaaaaaaattatctaattgtaaaaattgcgaaacaaaatactttgtgtatttttttttttgggatatataattaaataactcacattaaactcggcccaacattctactcattttatgtatgattttgactcaacttgtttatagctaaatattgtgtataacaatataatttaaaatgccctaaactttttgtttaggaaaaaaatagtataaacttttaaatatattcctttttcaaaatacaaaaaaacttttaaatatatttttgaaaaaacataaatatgctattgaaaattccaaaaataaaactaaacaaagatacttttctttttagtaaaaacaaaaatatgagatttactctttttgtttgtcatacaatcatcaaaattacatattcttcaccctagtgttcatataactctaataaaaatgtaattttaacgtaaataatataaatattaatattatttgatcctttttttcaactattatgcacacatcctaaataaattattcagggagaaaaataatatagaactaaataaaaaaattaacaattttgtcatagtttattctcaattttgtattttattacaatttagctaatatgttggtgcaagaatatggcttactattttcttctttaaataattattattttttgttaaaaaatctgcaaatagagtcacccattgggttgctcgagagttttattttatgtcaaattgtctttgtagtaagcttggtgctccttctactttaaagtctattgtattggttgaaagtttatctaatgaaataatcaacctttttattccaaaaaaaaaaaaaaactaatttgagtttttactaaaaaaaaaggggactatttcataaatatacaaaaataacaaattttttacattttatgggtttattgttttttatatatatttatatata

SEQ ID NO: 121777 - DNA, 1293 bp, Cannabis sativa
  modified_base (1244)..(1247): a, c, t, g, unknown or other
aggaagaagaaagactctcatccaataattccttaatccaatcaaagtagattggattaattgaattcggccagcatagaataagtgcttattagcccaagagtggagcctaagcttcattttcttcaaaatagaaccacaatcctcaagtctctattttgttggtctgagggggatccctaaatactttagagggaactctcctatagaaagatttatcttctgggcaagagaaatcagctgagtaacaccaccaaaaaagacttgagatttcataaaattaatagaaagacccaaagtcatgctaaattcatctagcacatccttgattgcaggaattgactcctcattccctttgcaaaaaataactaagtcatccacaaaacaaacattagtgagtttaaattttttaaataagggatgatacctgaaactcttatctctacccgccttttggattcttcgagacaaatactccatgacaataaaaagagaagtggggatatgggatctccttgtctttgcccctgctcacccttaaaagtcccctggaatctaccattcaagagcagagagcaagaagtgtttctcacatagttcatgatccacttgacaaacttggcaggaaaacaataggccaccagaagcttctcaagaaaatcccaattgtccgtctcgtaagctttacttatatcaatttttaggtgcatcttggggagcagttcttccttttataattcttcaagatatcctgaagaattagaatattgtaggcaatagaacgacccttgacaaaagcaccctggttctgactcactaaattcgagagatcattagccagcctagaacacaccagcttcgaaacacatttgtataatgttgtgcagcaggcaataggacggtagtcaacagctttagaaggacaatcagcctttggaataagagagagtgccttacttatgaagctcttcagggaatcgattggtattaaagaaatgggcaatagcaatatggatatccttccccacctcaggccaaaccgacttaaaaaacccccaagctaaatccatcagggcctggagatttagtattaggaatactaaacatcggagctctgaattctttgagagagaaaggttttaagagatgaacctactgattaaggttgaggttaggtcccatagctatgcaatcttgctgaatctctaaggaagtggttctagctgttggaattattttaccannnnctagatttactaacaagtatgtctcattaacatcctaatatgaatt

SEQ ID NO: 121778 - DNA, 2074 bp, Cannabis sativa
ttggatttgaatttgtttaaatttagtttaagtttggttttagtatttaatttttttgtgtgatggatttgaaaaataagttgtggtggtagtttcggcagtggtgggtggtggtgtttatgatggttatggatggtggtggtttcggtagtgctgggtggtgatgtttacggtggctacggataaaggtgatttcagttgtggtggtggtggtgtttacagtgactttggatggtggtggtggactgaagaagaagaataaaagaaaaatattaatatttttatttcaaaaaaatatgttatggttgaaaaaaaaatatatgtctttttttatttttaattttaatttttttaatataattatttacgtgagccaataaaattgtgccacgtgtatattgtgtccacgtggacaattcaacctagcagttaacatttatatttggatggaagttgtaatttgctaacggtattgtagttttgggaattttaccaccaaaatttaggttttgggggttaattgcaagtaaaatgaaattattgaagattttgccgcaattaacccttttttaaaaatacaatttttaaatcacgaaccaatcaaccaatcatttggctttcattggcttcataattccggttttaattgtgaaagtgatgcttagtttattgttgtataagttagcttatggcttcacaatctatcatacaaaataccaactcaaaaattgataattttattccttaaatttttgacattactatttatgctccttaaaatatacgatttgttaaaaattcttcttaaatttttatatttgtagaaattctgtgtttctatttggtttcgtcctattattcgtttaaatattagcctgtctttgtaaattaacaattttgcttcataaactttgacaaatatcaaatgataccccttaaaataaaaataagaaagattcaacatttttttttttagtaaatcttaaaaaataatttagatttttttttaaaaaaaaaaatatatattttgaatgattgaaaaaaaaaaattaaaattttaaatccaattaaacaatttgaaaaaaaataattattttttattaaaaattcatttagatataaaaaataatatatagatatattaagaattcaatttttgtaaaaattaaattttttgaaccaaatcgcacatgcactttttataattttttaaaccacgaccgcattgcaagatctcaaaacagcaaaaatatagtgcggtgcgggcagaatgaaggacagcttacatgaggtcatcatagaaaatcagagtgctttcgttaaggggcggttaattcaagataaggcaattcttggttttgagagcctccattgtatgaagaaaggacggttcgggaacgagaggaagatggccttaaaactagatatgtcgaaagcatacgaccgtgtggagtggcctttcctagaagctatgatgttatgtttgggtatgatgagcgatgggtctctaaaattatgaactgtctccgctgggttacgttttctctcctgatcaatggtaatattagtggcaacatcactctgcaaagaggtctaaggcaaggtgacctgctatctccgtacatgttccttatttgctcagaagggttttcctgtctaatttatgaagcagaaagggctaatcgaatccatggtataaggtttggaagagatggactccaactctcacacttattctttgccgatgatagatttgtgttcttaaatgcaactgtcgaagaaggaagagcactctgatgagtacacgcacctctctggtcagcgtattaatttctgttgttgaaggaattttacaacaccaaaaataaataacaataataatagtaaatatgaaataagtgcgagtactcttcctagaatggcgagtatttaaatcaggaacacaaatacttagaaaaagactgggaaaatcatgaacacaagaggaatatagtggttcagtcagatctcggtctgcttagtccactgttgcaaagattctgtctcctttatttcatggtggatcactctttta

SEQ ID NO: 121779 - DNA, 1197 bp, Cannabis sativa
  modified_base (54)..(85): a, c, t, g, unknown or other
ccaacaatctcaataattcaagggcattttcaatggccttaaaagttcaggggnnnnnnnnnnnnnnnnnnnnnnnnnnnnnnnncaaaaatcctaattagccttataagaaaaaagactttttgtttgcgccaacaatttttgctgccaatacctagttggtaaaataggttttggcaacacaatttgtatatgagccagtaaaactacttcacagtggcgctttttttcactggctaaaagtggctcgtcgttgttaagtgttggctaaatgttcactaaaaagttatgccgacgcaattatgtgccggtgaaaattggtgtgctttttttcatttggcgggtgaagattctaccgacacaaatatgcgttagtatataactgatacttgcgcaatataatttggcgggtaatgattatactggcgcaaatgttcaccggcaaaactgttacccgcaaaatttcattgcacgggtgtaagttatttacaccgacaaaagtgtgtgtgttttaaatttttggataatttataataaatattataattaattttaaataataaattatattttaaaataacataattaaataaaaagcggtatccatatatataattaaatagtatttcgatcgagctactatcaaaagatgctcgagttataaagctagcaactaaacaaaagtactaaagtaaaatattaaaagatgttcgagtagaaaaaagccaagttcttaacttaattataaaatatatatatatgtggttctacaaacaggtaatgtcatcgtagttgttaatctgagtctcagatagcgtaatgacaatctagctccaggaagagtggggaatggtggaagtgaatccatagcaggcaagttgaaaacaggaacaagttgagaaagatactcaaactgataatgaaatccgttcaagtagagttgttgtgtttcatattgctgcttcgaatactgagtgtttcctattgtgcctcctacaccttttgccggcaacatttacattaaattaggaattaaaagccaccccttttgcctagccaaatatgacagtaaaagtgataattattgtagtaagaagccgcatattgtagcactcccatcaacttctctactctattatttaaaatatattgctaaaattttatttttttttctattttgcctcacatttttactta

SEQ ID NO: 121780 - DNA, 2347 bp, Cannabis sativa
cgggactactgactgtcacagggtattacagatttggctcaccaagtagttacaaaattagcataccaagggatgatgtcttgggttacgaccagcagctgttcgtcaggaaaattctcttaaattttcacttcatcttgcttgttacaacctactttaagccaagataagtgatcagccacttggttctccattcctcttctatctcaaatttttaggtcaaattctcgaagaagaagaagaatccaatgaatgcatctcggtttagcatccttcttggcaatcaaatacttgatggctaaatgattagtgtagactataacttttgttcccacaagataagacctgaatttatcaaaagtaaaaacaacagcgagcaactctttcttggtggttgaattatggatttgagcatcaatgagtgtcttacttgcataatgaatggagcaaaagatcttctttctttaccgcccaagtactgcacaaatagcaaaatcactagcatcacacattaattaaaagggaaaagactagtctggagcaacaatgatttgtgcagtaattagagccttctgcaaagtcataaaggcatcatgacactccttaattagtgaactcaaactattgatttttctccagcaataaacaaataggttttgagatctttgaaaagtccttaatgaaccttctatagaactccgcatgtcctaagaaacttctaatgcctttgacggtggtgggtggtggaaatttctcaatcacttctagctttgtcttgtccacctcaatgcccttgtgagaaattttgtggcccaaaacaatgtcttctttcaccataaagtgacatttttcccaatttaagaccaaattggttacttcacatctcgccaaaactttctccaagttcgccaaacaataaataaattattcaccaaatttagaaaaattatccatgaaaatttcaagagtcttttttgccatgtcggagaaaattgccattatacaacattgaaaagtagtgggagcattgcacaaaccaaatggtatccgtataaaggcaaaggtaccacatgagaaagtgaatgtagtcttatcttggtcttttggaggaatagaaatatggttataacctgaatatccatcaagaaaagaataaaacatttttcttgccaactggtcaagcatttgatcaataaatggccccagaaaatggtccttctgagtggcattactaatcttcctatagtccatgcaaactcacccaccagtcactattcttttgggagttaactcattgttatcattggttgccaccataacttctcttttcttaggaacataatgaactggactgacccatgagctgtctgaaatcgggtacacaatgcaataatttagccacttaatgacttcctttcaaactacttccttcatgatgggattcaatcttcgctgctgctcaatagagttggtaaaaccagcttcaagcaatgttttatgcatgaaaaagcaaggaaatatgccctttatgtcttccatagtccaaccaatcaccttcttatgtttcttcaacacctctagcaataaaccttgaaaggcttgctgaatttaaaagttagtttgcttgaatctatcattgtgacttgaggcccctcttcttcactgaactcttcatcatcttcaaacatattcaaccccaatttagctttgcgagtttctttatggaaagtttcatccacaagtgactcaattacactcaatctagaacattctttgatgtcatctcgaaatttcatggctttgaaaacactaaaggtcacttgtttatcattcaccctcatggtaagttccctattttgtacatcaatcaaagtcctcccagtagcaagaaatggcctcccttatatgattggtacatctctatccgctttataatcaagaatgataaattagctagaaatatgaacttgtcaacatgcactcaatttttccttccagatgagccatagatcggttcgccaattgcaagataattgtggttgatctagcttctccactgcctaatttcttgaaaattaacataggcattagattaatactagcacctatgtcacataaagctcttcccaaatctcttccaccaatagaacattgaattgtaaacatactcagatcttttaatttaggaggaattttacttttcaacatagcactacagccctctgttaaaataactgtcactactacaaatatcaaattcacagcggtcctaaaaacgatttttttcagggaccgtcgctaaaaaaattaagtaactatttaaaaccgtggggaaaaatttagtatt

SEQ ID NO: 121781 - DNA, 947 bp, Cannabis sativa
  modified_base (96)..(101): a, c, t, g, unknown or other
atttaggtttaactaactacatgaatgttgaccctttacgtggcaacatctaataatttgttatttttttattttaaaaaaaagtcacccaataannnnnnataaactaagaattctgttatacatacacgtttgatatagaatagatatataatgagtacattagtggctaaaattcgaagaaggccaaaaaactaaacttgggtagctgcatggttaattatagagattggtgggtcagggtaacatgtgaaggatttgaaaccctataagcaatgtgtccctaactagtgccaggggccctatcttctctatttctatgtctctattttttttttctgatcatatatatattttaattctttttgctaatcacatttatggtacattatgtcggactaatccaactaaatagaaatagaaatgaatcaattttctttttttcacttaattgactacattttaaaatattgaaaggttttttttattgtttaatgtagcttaagaatattacgtattataaatagtttaggggtattgagttgctctcccttttttctagccctcttactactgagctaatttcattgactttaatattaaaatgtgtcatttcaatagaatgattttttcacaattttagtgtattttctttttaaaatggaacaattttttatcaaatcaataaaaaaaaattaataagtcttttattttttgtatgcattaattttatttcatcttttaaaaatttatattcctatttttattggtttgttttgatttcttccaactaaatgttgcctttaattggagtataaaatagaatagaaagtgactttttttagggatgttggcggctaaatcatctgaactttacggtttgtaacagttaaccacaaaaactaaaattttggcggcataactacctaaaccctggttccgttttg

SEQ ID NO: 121782 - DNA, 2727 bp, Cannabis sativa
atatattttttagggccccaaaatttaattcgtcttgggcccataaattttcagggccggccctgtgaacaaccacaccttgcacgatcaacatcccctcacccttcgaaaaattcacaacaacaacatcagtagttcatgttgcttttactgtgacaaacccttcggagatgaatatgcttacagctgcgaggagtgtgatttctacatgcatatgagatgtgcttcaatcccattgcccacccttacatcccatgataaggatattgttcgattctcttgtcatcaacatccaatgcccattgttcatcaacatgatgataaaggtaaaggtaacaattgttttgcgtgtcaattaccttggtccactccatcctattcttgcacaacactcacatgtaaaaatttcctccacaagtcatgtgctgaattgtcccaaacaattaatcatcctttccattcacaccaacctcttaaacttcaaataaccaaacctcaaacttgtgatgtttgtttcaagaaagattgtaggctcaatttttgttgttgtgagagtgggtgcaactttaaactgtgtgctaaatgtactaatcttcacacaactgtaaaatgtcgtagtcatgatcactcgcttgctttggtcgaaaatgcatgttgtgatcataatattcaatgtgatgcttgtttgaggtcatataagggattgcagtgtccacctaatcgtacgaatgatgaagttcaacgtactcattcactcttgtttcgttgcatggaatgtacttacgatctccattttatatgtggtccattaccatttatggttaaagacgactaccacattcacaaattgactcttgttgattcactaaacgaagaagagtttgaggaatattattgtgattcatgcgaagaagaaaggaatccacaatttcgtgtatacagatgcattgactgcaaatatacatcacacgtgcattgcatgatcactgaggtatgctaatgactaatattatttttaatattttaagtagtattgttgattttctttcttcttttagaaatttatgaaatattactgacataattaaagaatgagtactcaaaagatttggcaactagttatactaataatgattaatttttgttttttatcaggtacatatatacctacacatataatgttcaactaagttgatggaaacaaagtattaattggtacataaatccttttgggtaagtctacaatagtaggttctttaaagaaatatttcaataaactttttatctgtttcgtaatatgtacagaagaattttttagttaattttttttttcgtgatcatataaataaataatagtttaaatttaattttcggcacggtaaattatttaaaattttctaaacattttacaagtaatcctaaatagttataacgtacgagattatgaaaaaaattggacttattttttttctagatacaaaaatagttaggggttctactacggaattttctaatactttcattaaggggagttctacttgcaccccatcaaatgataaatacactccattattaaaaaaaaatataaattaaataatttttaaaaattactcttaattttttttaaaatttttttctcacattattttatgttaattctaatacttattttgattttattttcataactttttctaactcgtgtatacagttttttattttttttctaaaaaaatttcatataaacttttattttaatttttttgtcataatatttaaaataaaatttatttttgtttgatagatatattttttaagaatgtgaattggaagaaaaaagttaagataattaaaaatataaattttatataaaatgaaaactattaaaatagggtgtatttagaaatttttggagtgtagttaaaattttctctcattaacgtcttttgtaaagataaatatgtcgatgtcatcacaaaaatagaattttagcaacccaatttttttttctattaaaaaaaagtttttataataaagtattagaaaaagaaaattcttgaggcgaaaattgatactataatattaatattcatattatatgttaacaattatattacgaagaatttgtggtataaatagtcaagtttagcttgcaaataaatacttaagtttaatttttggcagcaataatttaagttttatttttggaactctataggtaactaatttttaaatgttaagtaaattaccacatgacaatctctgattggttcaggtcatgaatttttattttttttaaaaaaattaatttaaatataccaataaaaaaataacaacttgatatttaatgactaggtacacagagtttttaaaatataacttaggtattattaccttgaaaaataaaacttaaatatttatttgtaactgaaagttaaacttaagtatttatgccacaaattactttcatattattttattaaggtattctttttattaatgtctaattaattgttagacaagatcgtgagtagagaaaacaaataaaatcactaaaaacaagattactttatattattattatttttagcgttcaataaaaaacaaattattaataatttctacaactttaatgaaaattaattttgaatattaattgagttcatatatgggcattttataattttatatacactattttaattaattacaaaatatgtgcaaaaa

SEQ ID NO: 121783 - DNA, 1467 bp, Cannabis sativa
gagccgttcctggtggcggctgcgtagtagcggcttgcgctgcagcaggacatatctacgttctcgccagccacgccgtggagctcacgttttggagattcgacgcacgccgaaaagccgtagccggttcaggcggtggtttcggcgagtggtgtaggataaagtgtccgccattgccagcgcagattagtgtggacagcacagtgaggttttgctgcgccggggtcggagacaaggttgtgttggttcaggtctccggctgcatcgatgacctgctgaggaggagtggacggggtggccgtggaatgaaggaggggttggtattggtgtacgataccgttgccggagaatggaggagggctgcggatctgccggaaattgttcgacgcgcttcctgcgtttgtgtagagtgctaaaatgcgcatgtagtgaacggagcagacaactatgataacccgttgcttggaagctttggtgcttgcaatttctggaaagtgaggatgatacgccgtcgttttttagaaattatttacacagaatataattattattttgaccaatttttagggtcatctgttattaaatttttaatttgaaatgtcattgtccaccaacaagttgaattattgttttttttttctttctttccaaaatatcgaagctgtctttttattaaagaaaattgatgaagagattttattatttagtaactccctaatatgaatgaaaactagaatctaattaaaaataaaatcttcctttgctttatttgttgtgaaatttctaaatttggattgtgtaattattttattttagtttcattcaaaattattcatgacataatccacagtcaattatatttaaataaagtgttttatataatatgattatatttgaatggacatttatgcacatatatagtgttagaaatagggatgtttatacaatatctaatctaatatgtcccattcagtctaattcaattcataaagtgtaaatatttgtatttgtgcggaatgaatttgattagaaaatttaaaatttgtatttgtgtggattagatgttgaatgataattaaacataatcgatttaattcaattcacacatatttacatactagattaatactacgtgtattgcacatatatttaattatattttaaattattatttttgttatgtttatttttaaaattttataaattaaaaaaaaaaccacttattaatttattaaaataaatgtattaatatatacttattaatttattaaaataaatgtattaaaattgtatattgagcaatatttattaatattgtagtgaaaacttctaataattaaatcaaacaaaaataaaactcctaatattaaaataataattaaaaaataatatttttttaaaaccaaaaaaatattataaataatatattaatatttatatatattttgagtaatctaaaattagtat

SEQ ID NO: 121784 - DNA, 816 bp, Cannabis sativa
tttcttaaaagcaaaggcaacaagaaaatatagatgaaaatatagcacatgttcaagttcaacaaccacgtgcattgattagtattaccacgtgttcaagggctcccattaaaatgattttttggactaattgttgagcatcttaattgatagccaactatgagtcttatagtctcacttaaatcttttatcattcataagaagaaaataagtccatattagtgtcatttaaataagaaatatatgtgaatcttgctactaaatagcaatagcatgaatatatggtataatgttagtaatacttagtaagagccatgtgcttgaagaaatatcattgataaatggcctcaatcaagagaaaactacgtacctggctaaaaaattcttcattttcttttattttagttaatataagaataagaataattttctacataagaaaataattagtccaaattaaaaaatataactttttttttttaaatgtaaatcagatgtatattcattttaagaagaaaaagatatcctttataataattcctgcaataagttgtgcgcatggtttacaaacaataaaaggaatagagaattaattaagaaacaaaaaaacgtcttaataaggattaatgttgataatagataaaacattatgaaatcaatcatagaattgaatagcatatcaaatggtattagcttctttaattcactcttcttctcgttccttcttggctattgattgttctataaatatgaatagaggggagggtgttcttcatcaaccaactcttcaattggaccaatccaagtgttcatgtt

SEQ ID NO: 121785 - DNA, 740 bp, Cannabis sativa
ataacaattatcaacagatctaaagccttataaaataagtttatcatgttaagaacaaaacaatgatcattgtcaaaattaatagtatatccttgatcataaatctgactaatgctaagtaaattagcttttactcccttaacaagcataacattttcaagcatggtaacctttcaaaattgagagttcccgaaccaagacatttcctgctaaacctttgccaaacatgacttcaccacattgtattagtctgatatttatcaaaacatcattgtcaccaatcatatatctagaacaatcactgtcaaaataccacatttgtgaagcaacacttttatcataaaaaacagctaaaacattttttgcttttcaatccatttttatttccaagcactaagtttcttttaaagatttttcaaattacccaaataatatgttttgtacatattttcatggtgaaaagttttggcctaatatgccccttaatactacaaaatgaaaataggaataaacctacttacttgaaatcttacgctttttgtacttactacacatttgtagcagcagaccttgaatttacagtagcatgtaaatttactggaacactaaatttgacaaatttaatttttccaaaactttcagtaccatttaaacctattccagcatagcctctttaacctgcactaaacttcttaaaaaaatagaagaaacagggttaagcatttgaacatttttcttaa

SEQ ID NO: 121786 - DNA, 862 bp, Cannabis sativa
aattctcaatccaataatctattgagggaatttttaaccacttcaaaaatttgggggcacaatttgcacttttagatttttttttgtagattttaaattatttaatatattaattgaattttataataattttgaattaaaattatttgtgggctctaatttgatagtgtaataataagtaaaagaagggcatcttgtccattatcttcgagcattgtctgtccttaaaatttactctgtggcagttgtttctgttattttctttttaactgtttattttccaatttcttcccaggtttcgaattgtaacctcctcccatgtatctcaaccactcccgctcttcttttttcaaattataacctcttcttcttcttcaagtttcttcttctgcatcagttataggcatctcacctcatctgcaactatggattcttttcatcctgatatctctcgagctctctcaaatcgggaaagagaggttatcaatttgtccaatctccctaggctgcctactcaccctgtctctcatcgcattatctgtcgaattttctctcatagaggcttcaacccaaagcaatttaccaacttccttaacactcaatggaaagggcgatttgaagtcactatctccacctatgaagagaattcttttatgatcacctttggctgtgaaggtgacttaatgagagttttgtctaaggaaccttggcatttccacaaccaagatatgattctttgcacaccaactgttctgtcaaatgctccattgggttcttatactataactcctttttgggttcaagtgttccgattgccctttttgagtaagtctgaatctcttgctaaggttattggaaactt

SEQ ID NO: 121787 - DNA, 680 bp, Cannabis sativa
  modified_base (630)..(655): a, c, t, g, unknown or other
atatattaaactatataataatataatttctcaattatacataattatctaattaggattttgctaatccatttcttaattctagggtattacatttggtcacagtgctattgtatgatataatcgctatgatgatagctataaaggatctgatcccaatgcaacaagaaaaaacaagcaagctcacacaccacttgcagctacacctaagatcctaaacaatgaagcttggtatgctgacaatggtgccagcaaccacatcacctcaaatctttcatttatgaaccaacaaaaagaatatggtggtaaggagaaagtcacaattggtgatgttaacaagctctctttctctcatcttggtaatgtcatttcaaaaactgaaactgagaaaactttactactaaataaaatgatgcttgtatcagatatcactaaaaatttattgagtatctctaagctcacctctaacaacaatgtattaataaaatttcattctaactatcgtttggtgaaagggattaattcttaaagatggtctttatcagctcaaaacctcacaaccaaagtcagcctcttgttctcttgattcatccaagtctaagaatgctctgttggaattattttaccagnnnnnnnnnnnnnnnnnnnnnnnnnnttattaacatcctaaataagaactt

SEQ ID NO: 121788 - DNA, 1473 bp, Cannabis sativa
aaaaaatatattatttttgaatagaaaattattttaaaaaaaagttatccatgaatttctcataaacgcaagaattcagttatataggcacacttcatatataatagatatataatttaaaataatttttttattatttatattttataattaactttttattcatgtataaaaatataaacaatataacttcgaaaggagaaacaacataacaacttccaaataaaaataacataacctcaaaatgaaaataatttattgtatagaaacaacataatctcaaaatgaaaataatttttataagatagaaacaacataacctcaaaataaaaacaactatagtgtacatgacaattcccctttaaaatttttataaaacaaccacaagcgaaatgctatatatttactatgtaacatattgctattggtgcaattcaatattaaatataatgaataatattaaaaatcactaattactaacgatatattgttaatctagagtataaatttaagaataatttgtggcataaaacttaagtttaactatcggttacgaataaatacttaagtttaattttttacgataataatatcgaaattacatttttggaacttccatagatacttgaccattaagtatcaaattaatagcgacacgtcaatttctaatttgtccatgtcattaaatttttatttttattcaactaataagaaaataatatgtggataatgacttgagacctaacgaccgagtacctatgaaaattttaaaaatataatttagatattattaccgttaaaaattgaacttaaatatttatctgagttaaacttaaatatttataccgcaaattactctaaatttaaataagagataaatttatttaggtaaataccattttatatcctttgtttattaaaagttaccggctgaactatctattttgtaaaataataaattggaccatgttattttcataatagtataaaatagtatctgagctcaattttaataattttttaatataacttatttgaagacaatttttagcaccgataaaagcagaaaatatactcagttttatcataacaactctagacccaattattattaatttttattttaaccaaaaatatcaacccaaggtactaatttgtacaattttaataaatacatggtctataatattatttaacaaaatatattgtgtaaccgataacttttacaatacagagagtcaaaaataatatttctttcagaaatgctaaaagacaccactagtgcctagcaccttcgtcagtatcatatcgttaccggtataattaagtaacgagttaataatttaaattggtgggataataatttaaatgatacttgacactactagtatctgttgagaatcatggggttccatctcaaaactaattggcaatgagtggagtaacccatgttcttatatatggctcaattct

SEQ ID NO: 121789 - DNA, 702 bp, Cannabis sativa
atatcattttgaattttatcttgtaaaagtatacatttcgtgatctccataattaatgggttaaaatttaattgatttatggattaaaagtcaaaacacatcaaagcttagagtattaaaatggacaaaatatattcacatatttgtaacaaataaacccctcttggttagaattgaacacctaaattactaaaaagaaaaaagaaaaaaaggaaaaaaggtaagaatataaattttaaaataataccctaatgattatattcttggacaccctatcattagtcatgaatgacttatttatgattgtcataattttattctctttattatttttatgcctcctagtctcttttttttttcaatatatatatttttttaaaaacattggcacataaagttccaaaaaaaattgttagaataatgattcaaagattttaaaaactatgcatctgtatttttttttttttgttagttatgaaaaaagaaatcccaaatttataataatttgatattaaattagttatttaattgaatgataattaactatgatttactaagagtctacatttgaataaaataatgatattgatttaaactatttgtttcaattttaaatgttttatatggacagaaataatagtttgtgaagaaccatgataaatcacataattatatatattattataaatttttgtaataaac

SEQ ID NO: 121790 - DNA, 1252 bp, Cannabis sativa
agtcctttatttatatattcatgaaatccggttcatctgagtctcattctccattttctccattctccgaccccaaaccccaaaatcatctattccaacctcaccatcattttcaccggtgtaagggccggccgcctatcacagaggtgatctttctttctctttatttcctattttttatttcttttttgtgatggaggttttggtcaataggataatatttagggcattggttaataattttctataattcataataaattgtaatattactttaagggtgctaagcactgtgtgcatggacgaagccacatgcaaaccaagtgaagtggtcaccccatatgaaattttactcaattttaaattattttgtgcttaaaagtaaataattatttttagcctttataccaatatcaatcttgtcaaacattataaaattgtattgtttgatatagtggtaagtttatatgtaaagtttaaagagatcacaagtttgtattatgtgcccttttaacatttctctaatatttagggtggaggagttgtttttcgggtgaggtaataacaattgtactattgtgatagtagtgactattctacttaagtttgtattatgtaatgaatattatatattaagtattaatttatttaataataaatatgtttcatacttactaatgaatttgttattcttagtataaaatgtctacaaatgttgcaagtaatcacagtggagaagataacagtcagaacctaatagatcctactaggatcccaaccacatgcaagacctctggtattttttctttttctcattttgattatactaacgaaataattaaaagttgtatgtatgtatactaatgtagttcttttggtattcaaaagaagaaccaataggtcccaacaaaaagggtcttgagctaatttcagaagatagaaaatcagttcttaatgttgatcagattcaaaaacttaaacatgtgcttggtgagaggagaagttacattcgaggggttggccgcatatcaaaacgtaaatcttcaatctattacactcagcacattaaacaatcgcttgagaaaatacaaagattgaaaaacttggagggactcataagtgaagtgcaaaagcaagttcaacacattactcaaaagcttcaaaccaaggaacatttaccacaagagaaaaagagagaggagccaattcaaactcatgctcaaatgcattcaactaggccgtctcaaatacc

SEQ ID NO: 121791 - DNA, 1004 bp, Cannabis sativa
aaaaaaaaaaatacacatactaaaaggattgttaggtaggccgattttattttgggagttttttctaaaaattgaaaaatagttataagtatttaataggaattttttttatttttacaatttaaaatagttttttttatatatttttataaaaattcacattaaaaaaactatatagcaattaatggagcaacttaaattgaaacctaaattacaaccaaaattcacacaacaacccacataaaaaccactcgagcaactatcaaaacaacccaaattgtaaatttgaaaaaagaaaattaaacaatgatatatggggtaattctcgtatttaatatgattgaaatattttctcaaatcttcttttgtctgtcattagatatttagtttcaataaatatgtaagttcaaattaaatatctacaacagtatcggttacaaatattcattcgaatactgaaatattattatttaatatttaaataaataaatatcttatttaattaaacatttaatattattttattggtgttaattataatagtataaatctaaatctttatatacatataatttattctctccagagattatagtttttgctcatgtgttgagacaaaaccaagaactttgctatcattgtgtatcttaatcaacctacactgatccccgtttgtggtgaaagatctgaaagagcaaagtgtgagttcatcaccgttccaaaggatacatcttgcgaaaacaatcaaggataccatgataggtatcaagaggtaaatattctattttttttttgttttagatttaatatacaatggacatcctaaggtgcggtacgatgataatcactaaaattctttcattgtgcaccaaatttagtacgaaaaaatcaacactcaggacattgatcattgcatatagaaattccatgtgttagatggtaactgtcatttcttagaattctctattgagaatctttctagcaccttatgttagactataata

SEQ ID NO: 121792 - DNA, 787 bp, Cannabis sativa
atacatttcaagagaatgtatatttgtgtccaacatattcaattaagtgttaatcttgcaaatttattcacaaagtcattaccaacatcaatatttgagaagatatttcacaagattagaatttatcgattaacagatctccatgaatgtttaaatgaggagaaattagtttatactgcactccttttcttttgatcaagttttttagcaaagtttttaatgagagagtttttatggacatccaaagagcagtgttatgaaatattatttatgaatgtccaaatcatgatattgattatcactattaatgcttgattgtatttatgaaatattaatgcttgattagaataaacaacttaaaaattctcattcattttctttttctctttctcttttcatattcttctttttttcttcttatctactttatattattctatattattttataacatatacaatcttttaatttcaattttcttccctgtaatatagggtaaaaacattaagacttgccataaaattaccctatatagataaagtaaataaagtaagcgtaattagcgttggtatattaattactatccaatttcatttaaaaaaaaaagcatatatttgacttctgactttaagggggaccaccatatagacttacacacatacgtatcattacttatttaaaatataaatatatatagggcaagattatggtaggacctagcaaaagtttcctaccggtagggaactttttttgactattgattttagattatgtggttattatgat

SEQ ID NO: 121793 - DNA, 592 bp, Cannabis sativa
ttaaataatcaaactgggaatattaaaatacggaatttcaccatgtatcttgagcaaaatgtcaaacatttatcagctaaatatccttgacaatacaaccttctagtttgcttctgtttcgaacatatgatttcaacttcgacaagtacctatatttattcatatgaacattagaagaaaattaaaacttgttcaaatttaatacaataaaaatgaattaagattttacctttcaatacatgcaaggataaactgatggtccagcaattcttgcctcatatgataagtgtatcaccaaatgaaacattatattgaaaaatgacggagggaataatttttcaagattacaaagagtgattggtatttcttgttcaagttgcataaaatcttgtggtcgaccaacttttgaatacatcaagcgaaaataattgtttaaggcagttatatgtagacgaacatacgaacttgatattcatctcaatgctaatagtagtaattgagtcataataatatgaaaatcatgacttttgagcccatgaattttttgttgttttacattaacacatctagaaatattggcagcatatccatc

SEQ ID NO: 121794 - DNA, 1529 bp, Cannabis sativa
  modified_base (1483)..(1483): a, c, t, g, unknown or other
tttttttttttgcatttttacggtgtttacatagaaactcctataatatttaaagaaaaaaagttgaaaaatattatttacagtaattttctatttttttttaaaaaaagtctttaattatcatatttctaatcttatttttgttattactttaattattttgttgaaatggttatactcttattattatctgccaaaattaaataataataataataataataataaactaataaaataaattagcttctccaaatcgctctctccctaaacctaaacccaaaaatcgctctctccctctggttctcgctctgttggacttctccaacgtccttctttgttctgttcctacggcgacggcatatccttcctgacgaagattctttcagctcattcaaaggccacatcggtcttccgaggccttttgatgttaaagatcccttctttgctgttgagtatgataccaagatgattcgtatttggttctcgctatgttggacttctccaacattcctccctgtttgacttatccgacgtccggcagctcaggcagtgctcgagtggacaccggtcgcagcagcagcaaatagagggccaagctcttcgttgtctatagcgactccagagccactcatagccgcctccaaagccaccactgctaccttttctccgttccaggtattgtttttttttttattttttttatgaaatttgtttattcgtgtttattgagtcgatctttgtgttgatttgttcattagtttgtgtatgtttgtgttgatttgttcattagtttgatttgatctttgtgttcatgaaaaatttccaggattccgatttagatatttatttatttaatctctcttcttcttccttttttgagaaaagcctaattaatttctgaaatccttatcgtgcacctatgtctctgttatgccttcatatttttttagtaattttgtgtgtaatgtttctaaggtttagtgtgtatgtgtaatgttactaatgaaataggataaaaatttattcaaacctgtttggatgtacgactctttgaatcttctttgaaatccctaaccagtttaaacacccgaagagatttttttaattaacacttaaatcaatgcaagattataaactcatatatatcaaatttcatttagttcataccttaacaaatatgaccctccattgctgttcagatttgttgagaccaattaagattcttttgagtactaaaaaattaaagtgaagagtgaataaaataaagtaaaaaaatttaacaatactttatgtgtatatatagtatatctgcaaatatagtattgcttaaaaatcaaaattcaaatttaaatttttaaaatacttcttgttaattttataactataatgttctaaatttgtagtttttgatattttaaggtataatacgtataataggacatttagatttttaaatttaaaaaaatcataactaattcanattaaatcgaaattgagttctgttaaaaaaataacttgcttaattt

SEQ ID NO: 121795 - DNA, 2108 bp, Cannabis sativa
  modified_base (2028)..(2051): a, c, t, g, unknown or other
tttttaaatccatataatttaaatcctaaatcctagttaaaatactataaaaggaataagatggctctcattctcataacatcattcaactaaaaacctatttttcattctttgcagacaactacaaaattgagagcctacttccttgtattttggaaattccttcttattactcttcatcaattcgaagcctttagtgatagagtacatgcccattcatatcaagtcaagtactcaatcatagtgttgtaaagttatgctttttcagttccacgtgtgtacaatgggcagacctcaagaaaagtcctaggcaaggtcagtgaaacttggtgaattgcaagtgaccaagagaccgtaagtctgcgtgttcacttaaggggcacccacactgtacaatgcatcaaactagcaaagagaacttatgtagagaaattttaacatttagaataagctactaaacctgcctctacgtcgtgcaggcatactttggcttgacataaagaaaagtaaattcggatacttacatgtcaatgccacaagaagataacaaggattaaagatcgcctggtcggttacacaatccatgataaaaaagcaacagggccaaacaatagtattgttcaaaaatagagggcctataggccaaacatacgaacatgaatgacctggggctaaaaataagtaatgttctaaaaataaaaggcaataggccataaagaacatgaaaatattgtctctattatacaaccataatgttgaatactaatgaaaatattgtctatatgtgtgcagggctaggtggagttgagagtgaagctgcaagatctaaattgacaaagtctaggctagccacagcatcgacaggctggtcaacctagtggtcaacgtcctagctggccacctccttagaaactgggttggccagcccctcatcatggttccataaggatgaggcctctcgataggcggcagtctggtctgctctcaaagaccatatttccttcagccaatgtgttctccacgaaagcctcactgcccatgtatgacaaattagctctgcggttacgcagcttgaacacaaaggtaagttttgaggataattcaacatactcctcctttatggcatgttggccatcaagagccactctcatgctctcctcatgccctgcaagttcacactctagcctagagataaaggcaggttgcgtggtgttctccttgttcctagtgccaagcatggtctcaaagccagaaatcatgctctatttcgccacaaggggtgcctccatctcagacatggcattgtccttcgctagaagagaagcctccatggtcttcatctgctcccgaagagcatttgaggacccccaagagctatcgcgtaaagagctcaacttcatcaaggcctaaaagcaaaacaagacaaaattagtatcaaagtacaacactagctagctagtcttcccttaagattgccatggccgaccaacccctcaagaggtacaaccctggctggccagcctccccttgaggtttccatcgccagccagcccagcaagagatacaacattggctgaccaggcctatgtagcaaatcctttggccgaccagcttatagaagtgatagaaagatgaacaaagctaaaataaaaacttaccaaagaaatatcccaaaggccaatggagtagaccctgtttggctcacaatcaccaagctctttgagctcctcatccaagaaaggaaaagctctttctatgtgtctatggactgcctccacaaccccctacagctgagcctgctcctcacttatgcctccggataccttagcctgtaggtcattctctcctagcaggaggatcatcaccaccacgagaggtctgggccacctttgcccttgaggcctcgcaacttggaagacatgtttgtaaaaagaaagtagcaaagtcaaaaagcaagtcataaatattcaatccaagacaagaatgtacaagatgacgctaacaactatctgttgggaatattttacnnnnnnnnnnnnnnnnnnnnnnnnatgttgaattaacatcctaaatataaattttcttaaaccaatgaaataaacacataa

SEQ ID NO: 121796 - DNA, 1603 bp, Cannabis sativa
ttttttttttttttgagtttttgtaaataactctctccaaagcattccaaattacccacttgattttatatcacttatacacattataaatgatgaaaataaatcctcaacagctatatttctattataattttgaatttcaaaggattaagttgtgtgacctcttttatacacttaatgagtgatattatggaagttacaaaatgcatgtaagtactccacctgatatgttacacttaattgttttgttgcataagaaatgcatgaacgatctcttgtttcttggtgtttccccagatctgcatagctcgacaagagcaattaagcacaggatcagtgaatttagtgatgcgttgatcgacaactactagcctgaggattttgaactctgtgtttccacacctcctgaccctggttgggatcttaaggtgagagtagacgcgtctgttatggagggctttgctggtttgagtttagttcaaactgaagttactaatgaggatgcaatgatgattctgcaatacaccaaagttgacaacgtcctagaagctgagttactggccattcttaatgcactacattgggcaaaggagaagaaggtcaagtcagtgatggtggaatctgattctttgattattgtcaaggcccttgcctcgggtgttcttcggtttgcttggggttctttccctgtatttcatgaatatcgtgctttgttacctttgttttctaaatgtgttgtgtcgtttatccctgggcggacaactttgtggcagataggcttgcctattatgctagagtgttgcgtgtttgtatgaggtgcatgttaagggaggtagccccctttgtgactaccatgtgacttgttttctgtttgtttcaataaatgcttttcacttaccaaaaaaaaatctatttattatattatttaataaaagcacttacaacagtttttttaaaatagaaaaactttaaaatttttaaaaaaccatactaaaaatacattaaatcagatgctctaaactctttttttattattattttaaagcttatttaaaatttattattcatgctccacttttatagaatattatttattctaaaaaatattttattaactttattagagtttaataattatttttatataggattaatatgtgtatatatgaatattatatatttaaaaggaataaaatatattataatttaaaaaagtaaaatttttgtaatgtattttaaaaagttgatgtatgatgtaatgtaaacatatactccaataatcaacaattacttttcaagttaacaaaagaatagaaaaggatgaaaaagagaaacacatgcatataaggtaatgaaatatactaaaataaaaaaaaaaatattaatacttgataaaactatctttgataattagataaaaaaaaatgaggtgtatgaaatgtaaaaaatcctcaacaattttagggccaagcccaatttaaaaagctcacaacccaaatataaaagggcttatttcacaaaaacataaaaattacaaaaaaaattacaaaagtacagtttcacggaattttaaatatttttaccatttttttgattttattta

SEQ ID NO: 121797 - DNA, 1133 bp, Cannabis sativa
accaaattacccttcggggccattaaacctttgaattaggtgtaggggcaaagtagtcattttgttagaaaacacttttgtcttttatgggttattatgagattaataagctgatattaatttagattatattatagtttaggaatattagtaaaaagctagaaacaccttgatgttaccacactttatttctttctctttctttttctctctcttgaattctctaagggattagctagggttagattttctcaacttcaattgagagattattgtaggttttgagtgtcctagtgcaaggtaatcccttttagccttttctctttgatttcctatagctcaagttaagttttaatgtgtgaatatgggtaattagctactgtgttgtagatcagggcatgtttaggtattttgaggtttagttgggattgtttttcttgaattgagtgaaatttgtggttggtggaatgcttaaagcaagtttactttgtactccaatagtgttttgtatttttgggtgaattgctggcttcttttacttgaattgggttcattggagtataagtaggtattctggaaatttttagagaatttggggttgaattgaggtgttgggggacctttgtggtggttcccgcactgaactggaatttcggcttaggggtacctgtagcaaccggccgaccggttggtccctaggaaactccactaaaccaaaattccggttggggaaccggtctaccgattaggacattttagtgaaccctagtgtaacgccctaactattaggcacactacgcaagatacataagaaaccctaatcccttaatcgggattactaataaaattagcgcagaaattaaactttaaatacaaatggaatgaaaataaacttgtactaattttaactttacaaacaaaagttacatgtgtcaggatcctaaaaatattttacaaaatactattacaagcccgtttctactagccgacctaagcggcaaaacagagtcacacaattcatcactggtagacaccaacccacttggtctagtgtggcccaaacatgtacaagaatcgccaagctctcgcactcatggctgatcacaaatcaatttaccctttcctgcacagta

SEQ ID NO: 121798 - DNA, 762 bp, Cannabis sativa
tttgcggccgatctgattgaacaaacaactgtacctactgtcaactcggtccagagaggtgagccccaatagttagtcaagatccaaccttcctagcctattcactttgccatcaaattgctggagtaagaattcttacttattctcaacatttactttactcagcaccttttactaaggcttccttttttttttctttattctttttaggaaaatttattggctgagtgttgttcagaagtagtgtccaaaatgaccttggagctagaaaatgttcaagctgaacgcgaggcttcagacacaaaaagggtggaaactatggccaaattggaagaggtccaaagccaagtgaaggaactcgtggatcgccaagttaaagataggctctagtatgctgttaacgacacgatcaaatcttataaggaggagcattacaatacgaccaacgtgcgagttgaaactttggaaactcatgaactcagccttaaggaaaaacttaaaaccattgagtgtgacctgaaggctgctaaccttaaggtggaagaggtgcaaaaggacatcaaagagaaaagcttctggatccacaacttggaaaaggaccttacactcattaccaacttccaagatatttcaataaaggccaaacaagagctttccaccaagcttgaatttgaatccaagaaaaacactgatcttacgcttcaacttcacaaggtggaaggagatttggtggaagtgtttgggattttatgccctaaataa

SEQ ID NO: 121799 - DNA, 1351 bp, Cannabis sativa
atctgttgatttttgttttcaataatacatattaattagaaggtagtcctttttcaaaataaaaataaaaattagaaggtagtgatcagttgagaaataatatatagtatcgtttaataaacctccaaaattgaactaacacaaggcgttaaagtaggtcattttgtctccacttaatttgtgttgtgatcaatatataagagaactatatttataacatatagttatacttatataccacctaaacccacccacagttaagagacccaacacatcaaaactatagatatagcagtcaaagggtcatcatcttcacaatcacatgaacccaccctagttaaataatatgtattacaaacatctatgtatgtctataaatacgacatgtgttttgcaacaaaataacctttttatttttattttatttttttgaggggacataaaattccatctttcggttaatcatcttttggcaatgttatgtcacatcattattaatattcgagtatgatcatactttcacattgggtactattagatatatatagtttttctttgtatattttcatagtgaattaattcagcaagaaaaaaaaaaaacttcaattgtgttagtgacattataacatttgtcaaaccttggggatgcatatggggaagaaatggaatatttgagttttagcaagtgacaaagtaatgggagtttttcgaagttttcattaattccccataaaggaccaaagtgaactcacatgcattataatgtcagaatatcttcaatgtcatgtttatctagatctatgtaatatatatagctaataaatataagggacttagctgttatatataggtctttgaaggactgatttgcaattttggtgatattaatattttagggtaagtgttgaccacagtactatctatatacaataattaaattaattttctctcaattattattgggtccaacttgtatgaaaatctggccatgcatggtttctcattaggtaaaaagacccatgtgaacttggcttttctccatctcttcttttgtgcttgcctccaatttttattttcaacagtacatcacaataaggaaatttgactaattatacattaaggagaaatgggtttctaaaccaatattatgcaatattaagaaaataggccaacattatatattattctcataatactcctctagcttaactcacatatcttctctcttctcttctctcttcactcatttacactaacccactcacaaatttcattctcttcacttatttcctaaaagtgtgtttagaagaaactgtgtaattactaagtagggtaattactgtggtaatta

SEQ ID NO: 121800 - DNA, 1609 bp, Cannabis sativa
aaagtaaaattttttgtagtgcaagaaaatttttaagtccattattttttttataatcatgtacgtacatcgtaattttttaggaccatttgttaatttctaaaaatttcttaatatatagtttacagtgccgataataatattctaataattacttaccacaaatataagaagaaaaaaaaatcacgcgtgtgacaaaatattttaactttaattattttcaacattgcaaattattcagaataatttaaaagtttatatgtgattttaaataattataacgtacttaatcataagaaaaaaaaaagactaaaaatctgtcttagataccatagcaaataaagagagagtatataaaattactcaaaaacatatttctcaccaaaatataatttgtttctttaagtatctttttcagtcccacaaacaatattttattgtgactagaaatgacatttaattaaaaaaaatatactgtacatgattattttttttttctagtgtactgaaatttttaagagcattgttgttcgatactttaacgtatctaatactatattgatgtgatacgtcaatagtgattagtagtatttttttatattatttattaaaaaaattgtgtagaatccgataaaattagcaactcttataatacttgtcaccttaagatgatgcgccttaacatttttcaatattattctatactcatttaaaattgagtcaagaacagctatatatgtttagcaaagaaaatacatttattaatggacaaaaagtagggtcctgtatacacaagaacccaatagttggaaaagcaagcgaatggaaatttgaaagaacactattttgatttgttaaaataattcataagaataaagagtggtggtagtagtagtacaatatataccaagttcaaaactcaacacctgtaatttttgcacatgtccatccctaataatagccatatacttcaaatagaaaagttagccaaattttaggagaatctcttacaaacaaaacaatataggtggttttcagtgaattgaattgtcttcaaagggtactatactagtgtcgccattaattttaagtgattcaagcactataaaaagtggttctgactctgaatgtgaatagccatttaactacaaatttacttgcataattgatgttaaaacccttgcccaatttttgacacaaccacaaatggtgaggtgagcagagcaaacaaggttataatgagccctctatttatagttttatttaagttaatgagccctcaattttttacacaaccctttatagttttatcttttaatttgtttaagttaatagatgataaattatttgggtttattgtttttggactgataagttttatatattttattttttatttgatcaagttttataaatataattagggaagaattcttggtggctagcttttcattttcttagcaagttcattaatatggttatgaactgtattaggactccaaagttctctcttatgtaatagttctctacatagtttctttgaatcgaaaagaaggttaaaacaaggagatccaacgtctctgtgacagtcagtagtcccgtgatctgt

SEQ ID NO: 121801 - DNA, 1560 bp, Cannabis sativa
taaatatcatataactgattatcataaatcaattaaatccttttactttattattatctttttattaaatagattatctaataatatatttaattcaataattaaaagataaataattaatctaatttgaattattttaaccaataaaataatcaaataaaattaacatgggcatttatatgtcacctgtttatcgagattttagaaactaataaatagagcttaagatagaaataaaacagcaaatgatacacatatgatttttacatggttcagacattaataatccccagtccatgagttacttgtattggccttacaagtgagtgtttaaacaatacaatatatgttttctatataaaccctagctctgcattccttttgttttttttagagaagaagaaagctagtaggaatttttgctgaggttcggctagtataaaattgttcaccctttgcacataaaacacgagagtatttataggcttacatgtgggtaagagcattccctttactcacctagggttttgtactaagcacgttgtaagggcatgcactacaacatgacgatctgagcgttggttggtaggaaacttccccattgtgtggtgtatggttgcagtgaaggatcccatatggacaaggacacgcgtcactcaaaggtttcaccttgaaaagttgttgcctaaacaagctgttggacaaaaaaggggaattcaaaggcaggtacgtgtactatcatggtctgacgcaggggacaatatctgattcagtgtcagaggatgggtagcggtcacttcaggttctagataagatactgtagattaagctccgggatcaacaagccaaagccttcatggatcatactgacctactaccattctggaatacttgaagctccaggtaactctgatcctccccaattgtggatggatagtaagagtttcggagcctgatccttactcgctaaatattggggaccttcaattggcttctcaaatataatagtctcttcagcgtcttcaagcagtaagaatatactgatcacagatagtccatggtggcaccctttcgtgtttgccacgtgttaggcatttgggaatatggataacatttacccccaagctcctgggactcttgagtgatgggagcttgcaacttctttccagatgttatattcattattatgatacgccaaaaaatatcttgaaatgcagaaacaatcttccatgttagatcagacaactgaaaagttgatttatcccgtgataaaactatcattttgttgaaacatggtatccactttgtgaagctgtgggacttatgcgccaggctcaggcgcattccttctgggaaaggaatgacgaatggacttgcaaggatgacatatttgtggcgtgttgattaactaccatgaaataaaagtaataaatgccccattgtctctgcaaaggtgctggttaacgcccaaatatgacttccactagaggtggttgtagtatagatcggacggtcgatttcacagggaggtaattatggacaaaagcgttagtagaaaaa

SEQ ID NO: 121802 - DNA, 2118 bp, Cannabis sativa
  modified_base (1027)..(1029): a, c, t, g, unknown or other
ttatagggagagagttggtacatatggctccataaaaggagaaaacaaaatagtaaatatccctattttctaggatacaattatgatttgataaagcctttactctcttggatagatttgttaaattcaagtttatagggtttaattgtagatatttgtggaagcttgctgaagacgagatcaaggattgcgtatctctgtccggtatccctggcagtgttagatctggccagcatgttggtcattcggtcagatcccttgacacttgtcttctttataagcttggcttgtacaatcactcttgtaggatggtcccattttatctagctggtaggttgagcatccgaccagatgttgtaggggacatcatggcaaaattatagttgtccaaccttctatgaacctgccagacatatttctgcctggaggttctttaccaggtcactgagatggttgaatcatgctacgtgtaagggtcacatcagctgtgcaaattttgggataacagaaattaattcttactcaatttactcatcaaataaaaccttcccttatatagtgttgtatagaggtgacttggggaccatggacctatatttcgaagctccaataaacacttgattattatcgatctcatcaatggaataatccagtttattaattctattattaatccaccatatatatggaattgcactctttgacaatatggaattatttttactgaatttttacttgtagtatattgatataatcaatataagtagttcaccctccaattattagttcataattagagttagtcaaaattaccattttacccttctaatgtaccattaattcaatgtgaacacttaatctataacttattatagattttggatctaactgtttgcactcccagaattaacattataaatgaactaatattcgattcgttaggaaagcttggattccattattgtataacatatttccatccactcatgttattaagctccaataacagaagttgtaagaatcatcnnntctgagaaactttaacatgtgaatcaaggaacccaatgaacacaaataggagttcatgtatacttagaattcacactgatctactaatgactatcattgtgatatgaataactctttcatggtaaatgacatgttaatgaaagatattgttacaaatagatccagtcatgtataatcaaattatacacaatacttttaccacatgtctatccacatatgtgttaacacagattttctttaactaaatatatgaacattttatgtaataaattactatagagttaataataataataaatgaacactagatatttttatgtggttttgtagttaaaatctacatactctacgagtccatcttattatgaatgataatctagatacagagtacaaattctctcaatcaatctaatagatagctttttctctcaaatttgtcgtcccttttaccctagattctgcccctatttataggtgtatagggtggcagttgttttctttaggatttaatcattcacaaatgctcatgaaacgtggacattcttcatgtttcatttctatgcacatgaaataatatttaataactacccaaccattcttttgtctttatccttaaacggttgtgttgactatgaaggttgtctctcgctaagtacgagttatccttcttaccgtccttgtaggaaaaaaggctaagtatagatatacttctcctcacaatactcttttactttgatggtattagcgaggtggttatttttacgtataaatggcgagatggctgaatgtagttattatctccatatacacatatgtggatcaattagttgaaggcttttattcccaagtatgtgggtcaatgatctgcaagctctttactatctcgtcttgaacacttctgttatgcacgctgtctttcccgagatggacttattatctcgccaatctttaacgggtaatagttattattcttatattgcatttacttatgtggcagtgagtttgaatatttctatcaaccataatttattgaagagaaatgctaaagggcaccagtggtgcctaacaccctcatatgtgtcaatatcg

SEQ ID NO: 121803 - DNA, 1464 bp, Cannabis sativa
aattccggttctgtggagtttcttggggaccaaccggaatttcggttcctacaagtcccttctgaactggaatttcggttcagtgcagaaaccaccagaaactacctacacacttcaattcaaacccaaacctcacaataacttctagatcacctaattataccataacaaacataattcatacaataaaaccaacaaatatcctcagaatcaaatatcaccattaaagagcaaagcttgagctctaaagctcaaaccttgctcaacataaacactaagcataaaaccatacttaaaacatcataaataaccttaaaataacctctgaaaatataatccatacataaacaaactcacaacacctaaaccaaagaaaatcatgtaaagaacctaactttgagcctaagaaaacaaaaagaagggagctttgatgttaccttgggttgaaacactatgatcttgctagaaaaccttgacttgagctaaagaaaaccctaaattgctgctagttacaatggaggtcgagaaagagaaagattgaagagagagaaaaagtgttttatgtggtttattcctaatttaggttaaaggaaaataaatcaaaacttatctaatatcaatcctatagaataacttggattattctacctaatcatcccattaaaggacaaaataaactaaatggcaaaagaccattttgcccctatttacaccaaagagcatccttgcccccaagggatattttggtcatttctaaaatttcaaatattcccgatattcctaatgtctaactaagttgccccgctatcactaaaatactaaaatgtgatactattggccaaacgtcgcgttccaatattgtcaggcacaaactatgaaaaacataaatttcatatatggcataaataatacaccctgaattcaaataaatccataaaatcataaatcataattaataatctagtttcaaaattaaaccataattaactagctaatttccataataaaactaagtggtctttacagtttatccccccgttaaaaggattttatcctcaaaatctaacctgaacaactctggatactgagccctaaagtcagactctaactcccaggtggcttcctccaccttaatgtttctctagagtaccttgaccaaagctatggtcttgttccgaaggactttatcttttccgtcgaagatctgaacaggttgttcttcgtactatagatgtggttgaagttcaagattctcataactctgtacatgagtgggatctaaaatgtatttccataacatagagacatgaaacacattgtgaactgctgaaagtgctggaggtaaggctaggcgatatgctacaagtccaaccctctcgagaatctcgaaaggccctgtgaacctagggcataacttgcctcttttcccgaaacatctaatccccttcatcggagacacccgca

SEQ ID NO: 121804 - DNA, 846 bp, Cannabis sativa
agtgcagtatgcagtggttgcgggggattacttcaccaagtggacggaagccgaaccactggcaaccataacatccaaaaaagttcaagtattcgttgtgaagaacataattttccggttcggattgccgtacgaaatagtttcgaacaatggcaaacagtttgacagccagtccttcactgattagaattacaaaattttgggtttttggcatttaaatggttagaattggaaaattggcatttttgagcaaatagaaatgaaaattgtcaaaattgcaaaataccaaagtggggcccactaacccttgcccggccacttatttgggtttttccaattaatattttcattattttaatgcccaacaattcctaaccgaaacgtagtggttacctataaatagatagtgatggctcacacttattaagagattgaaaatcagaaattttgccttcaaaaaaatttgagccatcatctatccttctatagctgacccctctctctctctcttttcgtcttcaattctcgaaaccttgagtgatagagtgagtgcccacacgcataaatggtgtctgaccgagaagacacgcacaagatgggcaatctgagcgagaagacatagcgcaggaggctgcacgcaacctctccgcgcgcgcccaaggtcgtcttcagacaatttagcacttccagaccgagatttctcagtcatgtgcttatctatgcgcgtgcatctgaggaaaatcaagcacccgcgcgcgcacatgtgggtgatgacacccttgatattttccgattttcaaaaattcataactaattcaaataaaatagaaatcaagttctgtaaaa

SEQ ID NO: 121805 - DNA, 1008 bp, Cannabis sativa
agtaaatctaagatcctggtaaataattccaacattcacccccaagggcctcaagtatttgtccaccctgttcatcctctatgccacacaagaatggggtgagccctcccaacatgacaccaattggctctttaatatgaactcaagtcccaagcaaaacatgtcaggattctactatttttcttagatcaagaagaaattgttgacgggtaccacgaccaccgaggtgactaagatagggggctttgtggacgaatactattttatcaaaggaatgggcaccgtccacaccagcttccagcaagtttcgtcctaatgccgccctccgttcacaccggagcttaggaaaagggagtagaagattctttaactccctcgtgctacacggaacatctcctcttggccatcgagccaattttgtcaagtacaaactttatttggctaattttgtaccaaaggctgtgaaaacagcaaaagaggtcgtgcccaaacaggaaactctgagcaagaagaggaaacagaaagctacttcaagcagccaagtacctgttgagcggtgtatccggatcagggaagaacctgaaagagtttcctggccatcatccccagtggtaagaaagggaaaggctactctagttgagcaggagtgggaagattcttagacgatgagcctccatctctgcttattcgggagaatgttcctgcctacgtgtagggtattttaactctattttaatttttatctgtattggcttatatcgtacttgtcattaaccctcttgttgtgttcacgtgcatccatgtctcaaaaggtgttccaagccctaaagaagaggccaggtgacagctccgcccatacccctttgacctaacgatcaaagggtgatgagatatcgcccatggagaagagctcgatcgagtcacctatcgatgtctccgaggaggtggcgtcagaggtggagccacttgttgggttttgtgccccaaataaaacccatttcaatataa

SEQ ID NO: 121806 - DNA, 1785 bp, Cannabis sativa
tttgccaacgcatcacaagtaaattctattttaccagcacaatactaacttttgccagcacaaaaatgtgctggaaaaagtgatatttcttgtagtagtcaagtgttttcaattcatagtagttcaaataatcttatctagtattgacggtgagaactcatcaactaacttgttggtaagaaaattaaactctacttcaagctttctattgtttatgtcaaagtagagagaaaataaaaactttctattgttggttacaggagtaatttttcaaccccctctcacatctgaggaaggagtttttataggctctaattcctgaggtacatggtggtcccaagagacaaggtgacatccatgagctggagattgcaggtcgaatcctcacgccttgtacctttgtctgctgtcaggtggtcctgggttgcagggtagtggctgtagagtcctggttgttaaggcatcagggtatgtaggagtgatgctcccactactcatacccccttgctttcagagcttgcagaaggcgtggttgtacgcttctcggatgcaaaccttatcctagtgaccatacctttgtcgcttcactctcttttttacttgggcagattccactaagtttaggcaagccctggctgagtgacattcaggagagtcatgggcgagtgacctcggggaggtcatggccgagtgactttcctcattccatggctgagtgatctcgggaaggccatggccgagtgacattcagaaaagtcatggttgagtaacctcgggaaggtcatggcgaagtggctttcctcgtgccatggtcagtgacctcaggaaggccatggctgagtgacattccttgtgccatggctgagtggccttgagagagccgtggccgagtgacatgtgggagggccatggctgagggacttggtgatgaacatggtcaaacccgagcatcaacagtcacatttgcatcatctggtagctactctattatgcatctttttagcttagttccaagtggtgtgttgtctggtgttttcttaggaacttgaccacaaacaactgctaattcaacactgtttcctccaaaagttccagataaatcagcataaacatcaaccttcctatatctctttcttctcatgtcctcgaacatagtcaacaaatcattgtcaatcttaaggtcaaattcattatttagttgtttgtctttaggcttaaaccagaaatgaagaggagaaccatgacaccactgaacttgcaaaagcattccttcaagttccattatgctgaacaaatctgtatggcatttgtcaaactcggtcatagtgcgacccacatagtgtttcaaaccatttttattgcaccaagaacccccatgatgcatatttacactaaagtacaaacttgtcagcaacaaaacaataaaaatctatatatatatatatatataagataaatgtgaggcagtgacatggtgctctaaaatagctttatctactctaatagttttctcattttttcacattttttaatcacattaaatattaattaatttattaattcaataactaataaaaaacttttcaataatcaatatctcacgtttatgttccattttttttaaaattaaattttattttttctcccttgactttttttttttaaattaaaatttttaaaaataatgtcttttttaaaaatatcacattttgccttatcttttttcttttttagttctttggtttttatttttcttcttttttaaattaacatttttaaaaatga

SEQ ID NO: 121807 - DNA, 738 bp, Cannabis sativa
ttttttttttttttggggtgttaaaagtatagtagaatatgttatttgaagaggggggcaacattgtttatggtggggcaagaatggcagagagcaagagcacgtccccgacagacagggccatccattgtgcagtagtattgcaattgtctatttttatatatatttattcacacaccaaaattcaccacttctatatctttttctatctctctctccacgtctgccatatgtctcttttatctatgtcgactctccatgattgttgctttttgtcagcctctcttttcgcacgcctccgactatcttttctatttctattgacagcaatcgctgtatatgaaactctatattatacacaattgttcaaaagtataaccagtctttagtgttttatttggtattatttatttaatataattaagtatcaaaattttttatactttaagaaaataattgatctcatatacttaaagagaataattgttagagattttagatgtattacaattttattgtaaaattatacaaagattaaaataaaagattgattaaatatatattacaatagtacaatacatatatatacactatatattgtatatttatatatgtaatgtagaagaaaaagaattaatacatataaatagcaagagaagaatgtatatatataatattcacttacaaccttaagtgtaaattagtggagatcactaacaaggtattacacctttgtcc

SEQ ID NO: 121808 - DNA, 1218 bp, Cannabis sativa
  modified_base (1167)..(1185): a, c, t, g, unknown or other
taaatctagctaatttaattcaaagaaaaaaatgaatttttacatgataataatatgctattagaaatcaacaaaaatataagtaactattaaatagtgactcatataatatttcatatattgacatcaagttgaagagattgcgtgtggctttaaagctagctactatatatgtgtactcacgttgattttttccactatcttttattgaccaaattttaatattagaataaccattttaaaataaattaactattttatatagtttccatatggaatttgaattgatacgttcaaatggcagacaagatagcgttcaaaagtcctaatttcttcaaactattccttttttttttatggggttgctttgtctatatattgcttggctttctctctctgtctttgaaacatctaaatcctattattattatttcttttggccaaacttacccgtattagaaggcatcatttgtattttgtcttcttcccaactcattggaaagagatgtgtaacatataattaatggggttgagatattgataactaaaatcaaaagcaggtatagtttttcactcctaatttatcagtacttttggtatgcttttcattttcatagtctaactataataaagcgatatagagacatgatatgcaaaatgacacaacccacattcagtggcaattacaaagtgcatgtttaaaacgaattacgtaataattatagacgtgatcttttagatcatatataattattgtatatataatatatagtagagaaatagtgtcataatttagcaatatattatattttgtctttcagaatttagtgatattattagaaaatctcaagtagttcttttatttctttctttaggagcgaggaacacatgccaaaaagaaattaaaacattagatcaactattcgtgctatccttaagcagttatataggatgaatataaaaaaaaaaaaaaaaatagttacatataaaattatacaaaacttatactacaaaaataatcaaattgtaaatattatttattattattatctattctatataaaatgtagttatgtaacggaaatctttattcaacgaagttttttaaattttttacgctaactttaacatatcattccaattacttaacagaatattttttattannnnnnnnnnnnnnnnnnntatatttaaaaataaaattatatagatatttta

SEQ ID NO: 121809 - DNA, 983 bp, Cannabis sativa
  modified_base (952)..(953): a, c, t, g, unknown or other
tagtacattttgctatatatatatttcactattgcagatttatagtactatttcaatgatagtaattttaaagtactatgtaaacagaaaaatatatataactcactcttggattggaagggcacaattggcttgtagttgaaactgaaaacttgggtgacattgttgagattagggtgctgagcaacaagggtccactgtgtatagttatacctataatcgaaatttgtgatggcaatcttggcacgccagtactgcttgtagttaattttcacatgccaatgcactctaattgggcacatgtgttgtgtgcactgaagcaatggggcattgtcttttctaggtgtgtgtaatcccacaacacttgacagtttcgaatcacttctgcaagttttccaatcacattattacagcagtgtaatatgtcattaaattaagttcaaatcaaactatttgaatatttgaatggagaagagggcttactcaacgcatttgttcttattttgacaaccacaagcgcaagttggacaaggagtgatggttgagttatagaatgatgacaaggagacacagcattttgggtactttgaagacagtagctgtgagtaagaacatgtaacattccaagtcactacaaaagaacacaagaaataaaacactgttaaaagcaccttctttgggagcgtaccaatatgctttgttagatgtgtttgctttgtttattgtataccaaaaaccagaatatataatttcattacaattttccttaaaaaatttattgtgaatgtacaatttcaacgtgtggatggcttgcgggacccatctcattttggaaaacagggcggaaacatggatcataacaaggttggggacggagatgacacttcagtcctgacaagatccgtttaatatttaatattttacaatttatggtggcgtttggtaacacttnnttaatcagttttttgtttttaaaagtagaa

SEQ ID NO: 121810 - DNA, 917 bp, Cannabis sativa
gaagaactcattgctctcttcaagcctcgtttgaatacaaccaactaaaaaacatgatctagtttattagtttaacttaaatttatcgtatcatattatcataacaaataatagcctaaataatatgctggatgttgttgtttgtttgataattaagctgcattgttttctaagtatatagttttgtttgtaagagaaataatttcaataatatattcccaactttattgagaatgttttctttttacttaaataattttgtgaaaaatatatgactgaaagatctaacattgttaaaaaaaaaagcaacacaatctcatcaaatatttggagttaggttcgaatattttgttttgtttgaaatagtttcttttgatattagtcaactctcatggattcgattttacacttacataaatattatattctgaaacaattcgtgcactctgtgtataaatattaaaacactcacttttgggtacaacacatacttatttataaagttatcactaacatcaacatttgaaaaagtgacatataagatcaaaattcgtctattaaaagatctcaacgattatctaaatcagaaggaattattttatactgcactctttttcttttgactgagtttttgtcctactatattttcttgtaaggttatgagccactttttatggacatccaaagaaagtgttataaaattagtatagatgtccaaataaatgcattagttaccacaataaatacttgattatatttctctttatttcattgatttaatttcttattactataatcatattttaatatttatgagtagagatagaaattgggcggttaatgtacagggaatacaatccccgtccccatccccgctacctatttatacccccattcccgccccatccccgtctaat

SEQ ID NO: 121811 - DNA, 1786 bp, Cannabis sativa
  modified_base (27)..(28): a, c, t, g, unknown or other
aacataaataactgctaatttccaaannaactaagcgggctttacataaactctttgttttcttatttagtttagttacaactagtttttgttttaaattggtttcgcaggttcgaaactagtttcacattaagggttctgtaatggggtagttgcttaattttatgaagttattgtatattttttaatttaacatttctttttattattttgtttctagatttgaaactggtttcatatttatattttatttttaaattttttgttgtacagtgtacgttattttaattatatttgcgagtttttaaatttttttgtttgtgtgtgtactttttttttcatatggttgattgatgaactggtctaagttatcttctatatttatcattttatgttttgttatcttttgttacgagaattcatatgtttgacactgatttgttattgtacataattaagcattaagttttgttttttcttttgttattataaaaatctagttttgctgtgtaaaattttcaaataggtgataagtgaaattggtttctgataattaattttctaagctatgtgttaaaaaaaaaaataatgtgctatattttttttttactaactcgtttttgtgtttcaattttttttattgtttagttgttttatgtttgttcaattttttttttacataattggcttctctattaaacatttttaattggttgtttaatgtaactggtttctttgtgtcagatttttaattgtttgtaactggttttttatacgatattggattgattgtttattgtaaatgatttctttgtgtcaaaaattcaattggttgtttaatgtaactgatttttatgtgtcaaagattttatttggttagttaatgcaactcgttttaatgatttaaatttatttatttgttaataattctttacggtggtctgtttttttttttttaattaactaatttttctgcttcaatatatattattttattattttaagtttcttatgtttttatttatatttttaggtaattgtatttagtaaatagttttgtatttaatctttgtttttgttatttagtttataagtcattattaaaaattattttatagtatgtattctttttttctttataagtaattggtttttgtaattaatatatcttttcattatttaggtgtcatatgtttgttcattttttagttaatcgtaatatgaaattggtttctatattaaattattgtttttgttattatacgtaactgattttaaggtttagtttttaatttggttaatctacataactggtttctcggtgtcatattttgaactagctgataaatattactaatttctctttgtcaaattctaaggtccaacttcggcgacaactcttacatcaaacatcggtgacaattttgatgtctaattacagtggcttttcggtagcgacgactctcccgacgatgatatcagttatgttgaacattctcattctattctctgcttttattgcgactaatattttgttttagtggttagtgactgttttgtgtagtgggttgatgattgagtcttggagcttctcgaaaatttgtaattggttttaattttagtcttgtgttggttttagatttggaactggattggtagtcaagtcttatagattctattgagattgttagatttaaggacttttgtctaattttatttaattttactgtttcactgattgtttatgtactaaactatgctccccaaactttaatatctaccaaat

SEQ ID NO: 121812 - DNA, 1204 bp, Cannabis sativa
  modified_base (684)..(699): a, c, t, g, unknown or other
  modified_base (753)..(753): a, c, t, g, unknown or other
aaacataaccaatattaccatatatatactaatcaataattattaccatatatatattacaaaaaaaattgaaaaaaaattttcaattatatataaaagtgtatgaaaaaatgataataagtttttttgcacatattttgtaattaattaaaataatgtatacaaaattataaaatgccctaaaatctaacatctaatatataattgaatcggatctgaataggcccaaaaatattagatttgatccaataaatacccttatgtgtaagtttaaaaaatatccttcaaaaaaataataaaataaatttaactatcttccttattcaataaatataatttctcttaattattttaaattatgaaccatcataaataagaatatacataaattaatatatagcataggtctaaacaccctccgaaactccaaaaccaaatctcaatactcactacaaaaaatcataattttagtcacaacaaaatttgtgattaaaaataaaaaaattataactaattataaattatcattcttatgttatgactaaaaggttcatggctaaaggtaatatatagtcacaaaaattacaaattgttgtgactaaatgtatatatttagtcacaatatatacttattgtgacaaaagctaaattagtaacagcttatatttaaatactatgttttannnnnnnnnnnnnnnntgttgtgactaaaagtcacatttgtatattcacaaaaaaattatattgtgactnaaaaattatcactaaaagtaacaattttttgtaatgactaatcctaattaaaatatagtatcattgtttttcaccttggagcttatgtaatacaaaatctagaaagaattcaatctatgagattgcaattctaagacttgcaaaagctactaagccttaggagaagaattcatttatatagagagtgttacagggaaaaaggaaaagacaagaaaaaagacagagtaacaacttttagaaattggttacacaattacaagacactaactaacagaacctttaacataatgattaattgtattatcaccctgaagtgaaagggtgttgtgcaaaattaaagcttgtgtttgagatagttgatgataactctatgaaaatagaattatttatatctttttgggcattaaattagttttgttctcaagaatttttagtttattttagtgacttt

SEQ ID NO: 121813 - DNA, 2287 bp, Cannabis sativa
ttgtcatttaacaaaacacagggtccaatttgtaacttttgcaaaatagagggtccaaaatggtatttacccttatatatatagtattacattattaattagttgtattgccttatctctcgtgtttgtatcggtactcatatcatacttattttacatatcaaaaatactttttggaattgggacttgagttgtcatttggagagtgtgggtgctcaaatagaatacacgatatgagatgatcacagtaaaaactaaaatgaaatcataaagttaaattaacatgataaggaaactgaatgaatggatcgaagtgatgatgagacaaacaatcacagtgtcattcaatttgtgtacgttgtattgtattatgtacaaatcttggaattaattgtaggtataaattaaattgaaaaaaattcaagtgtgttttgataattatctttcttctctttcgttctgtttttttccttcctctggattcaattcctaccctacatgacactgattcaattaaactaacactgcagtggcagtactgcactactaaccatatcaataaagagattcatcggtactcttgtcctgtcctttagagcctctcagcttatttgcattattgtacgtttagtatctacaaatacaaaataaattaaaacaagaaaaactctctctcatcttaactggcataccgtacccatagtttttatttccgtacatcgaatatgaattaaaaggattcgatgtcattaaaaggagtgccaacttgatgaagagagatatgatcaatgtacccacacaagtaggcccataataataacgtgatgagttgaagtttgaactcgaagccgtatactaacttttacatagaaatgcaaaaagggtatttaatgtcagtgtaatatatttttaatttaataatattatagaaaagttgggacatacttaaaaacaataccttttattatatatatacattaaaaaaaattattacatcttataacgtatgccgtatggtacaaatatgttaacaatttctaattatttaactttttaaatatttattaataattaatgagaatgaataataagagagtattttttatatttatttacttaattaattaaaattagaaaagccacaacttaattaaataaaggacaaaagaaagggaatactacccctactaatttttaaagaagtgtcattaaggttaataacttttatttatttttattttatttcaggaattctatttataccatataaatgataagtatacctcaacattttaaaaaaattaagcttaaaataatttttaaaaatcattcttaaatattattttaatttgttttttttacattattttatattaatttcaatactcattttaattttattttcctaatttttttaaattgttgactagaaaactagccaactgactcgaagtcaaataatcactgattaatcaacaataaagagttaggaataaaaagtaaataagagcacacaacaattatagaggtttggctcccttgtacgtgggtaataacctactcccctattagttgtattaatactgagataatatcatgcagatcactaaggaagacaaagtgaattctagctacaactctcaaagtatttacagagaatatctttcagcacagttctcttagatgcgtgagtatggttttaggtctaggtctcttccccttgtgaattcattcactatttataggaggacgttcatacatttagcttcgttaaaggagtaattaaagagtaaatattcctatattttagggtgtagttacgacctgttccagctattttattcttaaatagattggctagattcgagtttcttggattcaagttgagatatttgtggaagctagttaaagaagaaatcaaggttcgtgtagccttgtctggtactcctggcattatttcttctacccagcatgttgatcactgatgagaacactaaggctaaagatacgagtaaagatccagttggtccggtgacgagggcgcgagccaagaaattcaaagaagaactcaacaacttagtcaacaaaattttaaaataagaggagactgtggtcaacactgaaggagagcaaaaatttgtgtttctcatcaaagtagactcaatttagtcccaaattaagctgatcacgtttttcaaggtaataggcagctttcctttttaattttgtttcctttattttgtctttgttttagttggaaagttgtctttcttttagtttctttttt

SEQ ID NO: 121814 - DNA, 1917 bp, Cannabis sativa
  modified_base (1883)..(1890): a, c, t, g, unknown or other
attttataatatttattatgttatattttatattatttactatgttatactgttcacgtcatgttcaggtggagtggctgcaatttgtggcctaagtagttcgaagattggaggagttggataaatactcctagaacaggtgtggcagtgtctgtgaggaatcttttgcttgctgccacagtcgatactttgtggaaaaattaaaataggtgcatccatgaagggtttacccgaacacccttgtattcagttaatgaaatcttgggcataatgagatgtagattgtacaacttggctaagaaaaagctaagccttaaagatcaatgtttatatattttttttgaatgaaatatcaacttcattgaaataaaactagcattctgaatatagaatattctaaagttcagaggaaattgggaaatcagaaatgcttcaaccagtataaaatctagactgcctagcaacataatgtgcagcacgatttgctgatcgtttaacaaaatataaatggacattaggcaaagataataaagcaacacgacagtcctgaataatcaaaccaaaagtagaccccattgattgagtgcttcggatcgcttggaccgtgactaaactatctgtctcaatcacaacatggttcaaatttttagctttgatccaactaagtgcctctttgatacctaaagcttctatgactgcagcagaatgaactccaccaaaacagcctgcccgtgcctctaagcaattgccaaaatgatctcgagccacaataccaaaggcatattgctcatctctttcaaaaaagtgttgcatccacatttaacttgattttattcatatcgggtttagaccaatgctcagccccatcatccttgttgttaagacataacgatgatagtgagattttgtcctgagctttcttccaatgatcaagtgcaaccgtggctgatacaataactttcgaaacagaggtctttttttctttccaaaccgtattgttcctagctttccaaagtgtccagcagaccatagcaactttatttacttgttctgcaatggccgtggcaaaaagaagctccaaccagctgcaaaaatggcctccaggatcgaagacaaatgaaactccgaccttcctccaacaggcgagagcaaaattgcagaaaatgagtgcatgagttgttatttcaggctgagttttacacacaaggcatacagtagacacttcaacatgtttaataacaaggttcacacaagtggggagattgtttgtggcagccctccacaagaaatttttaactttaggtggtctacgcaggccccaaagatgatcccagaaacttgaaacaacattaggtagctgagatttttttctgctgttggagaagattatatgcactctttaccgaaaactcctcagtgttctcatacatccaggaccaagagtcacgacttgcattttgactgagaggaattccttgaattgcagcagcatctgagacattaaacatatctctaacaatatctgcatcccatgctcgattatcgattagaaagagagaatcaacatatttatttactaacccaggatgatgcatcgatacataaggattcttcaaattggggagccacggatgatgaagaatgttaacactcgtaccagaaccaatagttctccgaattccagaacgcaacagctcttgagagctccaaatgcttcgccaaacgaagctatgattgttacccaattcggcagtaaggaagtccaaatgaggataatatctagctttgtagattatccccgcaagagaatcgggattgcacagaagtctccaaccttgcttagcaagcatagcaagattaaagtgttggaattattttaccannnnnnnnatttactaccatgtatgtttttaacat

SEQ ID NO: 121815 - DNA, 1331 bp, Cannabis sativa
cataagcatttgaagttcacatggctttgtcttccaactcatatatgaaagattagctgtaatagagcccacttgtgctataagatttgcaacaaagataatgaattagcttatcatctatattttttctttctttctaattcaaccaacaagagaaagaaagttataatattgcagacaataccatgtgattgctgaaggactatgcttcttgttagaccccatccaactacttggctctttggtttgcactgttcactggaataaaggaatatataaatatatatatataccaaataatatcccaccaaagacattaattttatagaaacataattgggttccttagcatttcccttattaccaattagttctgagagctgagatatcaatctgcaaagaattgttatctgaaagcttcaccaacacaaggtagtaagtaagacttgtttgatctttgtcaacattgattgtaaagtaacattttggaatgtttgtaatcttcatatcactttttgatattagctacattaatcttcatcaccctcattatattattatacaattttatgaagtctaaagaaacaataatatataaatatagccacactcatcagtctctctctatatatgtacttaagagccattttgcaattaattgtttgtaatctctaagagactgacacgagtcagacgatgctgtcgttaggccttagtgaaaaaatcccacatgggaaacagagaatagaaaccaagtaactcaacaactataagatcacgagtctttcgactattaatttcacgcagccacgcagtgaacacaaagcgaactattctttcgccttttactaaagaataccgtgtgttcgctgccattagtggcatacgcctatttttggagaggtttcttctttagaaccctctataattttagttcaattatatattttccttatttaatgactcagagaagtataatttatatattgcaccgatgattttgttaataaaagatgtggtaacttgatgattgagttctgtggtaatgtgggcttgtcttgtgactcttacatggacacttggttattgtgactgtgacatatgtatagacatcaccaggtgaacaaactacaagggtaccccacttgatgcaaaatattgcagaaagataaaccattgtggaacatatttgatcacctaatgaatccttcaactagcaatttttttcttctcatgtggcttttaaattagtaggaaagacacaaccatgtgatttctcaaagattaagtcactcactagaccctatctcattatttgactctttagtctc

SEQ ID NO: 121816 - DNA, 1071 bp, Cannabis sativa
aaaaaaatacaaaaaaattaccaagaaattggtttcttgatcaagaaaaaaaaaaaccagtttcttagtgatttttccgatatttattccagcgaagtcgactccagctgtcattttttctatccaagaagtccctccagcgtacgctttgttctttcttccaagaagtgtatgtatcatctggaagcgctttaacttgaactgacgtaaatatattgttacgaggagttcgttaagtttgttaagtcgtaactaacttaataacttagcatttgtagcagtctactttgggatccatatcccttatctataaataccgccaacatttatcatttatgagggaaattaacaaatgagttttgagaagtaactttgaggttgaggtttgagaagaggagagaaattgagaggtagagagagagagaggtacaaagaaaagatagagattgggtttggaattcgtatgaagaatcttctgtagatgaaaaagattctttgataagagtaagagataaacactttacgagaatccaactgagaatcgatctcgattatactgtaccttgttcttgctcaatcagtaaaaaagatttcgatggtattccagaactagagtagagtcatagatcaaatctatctataggacttgaactggtatatctcttggtgttgattttattgttctattactttgatcaattctagttttttgattgctttgttcttttctatttttatctttgattatattggttgtgtattgttaatcttgtcattgctaatattgtttgttgattaagttttagttgatttggttatcaacattagttgtcattttcccactgtatccattttacccatagattgtcttgctttaattcaatagcccaaacatattttgcaatcgtagccgtgttccacagcaatgaattttgaatccccaaaaccttctttagattttgatttatactactgctcccaagctatataccccggggtgtaagattaaggccagccctgaaacaaagtggaccatagggaaaaaaaaaattttgggcccttatgttagaa

SEQ ID NO: 121817 - DNA, 998 bp, Cannabis sativa
aattctggccacaaccatcgtcccaccccaaaactgcggccagatcactgtctcaaatcgatctcacgacgaggatcaccgtgactacccaaaccctgaccacaaaagcgcacgaagatgtctaaggtaagttttgaatccctcttttaaaaatttatgcatttgtttattttatagtatttaattattcatttatttagggtatattttttgttttgtaatgcttgatatgtgatatttgtgagtttgataaatttaaggtttattttgagtcatgtctgtgatactgcgagaaacctagtttaagcataggcttgatgttgtccgatatagatccgattctagtggatttgagataataatggaggttgaagataaaggtctaatagaggccaacataggttcgacaatagtctgatactaaaccacataggcttaggtccgacattggtcagatactaaaccacataggcttaggtctgatagaggtcgatgtaaggttcgatattgagttcgattaattatgtttttataaaaattttctctatccgacataggtcgatagtgggtccgatgatgggcccgattgtgtgtcctacatttgtacttgtattatattgctttatgtccgttggtgggttcgataggggacgatgcttgtctgatagtgtaattacattttttatatacatatatgtccgatagaggacgatagtgggaccgatagtgattgtcttttcaatttctttttaagttttcgtgtccaatactgttcctgtatgggcaagatattggtctgatattttactgtagaatttctaacttgtattttcttgtgtcatttttaaaaaattcaagaacaccacgccttaaaattccagtctctgagccttacacagtttgtgtcacttggtgtggtggaagttattactatctgaggattaagggaaaatttgacgaattccaattatgggataattgttgggaatattttacca

SEQ ID NO: 121818 - DNA, 642 bp, Cannabis sativa
  modified_base (591)..(609): a, c, t, g, unknown or other
aagctaagcggtctttacaaaaactcccttcatcgaaggtacttttcctcatccccctattaatcatccgtatagatctgcttgggatcaatgcaatagtatggttatggcatggattttgcaatggttctcacgtgaaattccagccaataatatgttcaaagaattgacccttgctatgtggaataatctccacgattggttcaatcaaaataatggtcctcagatttttcatctcaagacttctctaactcgcattaaacaaggtgccaattccgtcacgacctattttactcagctacagtcgctatggaacgaactcaatgaatttcaaccattcaccccatgttcttgtggctgtatttgtggtgcgatgcaacaaatccaagatcattatgctcgtgatcaaatcttgcaatttcttacgggtctcaatgaatcctatgctagtgctcgtgattagatcttgacgtttgaccctctcccactgctgtctaaagttttttccacggtggttcaataagagcgtcaacgttcttgttacaccctaactagcataggcgtgttgacgtgatttttaacgtactgtgnnnnnnnnnnnnnnnnnnngaggttaatgaaaaacgtgattaactaaaattt

SEQ ID NO: 121819 - DNA, 1660 bp, Cannabis sativa
  modified_base (95)..(95): a, c, t, g, unknown or other
taataatttttttatcatttttttatgtattttaaattttattctaatccattcatattcccattcccattcttattcttatattttcattcctnccaaccaaacgccacctaaattatgcttatgactactgttttataatcttttagtttatagaaaatactattatattattttatataatataatatttcgattaaatagctaagtaataaataatttagtgtgacaaataatatttataaaattgtaacatacaaatatgaaatttcaaatgtgtgaatagtgttgtaaatatgagtcgtgctttttgacacgacatgaaaccaacataagcttggaagacacgagcacgactaggcatgaaaaaatatgagtttgggcacaatacgacacgatactacaaattggcacgacacgacacggaaaatatatctttaagcacgacacgatacgaaaagtgcatgaatagactatcccgaaaggcacaacatgcatgcgacaagcccaaaaaacattacacgatatcgtttattaggttgttaatggctcaatttgcaagtagcttgatgtccacgttttaggcggcacatagagtttttccaggttaatcctagccacccatagacctacaggggaggtctagctagccatggtcctactaggttaatcatggccgaccatgctcataccaagaggaggccagcctttggatgtggaggacactattttgctagttgagaatagctttgtacactatttccttgtcgaggtcagggtcctttagtcgaacgaaagctcccttggtccgaaagtcattttttggctgccagtttgtgtacagatcttggtcggcctataggctcaccttggccgacttataggcttctctttgccagccagggatgtaggtacaaccccttgagagctcgcttcactcctttcaattgttgcttgacagttttgtcgtaccttgtatagagaccctgtcttgctacttacaaaattgtattccacttatactctgtctttggcttacgtggatatgccacgtcaaatggacaaaatttgggataacaaatagaaagtggaaagcatttaaaactttatcaagtaacttatatcgataaggtactcaaaagattatcaatggagaattctaagaaatgacaattactatccaaacatagaattactctatgcaaggatcaatgttgaaagactcctcaggagatggaggacatgagaaagtacctttattatgcaccagtagttgggagtttgatgtttgcaatgttttgtacaagacttgacatatgttatgctgtagggattgttagtcgttaccaatctaacatttttaatacgctatcgatattaaaattcttataatttattatttataataataataagatatgcatttcttaattgtaaataaattaaaataataataaaatttaaatataatagtgatgaatattataattctataattaacactattaaaatattaaaaattaaaattatatattaacttatttatagagtgtgatatacaaatttgagtatttataaatatatattcaaattctaatgatgttagtaattttttgttagagattttatagcaatggaagaaaatcaagatttattacaa

SEQ ID NO: 121820 - DNA, 740 bp, Cannabis sativa
atgttccatttggtggtgtgcgcacttctcaagttagacgtagaggacaaatctctaacttggtgggaccctgtgtctagctagaggatgccacgtaggattgtttttggatgcctccaagtgtctcttcaattgcccattacggattaccctatgaaggtatccagatttgtttagatgggccttttgtcttttgggcagatggtccttccaagaccaatatggtatggctttttacatatctatgagttggacttacgtttgaatctagagccgtaacccgactccattgtgggaagatctattaacttaattaggcctaagaattggtctgtcttggttaattttatgcattaaagtacacgtgtcattaatccagaaacacagataacatttactcccaagtctttagggctcaagagtcacggagacttgcaacttccttccagattcactattgaatgtgggattgtgaacgagtttggccttttaaaattccaaggcaataggttgcgaaagcctgcaaacctttcatttctcctagtagagcacacatgttatgaatctttttgttcgtgggtgttacgtgccttgggaaggtgcgtgaaatctagggacgcgagatgacgactggtcatgtgtaaagaccgtttaagtttaatatattgggttattaaaaaattaggttttatttataagatttaattattaattacgatttgcatgattgtggagattta

SEQ ID NO: 121821 - DNA, 1061 bp, Cannabis sativa
  modified_base (1018)..(1019): a, c, t, g, unknown or other
tcttctaacacttagtcaaaatactaagtgttgctccctctccaaacacttagcaaaaataacaagtgttgctccctctcctaatacttttccaaattaccatgtgttgctccctctccacaaacttagcgaaacaatcaagtgttgttccctctcttagctaaatcaacaagtgttgttccctctcccaacatttagccaaattttctactgtgacttcctcattgtaagtataggttgtaatggaaaggatacaaaagggaaatacaaccaagggtgagttcgttcaaactagcacgcctccgaaaaagcctagagagaggaggttattgtacaacaaatacaacaagtacaagtagtggtaacaccatttgtctcactcttggtagaagctgacatccgaccaacaatcctccactacccatctgacaggctgaccctcatggtacaatcaaaactttgtcctcttatttttgggaccatttatatttcagagcaattagagctcaagtatgaaagcctcatttgaacacccataaaggggtttaaaattcattacttgtaaaagagctctaacactcaatacaacagtattttactccagtgatgactgagttttcctaatttttcttatgcttttcaacctcagctctttgtaattgattttctaactaatgtttggttgatgagttcttaccgtcaacagtttggtgttgtctgtgagaaaaagaaaatttcttgagtattaaccgaccaccttacgtagacattcacaatatctcaaaaagaagggactttactcaaattacaacaagttggccaccatcttaagaaaacgtccaccttccatcgccggagcagattaaatagagaataaccaaagtatgaaccaccaagccaatgctcaatgagctccccgctccactcactccctatgcgccaagggagctccctactcccgttactccccactccccacacgcaccaaagggagcttgttatagtgagatttctctcnnctagaaactcgagactagactcctatttaaaggacacgtgta

SEQ ID NO: 121822 - DNA, 917 bp, Cannabis sativa
atttcaattccaaatcatccattggtatccaaaccggcaccctactcacatcttcctttttgaatccacatttggatcccaagctttcattataaccggtcgtttattgaagaatatatagccaccattaatcacagaatctctatcagcaatttcatgaaatttgatcaaaaaaaatgccatatgacagtaatcctaccttgtctattttatccttccatagccttctcacaaatccatcaagtacagacagtggggggttagcacccagtatatagcatacaggagatgagttcctgtaagttacttcctcttggatatcatccaatgtgatcttgacctgactgtgtgatttagtgttgtcgaatgaggtggagagattcctaactacattcccagatcgcaagactagaggtgtagtatggattccttgtgcagcctcttctgaacataacctgtttgcctccataaagaaattaaaatcacactgaacctcttctttttgcagtattgtattcagggaagttctaggtgacaaagcctcctaaaaacaatcttgcatagtcgatttggttctccgagcttccagtgatcgatcctcttcctcatccgagaagtcgattggttctactcccagcacctcatccatcgacttggttttcttcgcatcaatggaggttgaaggaccttttttcttctttttcacgttcgatttcatagtcgattggagcttcccctgcaacttggatcttatcttagccatgtcaccagctcagagagagctgcaagaacgaagagagagaaaatcgttttagttatttttaacaaacctattatttatttgatctaaattgttgtgattaacttgttaacagatccaatgatctgattttaatcatagtcagatcggaagagcg

SEQ ID NO: 121823 - DNA, 949 bp, Cannabis sativa
  modified_base (502)..(506): a, c, t, g, unknown or other
ctggcacaaaaaatgggtgggtttggtattatattttccaacacccgaaatctaaaaatctgaacccgaaaagcttgaaacctgtctgatgtgtagccctaacaatgattttccaggactttgggagagcatatttatgggcaaagtatggaagaataacaaaatagtagaaaataattgaaaaactgatcttgatgaatattcttatacaaaaaagcaaaaaaaacataatatttttttttttttatgtgatacactacaactttttgttcacttttaattggtagaatttgcatccaattcaactacaaacgcgattaaagttaatctagcatgtgaaaaataaggggtaaatactatttggatcttgtattttgtaaaagttactaaattggacactctgttttattaaatgataaaattgatcttgtattttctaaaatggtacaaataggaccatgaattgattttttttcaaaataaaatttaattataatccgannnnnaagtgttatgacaaaactgtttatattttatgtatctattcatattaggaattgtttttaagttggttatattaaaaaaaagttgtcaaaaattaaggtcagaatcttatttttactattttgaaaaatacaaggtctatcttgtcatttaataaaacagagggtctaatcagtaatttttacaaaatataggatccaaaatagtatttatccaaaaataaatggttgtgtgtttaatcttgtaagccacaaatacaacacactaagacaatttaaaaccaaaataacctaacagaacctagtttttaactgctgaagcaaaagctaagtcagataaagagagcattgctaatgggcacctaacactttctataggtgacgccctataaatagttaacgttattccctaaaaattattttcttaagttatatgagatccgata

SEQ ID NO: 121824 - DNA, 643 bp, Cannabis sativa
  modified_base (31)..(49): a, c, t, g, unknown or other
aacaaaacacagggtccaattggtaactttnnnnnnnnnnnnnnnnnnnaatagtatttaccctttttaaaatcatattaagtttgattggttaaataataccatatttagtaacatttactttttatgctatatttatctatcctaattatgtttcctatattattgattccttttatattatgtgtgtttgttttagctaaattttatgttggattctttatttatttttatttaaaatatgattggttacacatttttatatttgtttttggcttgatattactttagattatttacttttctaaaaaacatgcaaatctaattaacatggtaaaatttataaaaattgaacaaaagacaatttttgtcttaaatttgatcagctctattttttcgtttttttaattcaatactataaactaatgtgatttaaaatcatatagaaaaaaaaaattaaaatcataccaaactttgattaccttttttggttgttgacaaatgactatataacaatatttttattttttcggtaatggaagataacaggtttgttacaccgtataagggtcgtattgtattaaataataaataaaactatgtttggattaagtaatgtattgtattaattattacgaccaca

SEQ ID NO: 121825 - DNA, 1019 bp, Cannabis sativa
  modified_base (30)..(45): a, c, t, g, unknown or other
tgtggaattgcacagcttacccggtatttnnnnnnnnnnnnnnnnggactactgactgtcacagattgtttagccaatttgctggttcctatcaaggggagagaatttcccctgtgattctcatctcgtttaaaaaaaaatgctccagtagtgtgaacttttattttggcacttaaagaataaattatattataattagttttatatgtctatattgtaattacaattggatcttatatgtttttagaaattttaaatattttacagttttaacttaaaataaagttcaaaataaataatagaaatataaaaaaaaaattcaaccacgcgtttaactatttgtttaaattttatttttaatattataataaattattgcgtagatttttcttttttaaaaaaagaccaaatgtatataataactataatatacgatcttatgtaaaaaattaattatagtaataacgatattcgtattatcttgtatttaatatttaccaaaggtccggaattagggactcggaccttgtacccagatctagacctcgacctcgaccctgaatttgggaccgagagtcgaactcgagcccattacctggatgcgaatgcggactcggacccaagactcaaatgcacgaatcgggacctagaccaaatttagactcgaacttggaaagtggacgcaaatgcatatgtagacgcagacccgaacccaagacctagacgcggacgcatagtcaaatccttacgtggcaatgtagatccttaaagtgaaaaaaaaaaatgaatgtcagtgtcactcgtttgaacccataacctccaagtccccgaacatggctagggattaacagactttgatgttagcttctaagccttaatccgatcataaaattttggggtaagttgaaaaatattacttttattaatcaattgatcaaatttacctctaattttatatttaatcatacctctttttataagcattgtacccaaaataccctgacataagagagtcacat

SEQ ID NO: 121826 - DNA, 1374 bp, Cannabis sativa
catacctaattattatatcttattattgtgttctatgttatatacaaatagatcttgggttaattgttaaagttataacatgatcaccttattaaaagacctcatactaatggagatatgtccattcttatatacccacgatcatttctatttctagccaatgtggaattttatttgtattcctaacaattctctccttaaacacaacactcactacaacaaaaacctcattttaagaccattaaagttggaatagataaattttagtagtctattttgtgttggacattatagcttgggacataaaaagtatatatttctagtctaactatgctggactaaaaaatatttcttgtccaattaagctggactttaaaagtagtctcacaccaaaaaatacactaaataaataatgtttttttttaaaaaaatacaattacattttttttatatataattttaatattaaatgtaaataatttgaaaattaataatttctatatatgcaaaatattaattaaattaataaaaataatataatttcaaatttaaatttaataatttattttaattataccagcattataacatcaatacaataaaatttttccattttcataataaaccatcattctctcttttaactgcggcttcagatctcggctttagctccggcgaagtgagagagagagagagagaatggaggatgttcagtacatagagtaacgcgcgtggtgctagagaatcggggccgaagaaacgtggttgttcagttcgtcagggtcggaggtggacgggatagaggacatgacagtgatggaggactttttttttaacagcgtataggaaagatgttgaatagtttcaacaaacagcaataacataacatgatgaatgtatggttgtatgattttgttgtgttccatacattttcaaccacaaatcaaatctcactattacaagtctattacagtgttgttattgagagaagagaaagagagtttttggtgtggtgtgtggatggtagaaactagaagagatatggtagggttttttgtttttaaatggaagggaaaattaattatttaataaataataaataaattataattaaatagttatagaaatgaaaatgtaagtgtatggtgttaaaattcagatccttttaaaaaaaagttgactgtgtgataataaagttttttttttgtcttttaagtgatagtgggtataagtataaaaaaaacaagtaattgtgggtatatttattctaatttaacagctttttattaacttttatatttaactaggcaacgataccgcgctttgcgcggttgtttagaaactttttatttatgaaaaataattttaataggt

SEQ ID NO: 121827 - DNA, 728 bp, Cannabis sativa
  modified_base (533)..(534): a, c, t, g, unknown or other
aaccgaataaacaaggtaagaaatcagtttatgaatgcacaagaatcttaccataaaagtaaaaaatattttgtcaactaacttactaaaaaatgactttacatactccaataataatagtggtagctccattatatttttgttgatggcaatggttgtacattataggacaataataatatatgagtggtattccaatcgatctttcattgagatagggttcatgccttgatctttaaatttaattacaagctaggaccaagaaaaagggcatggaaataatatatacagtcattaagaagaaggtataataatatattattatagatatatgtgccatttctaccacagtcgtttctgactttaagaataaaacaaaaagaaggtatatatgccaaaccatcatctaatcattaattagataaatattattttgatattgactaaatttataaaaataaaaaaccaaaggaagctatatattattattaagtggaaaatatttatagaaaatataaatatatatatatatnnatatatatttatatatatatagggattctctggtatggggcaggttgtttttttcccataatataaaaaaggtttttgaaccaattatcatgtagggattttaagttttattgtaatacaatgtattttattgtaggaaactattttattaattttattatattaatgaatttcttttgtttttcttttgaagt

SEQ ID NO: 121828 - DNA, 546 bp, Cannabis sativa
aatttatatataaagttgctctaattttatatatgataattaaaaattaaaaatagtaatattaatatttatttatcaattaaaatgataataataatcaaattataataattttttatataattgcgtgtaactattattttattttattttttttaaaagaaaatgaagaattttcattaaaggcacttgtgtatcactattattgaaaaaaatatattaaagtaactaaaataataaaatacatatattagtatttagctcatcatttataataaaaatatagaaatataaaaatatgtagcacgagtttgaacttgtataaaaaaaatagattaatctatttaaaaaaaacaaattaatccccataaaatatgatacaaaattactaaacttgtaaatcgtgtcacgcgagcctaccctataaaatgtataagccaacacaaacaataccataatgtgtatagtataattattagtttgggtaataaacgaccaaaacatatattttaattttatacatttaactctatttttttttttttt

SEQ ID NO: 121829 - DNA, 1485 bp, Cannabis sativa
ccttctcctcttctgttggccccgtggagaagtccaggcctgtaatgagtgcaaactcaagcactccgaatctgagctccttaagaccaatgtaaaaccgcatctttaactcctcctgagcatcaaccttcatcctgtgcagcatcagctggtgaaaaacagaggagaatgttaggggaacgacattccaaaagttgccgaaacgactttccttcgccgtgttattcaagttgaattcctcaaaccgagacttgatttttgcaaaagttctggtgcctctgtaagtcacgcggcctgtaaaatgctcgaatgctggaattatgagcctcggagccatctgaaaaaataaataacaaatcaatattactgacaaaaaatttaagcaaggtcgacataacgtcgacatcatgtcgatattcagtcgacattatcaaacacttagtaaacacataatttggtcgagaaactgtcgatatactatcgatatgttgtcgacattatcacaaaagcagcaacaaaataactttgttgacagcatatcgacaaattgctgacattctgtcgacatgcaaagaaaactggaactatatttgcagtaaacaaaaatcgttgacaaaaggtcgacatcatgtcgacatgtggttgacattatcaaacagacatcaactacataaaagtgtcgataacctgtcgacatcatgttgacatgatgtcgataaaaacaaccaaaagttattcaatcaactactcaacaagatatcgagatacggtcgatatgcaatcgacattatagacctgtacttttattccaaattaagtcgacatcctatcgacacaccaatgacatcctatcgatatacactaacaacacaaacaattctaatggtcaaacaactttcaatcttggtcgacattatatcgataacctatcgatatttcatcgataacttgttcgaacaacaaacactactgattaacatgcagagaaacatccaaattcgtatacacaatctaaaacaatctaatcagaataacatgccatccaaattccatccaaatctatgaaaattttattttttaataagaaaaaaactttcctttgattgttcgtggttgtggtggctacgacctctgttcggtttcgatgaacacggtccttggtggtggcaacggttcgtggtggtttctctgaaacttggttgggttccaatgtcggccgtgggtgtgtgggtcaaactcgagagcaagagatagagagaaagagagaaagagaccagtagatagagagagggttgggtcggggtcgcgggtggatggctggagtggggttgtgttcgtggagttcgttgttgggtcgttgggttgtcgacgtggcaacatcgaagtctaagagggaacgacagagagagagagagagggaaagagagggaaagatggaaagagagagagagagagaataggaaaattaaatttgaggggtatttt

SEQ ID NO: 121830 - DNA, 2179 bp, Cannabis sativa
aaaactctttcaagcttgatgaacaaagaagtaaggtgaaaactacaatggagaatatcgaggatgaagtgctgttttggaagccttcgattgtgtgttatgtattgggttcaaatccaccattgcatatcattgaaggtttttccaagagagtttggaaggacaaagttgacagggtgaagatgctatcctttggtatctttatcatacgattttgttctatggaatacagagaccaggtgctaaatggagggtacatattttttaatagaagacctgttattatgaaaccctgggatccaaatgttaattttaagaaggaggatgtgaaatgtgtccaaatttggatccaattgaaagaactagagctaaagtactaggaagaaagatctttgtttaatatcgcaggtcaaatggagaacccgatcatggtggatgaaatgactagggaaagagaacgattgaattaccctagggtgatgattaaggtatccatggatcaacattttccagatactctggaatttgaggatgaatatggatcgaacacaaccattggagtaaagtatgaatggaaaccatgtgtttgtactcactgctctggtttgggtcatgtggcagcaaagtgtaagaagaatgctacagggaagaaggaatggatagtgaaagctgataataggaaacaaaaccaagtttatgaggagggatttacaaaggtgacaagatctaggaaagttgagaccacagtgcagaaaccagctgaaattgaagttggcaacactttccaagtccttgatatggtacaggatgcaggggaaggaagtagtgtgatcaccaatgggggaaatactgaagaggggggagagccctctattctaaatgaataagctcttgtgttggaatgtctgaggagctaacaatcaacacaaacaacaattaataaagcaattttttaatgttcaaaaggttgattttattggtcttctcgagactagagtaaaggccccaaaacttgggtccttgttctcaaatgtgtttgaacgatggtgtttttcatctaatatagcttggcatgctgcggggaaagatagctattgcttggaatcccttgagatttattgttgatattattagatgcacaagtcaaattatgcttctaaaagtatcaacagtagatggtttattttctagctttcttactgtgatctatgcttctaacaatcgaaatgaaaggaggctcctctggaagagcctttgtgaaattgctatggtggagaatcggtgcctcataggagattttaatgacaaatatgataagggagaaaggatagggaacaaggtaaagtattactcagattctgattttttgaattgtgtgaactactgtcaattggaggatgtaaaaccagtgggaatttcttcacatggtcaaataagcaacaaggggaggatagaatattttctaagattgataggataatggccaatcagtcttagatcagtaaatatgaccatgctgaggtggtttacctgaatgaagggctatttgatcattcaccggatgtactaacactatatcctggtgtagcttatggaaagaagccttttaaatattttagaatgtggaaaccacatccaaaacatgaaggttgtttaaaagagatctggttacaaagaatggatggaactgcaatgttccaggtggtcaccaagctaaagcaattcaagaccaagcttaaggagataaataaggaaggatttgataatctacaaccatttgtcagtagaaataaattggagctagatgagttgtagaagcttcagctacagccactagatgctctatttcatacacgggaacaggaggcaagggagagactgattcaaacacaaaaagactatgcttcattcctacagcagaaggctaaggttgcttggttacagtatggagattttaatactgctttctttcatgctagtatcaagcatagattgaggcaaaattgaattctttcattagagcaacaggataggagtaggactcatgatcctacattgattactgtcattatatgaattttggtgaattttggacttgttttctaacaagtgaacaagtgattttttgcatgtttgattattttgtgtgtttatatatttgaacatgtcaaattaagtg

SEQ ID NO: 121831 - DNA, 1691 bp, Cannabis sativa
ccttagctgatggatcaccatttctatttttaaatctagtattgttactcctacacctttgcttactttgtcaacagtcttacattttacctaatttatcctttaattttctttttgttagtcaactcactcgtaatttgaactgttgtatctctttctttcccgatcattatttatttcatgatcttatgacgaaaaagattattggtagaggatatgaatttggaggcttgtatgctcttgatcctctttcctcaacccctattgcttgtccaagtgccgcttctgcttttgaggctcattgtcatttgggctatccatccattcatatgctcaagatgctttgtcctcaatatagtaagatgtcttcattagattgtgactcatgtaaatttttcaagcatcaccatgttagtttgagtcatcaagtcaataaatgtgatagtgttccttttgagttagttcattatgatgtatggggtccttctcttattttgtctaaatctggattcaggtatttattagttttgtggatgattattcttgtgtaacttggttatatttaatgaaaaaccgttctgagttattttctatattttgtgcttttggtggagattcaaaattaatttaatgtgtttattcatactttgcgaagtgataatgccaaggaatacacatctgctctatttcaatcttctatggtctctaatggcatagtttgtgaaacttcttgcgttgatacttcaccccgaaatagcgtagtagaacacaaaaataaatatcttcttgaaactgcacatgccctcttttttcaaatgaaagctcctaaacctttttgggccgatgcaatttccacaacatgtttttttattgatcgcatgccatcctcagtacttaatggtgagatcccatttaaaattcttttcttggtaagtcgttgttccttgtttcttctcgggtatttgggaatgtgttttttttctcgagatgtccgtccacatgtcatcagattatatcctaagtcattaaagtgtgtattttggttattctcatcttcagaaagggtatatgttttattgtcccgatcttaacaaatatcttgtgtctattgatgttacttttgtgcaaaatataccttatttttcaacttcacctactcctactcgttagggggtggatgatgatttgttggtatattatgtcacatcctcgacgcctgatacattctatgatgagtctcttgttccttcacctgcctcgttcatagctcccgcaatgccaccacttccatcacctccaccacctccaccacctcctaagcctcctatagtgtactctaggtcttcaccttttccaccccctgtttcataattgcacctacaccttcgtcattagatctagaactcaacgatgatcttcctattgcactacgtaaaggtaaacacgaatgtacatatcctatttcttcttttatttcttataatcatctgtcctcttcttcttgctcttttattacttctcttgatttcatcactattcataaaactgttcgcaaaaccgtgtctcattctggttggtttgctgcaatgataggagagaagaatgttttggttgcaaatggtacttggaatttggttaatttacctccagggaaacaagttatcgagtgcaaatgggtgtttacggttaaa

SEQ ID NO: 121832 - DNA, 757 bp, Cannabis sativa
agtttattgtatgctttttcttcacgtttacataaccataaagggcgaaacttgtaaagcttatgatgctttaatatgtgatttttataacgctctgaacattttttttatatgtaatgtataaatttttgtatatccttttttaaaataatatgtgatttgtgacaaggtttgcagtttgttttgttttgattctcctttcttttcgtggataaacagaattgagaactagtatgtattatgtttgtttgggtagcaactacaggttctcctgattcaattaaagtttcactctcattacataaatgaacaatgtcttgtccaatactgttagctcaaatgattgtcatgtgtttgctctgacagttttttcgagtctctcctacacataaatgacctttgttatgtaataacgataatgagcgatgtcttgatgccactaaattacactgcgtgtattattctttgagatcatatcttttatcttaaaacatttgtgacaccttatagagtagagtgaaaatgagaaaacaacaccacttcaataaatgacatattttcttggacaaagttttcttttatccaatgacattaattattagcacgtagttggcaatggtccatgtacttgcaattgactatgggccagattgctagcattgaattgaattgaattgcagagctgattaagtcaaattatatttttctcaatcggtctgagaacattatatacgaacattatatacgacgaaatcag

SEQ ID NO: 121833 - DNA, 1581 bp, Cannabis sativa
ctttttcttttcttctgtaaccctcgacaactcctcctcctcctcttcttcttcttcttcttcttcttcttcttcttcttctaccaataccaccagtaatccacctgtggtccccataaaatccaaacttaaattaaaagaactcaaaatcaccccaatcgacccctctgcccctttcaatagtaagaatcctaacttcaaaacacaccagacgaagagacacgaactagtgcttcgaatcataaaatcaaaggaggaagaagaagcttcaaatctgacagacaagaaagatgggtagacgaagtagacgatctgacttcgaaacacaattgatgaaaggggagtttttttgtgacaatgcatcttcggcggtttcccggagacgaagtagacgaactgtctagttcttgcgactgagaaagggagaaagtgtcaactgtgtttggttatagtttgctctgtctagtttgccggtgagtgaatgtggatgtgatttgggtgtttgagatttgtgagttttcgtttttgggtttggttcttcttcgactattttttttccttgtttgaacgcttcatgaggaggagcacaagtggatttctggtggtggtattggcagaagaagaagaagaagaagaagaagaagaagaagagttgtcgagagttacataagaaaaagaaaaaaaaaagaaaagaaaaaaatataattttttaaattttttttctttttaaaaataaatatttttaaatttaattaattttccaatattgaaaataattaaattatgtagaccaataaaaagttgccacgtgtacaagtgtgtacatgtgggtagtccgctgtgccatttaactgtaatttttaaatggaggagtacagagcaaaacggaatgagagtttaggtagtttttcccccaaaaaatcaattgatttttgtggttaagtgttaaaaaatttaaagttcatgtagtttagccgccaatatcccttcaaattattcttcttagcaactatcaagtaatatccttggagaagctatatataaaagaaaattatttggtgacaacatcattttaacatttttttaattttttttattagttggatgagttttttgtgtagtttttttaagataaaatatccatttagactttatattttgtaaaagttacagatttaattctttgttttattatataacaattcataccatttatgttttttaaaatgatttaaaatagactttgaacttaattttatcaaattaaaacttaataataaactaatatagaggtgatggcattattttatggtagtgttgttttctggtgcttttcctttgactggtacttttaaccctcatgttaaggaggcgattgcattgtatcatggtttttccctttgtgttcgatggggtttcaaaaataatttaattttctttgatttcctttgtttgatcttgtcggtcaatggtcaggatgtttgtcctaatgaatttgatataatatataatgatatatctcatgtttaaaaatctttccttagtttatgtaatgaccgctctagtaatgtggattagtaa

SEQ ID NO: 121834 - DNA, 1320 bp, Cannabis sativa
aacatcacaactcttccctgggactcgccattcaacagcctgaacatatcagccagccacaacccaagagaagaagcgtctctgttaacagcagccaatccagcatactcccaacaagaccaagcaaaattgcaagacaccaagatatgcctttccgtctcagcaaacacaccacacaaaggacaagtattctcaatcaataccttcttaatacacaaattttctttagaaacaagacagtttgaaaccgcactccaaacaagatgttttgctttgggaagcactttaagggaccacagtttcttccatatctcattagatcctcaaaaatcttaggagtgcttcaaactttcaagcaaattataagcacttcggactgaatagaagccatttttctctgcaacccaataccacgaatcagcaccaccagaggagtttaaaggaattccaacgattacggcagcatatcttcaggagagaagaaatctcgcacaacatcaacattccaaattctactattaacttgaaaaagactgtttacaattaaacttacctaattacgaaattaattcgaatttatttagatattttcccaagaaaaacagagtttcggaatgatatttgaatctctatgattgtatgactgtttttgctatgaccaactatttttatttttttcttaaaatgtgttcttatgcttaatttagttatttatgattgtagaattatatttgattgtaagtggttattcttaaaacaaaaattttatacataattggtgtaaataaaaatagaaaagaacaataaaataaaatgtgcatcgcacataggtacctctagtatatatttatatgtatgtgtacatatatgtagaatcaaggtatatatactgttctaaatgagcaaaaaaatatatactctttcaaattgtaaatctgcacaagaaaaattagttaggaaaaaaaatctcactagtatgtttcactatataagtattaatttgaatattacataagacataaagtatattaaaaatgttttctttttggtagagaaaaaaattaaaagaaataaaatcaagtaaccttacctaattcatgcgctattaacatgaatgtttgattgatttataaaccttaatttctattagaaatagttctatattgttaatgtgaaaaaattgtacaatatataagatgaatgtactactcttttcattgtaaatttgttttgagatggtatccaaaatacacaccttaatattaattataatatggtattatcactacaaaaaactgttatttttagtgacaacttttt

SEQ ID NO: 121835 - DNA, 1767 bp, Cannabis sativa
agaatcaagctacttagagggtcgcttgatggagaagtacctcatgatttagggggaactctgatatcaatcctgtgtgtcttctccatttaatttttgttgtgtgtgcttcaatttaaatttcatctctatatcaacaaagatcagttaagagctttgttgttgctggtttttttgttttctgctcttatttttggttgctgtagatgtgaaggaaagggttggaagctcaatacaaagcttggagaagaagagaggctagggtttcaagaagaagaggagaagaagaagatggtgctcggcttctagggttagatggatgtggttttgtgttgctagggtttttcagcaacaaaaatagttgtttatactactctaaacgacaatattttgagggaaaagggctttcttgatccacacaagagggaaaggtctcttttgaccttggtttcatgactttgggggttgttggtgtaggggcatttctggtattgtgtatttcttacagtagtattagagctcagtgaagcaaagtcaagaaataagaaagatcatcaaaacattgaagaaaccagatctgtgattatcaagaaattgataaacaggaaaactctaacctaaaatatatcttgttacattcttacttttagtatcttattcaatatgtttaatatgagtaatattagagtggatgttgacaagtttgatggatcaagggattataagatttggaggaagaagattagagctcttcttgctcaaaacaagttactaaggtttcttagtgaacctatagaatggccaaaaaatacttctaaatctacacaagaagaattacttgaaactgccactggattaatcatttttaacttgtctgattctattatctggttagttgacaaagaagatactctagtaaaaatatgaaaaaaaaagcttgaagattagtttcaaaagaagtctttgattaacaagatctttcttaaagaaagaatctttagttacaagatgagcaccagcaagactcttgattaaaacctagatgaatttttaaggttacatattgaattagcaaattctggagaaaatgaggcattgtgtaattagaatcaaactatcatcatcttaaactcactacccgaatcctacaaagaagtgaagaatgccattaagtatgttaggacagaaattactctagaagaagtgatcttagctttgaagtcaaaggacttggagatcaagaatgagaaacatggaggttctaatggagaagtaaactttagtaggggaagaacaaattaaaggaaacctagacacttaagtcacaatagagatcaccacaaaagaaaaggtcacaaggaagatcaaactcaaaaaaaaaaccacctaatccaacagaatactacaattgtggcaagccaggacatttaaagagagatcgctattttataaacaaaagcaaaccaaataaatataaaggacaggaagaaaattctaattctaggcctaacattaatacaatacaatacaatacaatataatataatatatcacaatgtaccaaacaacacaaaaaattatttttcaatgcataacttctctgttttgtttttctgggtgattgataaaatagactaaaatgctttatacacatacatttacgctcaatatcgttagaaaattctcgacacccttcgtattaattttattcccttttggtgtgttggaaatattttaccatgatctagatttactaacaagtatttt

SEQ ID NO: 121836 - DNA, 534 bp, Cannabis sativa
ttaaaagatgagatcttaaaattttaaatgggcccctagaaagagtgggccctaggcacgggcctagcccgcctatgcctagggccgggcctgtttgtggagaatatatatcaaaaaaataattaataaatacaaatttcattggacgtagtattttatttatttatatttttcatagaaccatacaaattatactggaacaacaaacattgaaaataaaacaacgtaaattaaaaatggaaacaatttacatttaacctcatatacatctatgttaaataaaaataaatatcattaaaaaaataaaaaaaaaaaccacattaaaaattggaacaatttaacctcaaataatagaaacaactcaagttgaaaataaaattaattttacctcaaaaaatagaaacaactcttattaaaaattaaattaatttaatcttatatatatacatatatctattctatataaagtgtgcctatataactaaatttcttggtttatgagaaattcatgggtgactttttatttatatttaa

SEQ ID NO: 121837 - DNA, 1092 bp, Cannabis sativa
  modified_base (26)..(28): a, c, t, g, unknown or other
tacccggtgtttccccttacggatcnnnggactactgactgtcacaataatttacatttaaggatgttaagctaaatttcccaaatactattaaattaagtacattatttaaggtaaatattaattttgagaataacagctaattgacttagatcaccccaattcattgaaaaccaaattaaagggaaacaattacaaacctcacgcaaagcacaaaacaaatatcgaaaggaaataacaaaaccaaacaaacatagtttccaaagtatatttggtaactatatagtaacaaattattacaaataataaaaacattacttatacaagtagtaatgtaattaagatttattaaaccccatgcaacttgtcaaataattaattagcttacaatttcatttcttgaacgtaagatcttccataaacctcacgtgaaaatataccctttacatagtctttactcgacagtgttttgtatagggcaggattttgttgagtgatcaagctgtgtgctgggcctatttcacaatcttcattcgtattaagaaatgtagcaatagacattctttcctttgtagagttcactattgctttgtgctcattgctaagatatattccatttgttataatctgcaaccataaattacatgtattttatatatatatatatataggacgatttttgtaaaatagctacaaatataaaaatatattatttacataatctaatacaaaatatgtaccattattataaataatgtgttgtgtccattaatcaatccaattaattataacacttacaatagataagttattacacatcaaaaatgtaatttatgtatgaatgtttaactaaatgtagctaagttttaaatgtaaaaaataaataatttttttattatttatgtattataaatatattatgtaaatgacatagagaaaaaaaatggtaattttgtaaattttataaaataggtctaatattactcaaacccaactttaaatacaatacgttttttcagtccattagtgctaagggctggccctacaaataagcttctgtatggtctgatgtaaaaattaaaaaaaaaaaaa

SEQ ID NO: 121838 - DNA, 2007 bp, Cannabis sativa
gcctaagtgcccccaaattctacgcacaaagccttcaaagaccacagccgggatattagctcctaaaaccatacaaattactgctgatttccaactttcctcttctaatttcaactcttctaagtctatgtgagctattttcctaccctccttaatcaatggctcagtaaaagacaatttagcatctgagtttagaactttacctcctgaaaattgttgccaatggctctgtgaagctgattggaagtgatcaacctcatcagcccagcttttcctagctgattgcagggattcctcttcttcccgaactgagatctgttctagctgcaaatcttgaagctcctggctatcgagagaaccagctacactctcctcctgttcccgacgaagctccggcgaaatggcatcactcaccaccttcaatcccgaccgacgaccaggcttcttcttcctcgccatgaggaacgagagaacctaggtcagaagcgtttttcaaacaattctacgttattctttctagaagagaaatgttttaaattttaattggtagatgaccgacttaataatgtttccaatgagaataatctttttcttcatttatagcttttttttttccaaataaaacacttacaatattattgttaaattcttgccttgcttacttattaattcaacatattgttattattatatgacgatctactttcttgttctttgcttgcgtgttacacacacagcacaaaaaccctacttcatatttatttagctaaattaattagttgtgtataacgaaatgaaattattattaagtgggaacaagtagtttagcaatataatcatttctgatctctatatgtatgtagttcgtagtactgtccatatgtccaaaactcatgtacgtacatacaccaatttggtatacatgcataaatggggaatatcacttaacgtagcatttgaatcaaatattatagaaattaagatgtaatattgcctcaattgcgacatttcataacctacccaaacaagcatttgcgtctcccgtcacattaattaattggcttatatatcatttcaaaactgaccctaaaatacctttgggtgcttctataatacacttcatttaaatgagtataatgatacaatccctaaatgttttagtatctataaaaaaatttaagtctaatttcttttcgtatacgttatagttattcaaaacatatcttgtaaaattttaagaaattcggaataatttacaatatagaaatcattgtttaaaccgtctatttcacacacgtataaaataaaaaagtcacgcgtgcaacaaactcttttaacactatttttgacgtgttaaatttttttggatttcttaaaattttgccaaatatcttaaataaaatatatacgatcatagaaaaattgaaactaagtatttttttatatatataccgaaataaataaaagtgtatcaatacacttattttaagggggtgtattgtaaaattttctaatacccatttgtttatgtaatttaaaattatatatatatatatatatgatacaagtatgagtcctaaatttagtaagcaaatttttatgaataccatgaccaatatgcattcatatatttatatttatatgtaattaagtaattaaatttgaaattgaaatttaattgagtgcaatttgatcatgtttataaaattttatctgttgaattttagtataatatggtacaaaattaatttgtattttgataaaatataaggtactaaatgaatattattatagaaaaagagtgtcaagtttatattttgataaatcacgattcacacttgacgcactaccattttggcgcaaatttctgtattgtcttaggtccattttggttaatatttggaggaaattacagtctatatcctttttatattgtcctcttttatttttaccttcttttttaaggtctatcatttttacttctttttttaaacattgtatcaattt

SEQ ID NO: 121839 - DNA, 2079 bp, Cannabis sativa
atatttatttccttaattttttatttttagttttatatatacatgtaacactcagattttttgagatgtacacacgatagtccgtataaaataatttaataagataaagttaataaaataattttttataatagaaaaaaataactaagcataagatttcattgtttaaaacaaaatatttttagtatccgtatattgtaataaaaactagttaaatcaaaatattagatctacaatgtttaacaactaaaaatattaaaactaaaatactgcaccagccccctaatatgcagtctacgcctcgagctcttcattctcactgcttagccctacccttacctgcacaaagagtacccgtgagctaacgcccagtaaaaaaaatcctcctaaccagatacttgacataagttactcataacattaatcaataataattcacaatccataatatataatcagaatgcatactgttctcacatgcataaatcaaagtctaatgccgcacattatactcacatatgataatcaattataccctcatgttgattagacatgaggtataacctaccctgccttgcgttattctcacacttggcatccaacaggacaatcacttaccataagttgtactcactcatgataaagttataatcctgcaagtgttatgctcgcacaagcagaaagaccctagcattattctcatggtaacgatactgaatatgtaaggaaattatcacaacacataatcaaattaaatagcaaactaaaccaagttgtatgcatagacatacactctgtgcacagatgtccactcttcttacttcagttgctaagaccactcttgctacctcgaggacctctatattttcttgttgagaacaagatcctaaatattcattgacacaacaatacactcaaaatacttcaagtatgaatctctagcctcatagaaacttacgtaaaaatgtgtaaagcataagccaatttcacttgcatgacacactatacataatcatttatcattttaattctcacaaacacattgcatgtactcaaatgaacatttttaatgtaaaacatgaattcatataaatactttttacgtaaaattttactaaaatactatttattaacaaaatatgccattaagtaattatttactaaattcaaaagatatcatattccttaactatttatacagatcataaaacatattcaatctgcttagaaatatatacgaaatactacccatgattatgtataaatttacatgttaaaaatgtataaaattctaaataattaaccaaaaatagcaaaacatctcaacatagtctccaattaattccaaacattataattatattttagcattatattgaaggttccccaaacagtgaacacaatttgtactattgattctaattaaaacacaattaaatagttaattaattacaaataattataataaatacctacaacaactaataaattataaaatctattttattttatatcatagacagtaaatagtattacaaaaatattttttactgttttagcatcacttaactatttttcataattaatttaagtattgactaaataaattcataaaaaatacagaaatgactccatctagcaagtatttgacgataaaggtcatctatgtagggctcacatctatcatatcaatctcttgcttctccttcttgcttatacttggctcatttagtacctccaccgggataaagtttagtttattgagatcaaagtgggatgccaattttgctacggtatctacattacagttttgttctcttaaaatttatcatattttaaagtaatcgaacttttacaagttcttctgaacttcctctatatatctggccattctcgtgcctttcgcttggtattctcccagacttgattcacgactagcagcgaatcgctaaaacattagacattcttcacattcaatgtttctgcaatccttagtccacctaataaagattcatattttgcctcgttgttcaaagctttaaattaaaatcttagtgcataatgaaacttgaagttttc

SEQ ID NO: 121840 - DNA, 3041 bp, Cannabis sativa
  modified_base (181)..(188): a, c, t, g, unknown or other
ctctctctctctctctctcttgcgcatgtacattcatcacagccgcctcgaccacgatattcgttagtgagttggtagcagatcacgacctctaccctaaaatgaccacgaccctcgtcgctcgcaccaacttaggtatggtttctcacccattctcgatcactctctctctctctctctnnnnnnnnctctctctctctctctctgtccttatcttcgttgctagcactctctcactgcctctcaatttttgcaggtgtttgtggctcacgatctgagcgacgatggttggtggcagcttttctaaaaacatttgatttgtgcattacacaatatatatctaaaaaatttcatgtaatatatatattgtgtaatatttgtatttataatgcgtaatatttgaggtctgggttttgatttgtgtttattattatttttaattgtgcttaaactttatttgtatgggctgagatctgaagtttttttttttttttggtgtctctatttagtgtgtctgttatacaccgatgagataagtgtaaaaattattttccttattgtttgcgagtgttgaaaaccgacagaaataattttacacaacgattgagaaccgactcaaatacaaacactttttgcgtctacaatatatacgtcagttgggggagccgaagacaaaacttttaaagtcaattaaagattgacgagaaatgtgctttctgtagtagtgttaataggaattaggaatgattgttcaggggggcaaataacctttaactagtttctcatatcgcagtttcaattttaatattttattttatttttatttatgttattttactataaacttcaaaacccccctttttaaacttttgtcactaatttgtgaataatttaataaacatagtgttcgtgggatcgatcttttctaacaattatactaaaataattggaggtattataattaaaatattcgtaaatttactgtaacttaccacgcgcatcagcacccctaaacgtaatcttttattttatttttaaaaggtatattattattttaattgttactaaataaagaaaataaaatagatttgagaagtataaagctttaaccaaaaacttttaagaaagaaaataaggcaataatacaaagaaagaattaccaagttctcaaaacataggaaaaaaataaagaactttttagtacaaaaataaattcagaaatcgatattgatttgcatatttttataatatggttaatgtcttgatgtttttatgttgctttattgtttttttttttttttatagttaattttttgttgttgtttaggtgttctatagtcacttattagttatttttatttttactataacacaatatttttgtaattttgaaactttaaaatagtatttttaaaaaattaattttgtaaaatgtaaatagaaaaaagtaaggtctgtgaacatgtaaaagtaacaaaagaagataaatatttttgtaaaagtctcatattttcaaagacttattaggtgatgatacgtatttttcgacatcgaaagtgcgtagaataaatataaattatcttcaattagttataatagagcgtagttgtatcatcaattgtcaccataattttccctacaatattaagcatattaaaatggggatttgcgagatttatactacacatagtagctacccaactatataaatttatgataaaattttggcaattaaataaatactattttgtgtaattaaataaatattactttgtgagcattcgggaagatctcagctggattaagcagagtttgtgggtgcaccaatttttttaccgtctgactgtctcgtggcattgcaagctttgaggagttcaatttttatgattttttttactgatattattaaagattgcaaaatattgcttgtcaatttactttttgtgaaaatttgtttttcaaaattcagttatttatagttttgttagagtttttcattctttatcttgatcttaactttagtttgggagattttgatttattatcaattatgataatgggtttcatggttaataaaattttaattttctattaaaaaaatcaacaaacaatactaataataataataataatgagaaatggccacttattttgtcaacgagcgggtgaagctgcctaacacgtacttttatggtgccaaagacgtcaaaagagtaggatgttttattttttattttttctagaaaggataatgtgagtaggttagataggaaagcaaattaacaaaaaacggcctaatatttgtctaaatgtataaatagtcattggctcataatggacaacctaattagtggatcaataatattagagaaatgttaaagagttgaatagtgtttaatacttttgtaacgtgtaatatgattattagtgtaatttaatataatgtgttactttaataaagattataaaaaacagtttaatttactttataatagtgttaaataaattggtatctcataacaataataatttaattaggatgaagagtgcaccaaatctttattaaaaaagtagagtgttaaataaattggtatctcataacaataataatttaattaggatgaagagtgcaccaaatctttattaaaaaactcaatactactctatcttgttattatctcattgatgtctttgaaaaagtaacaattaccttcaattcatcaatctcattgtatattgatctacaaactaaaacactttatatgagcagaaatataagttagtataatgaagacgacaaatctaattttaccgtctaaaattttaattaaaaaaattatttttataaagtttttaaattataaaaatacattttgtttagcaaaaattaaaaaataaaacgacgagaaattaattttatgacaacaataaataaagggaaaattttagtattatacctataatataatcaattaacagaaataaccttaattaaaaaaatgaaccctaataacgtgacacgtaggcttctcctacctgaa

SEQ ID NO: 121841 - DNA, 1412 bp, Cannabis sativa
agttcaaacataacaccaaaacaaactcatgtattttgtatatgattatcttgcactaaagacaggttctgcatctgctttgggttgtgcccttctagtgtatttgagaagcaaaccttctgatgagacacctggtacagttaagtccctaaacaaagttccaacaaaaacaagaaacaccatgttactacctataccatatcaactaaaacaacaaacaatgtatcaaaggaaagatgagttggttggttaaccttatgtaaggttgcaagtccctccattcccacttctgtctttctttgaaaagaatagagaaacgctcagccggagttgatggcagagatgaaacgctgaaagggtacacccatgaatcgacaccaagtctctcagttaaaacttcaccttccagcatttcgaaattgatttgcaaaccttcgggtatctttttcttccactcttccatgaagctttccatcttcctttttccacctttcaagatttgtttcgcaaaatgcacacaaactttcttctcatctagcttccaaacaccttcggttaacttttgaccgaaaacaagcaagccatgctcagcgagtttgtgaggataaccatctgattgcagcacctccacaactttatcatgatcaagtgcatccaaagaccagtcattcaacactgaattgtttaaaagcatcttaagcattgtatccatgtacctttcatctacaactctccaatacccgtcaatttccacagccgagagtgcttgtaaaccagacctcaactcatcgtcgctagcttggattctttccccgagagcatcccatgtaaacagtcctcgctctgtttctgacacatcctccatttctatgtcatcatcttcagagctgtaagggttcatagagaggagatatttaagcttgtcgagtttgggagcaacctcaacgagctccattgtacccggagcaactttaataacagatgcaacgggtatctggttttgagctttctgatcacaatccattgcactaacagcaaactctgagtgctctgatggtggtactaggaagacagagttggaagttccaacatatttcatagcataagttttcgatttagtgcaaagaactgcatcttcgtcgggctgtcctctcacaactaccctacaaaaacaaaagaaaaaggatctagagttagtaactcactaaatttaagccacaacaaattaagcaaagctttaaagtattttaccgttggttaagaatatctgggagaagtttctcatcaagctcaagtagcattatatcatcatgagaaccaaagagttggtgatatgatatagtaactgaagagcttggttgaagattaagaactgcttctgcaccttgttccatctctctctctctctctct

SEQ ID NO: 121842 - DNA, 1404 bp, Cannabis sativa
  modified_base (64)..(71): a, c, t, g, unknown or other
gatttcaatacaattttttattgcagtttaggttgcaacgctttctatgtagaattctgtaaannnnnnnnaaaaaaaaaaaaaacatattttgaagtgtaaaaataaaaaagcctcaaataaaaaaaagtacgtattattatctccaactttaataatggtcccaaaatagaagtgaaaaaaaaaagaaataatttttagtaatttatttatattaatatggaaatttattatattatctggaaatccaaccttacaaaacaatcaaattttcactctatttcacattatatagcataaaatatatacttttactactacttagtagttaaacatttagatatactaatgtgtttttttgttttatttaaatactaattagtatttatttggataccaattaataaaaaaaaattatatgataccattaattatataataataacatatggcatattataaaaaaaaaaaaaattgatcaccaattattattaaatttatataatactaataagcaattaaatatataataccaaattattaaatatgatattggtaacttgtactaattactaatttttaatactatgtttattgtattaaattatatcattattatacaaaaatatactaaattgtatccaaaaataaaattaaaaaaacaactcaatttcggtcatttaacagtttttaatttgtttcatcttcatcttcctctttttctttttttattgaataccatattatatataaatactaaaattgtattaactcaaaatttgttattaaaagcaaaagcatttatgtttaaacaacaacaaaagtaataacattatttttgtttttttttctaaaaaaaaaaaagaaaattagacacattgaacttttttatatataaatatataagtaaataaagtaatttaataagatatattatatatacgttattaaattataatagtcatagatagttgacaattaaattttgaaggtttgttatttatgatgaataattatagaatatgagtacagtgtacttgtaaatttttgatttatcaaaaatagaaatacaacacccaccacctctttattaaacaaagtcaaaggggaaaaaaaaaagttacacacagcatttatctagaaaaatggtgtgacttgggctatagagattcaaagtttccaatacctagttttatctttggttaattagtaattttttctcttgaattttaacatgtactaaatcgtgcctcctgaacttttttagttgttaaaaattctccccgaactattgagattgttaaacttaaggacttttatctaattttagtaaaaaaattttaatatagatgaaagctcaaaaggtatgttttaatacatatcaaagtttgaggggcatgattt

SEQ ID NO: 121843 - DNA, 1897 bp, Cannabis sativa
ctgcctgctgtactatctcaaagatcgaagagtggcctattactattaaggtgcgcagctagcttttctacgagcaattctattatcagtttataattaattagttaacagtttcttttatagtatttattaaattaaaataagtataacctcatattaaattgtataagtagtaatattatattttgtaaaagtgctagatgttgagaattatgagattttatctcaaaatcaaagtagcccatatttttatatatggttcaattctctactatttattttatttgggacaatgtctacaacactaaataccataatagtccttgcagcatttctctttcaaaataccaaaacaaattagggaatagatatacatgatgtttgattttagatagggtataaccaaaagaattttaaccattgaaattcactgtaaatatgttttttgtcaacatagcattgatgacaccaacacgaacgctacaacttcattgaagccaaacagaaagaataaaaagtttgttatcccagtggctgcttcattcggtggattaattttcatcttattaattgtggcggctgtaatctggacccttaaaagaagatcaaggcaacccttggggacacccactaacaattttgcaggttatattattttaattacaataattttaatttcttattcccttattagcatttgcattataaatactacccagcttgctacgtacacctgcatattcttatattcttattattgtttttttaataaaatgccaggatgtataaataaaatacagttaaacctcctgattattacacaaaaagttttctgagatagctagaagaagtatcagttcagtaacattatttagcattcttattataggcatggagcattaccaattaaaatacataattaaaaaaaaacaaacgtatatatgcacaacagagttttttttatgtgttgtaattttccactcaacagtcaagccaataaaaaaatccactcaaaatatcaccataaatattcatcaaaatatgccactattatatgttattttgtgttgataattaattgatagttatgtatctaatttgttgtctctaaaaaaaaattacctcattgattttataaattaattaaaaattatatgagattttcgttattaggtggcagtgtaacaactcagagtgtcatcacatcatctgatttcacaacagattcattaattgatgagtctaaaaaacgacagttcacatattctgaggtgataaaaatgactgataattttgaaagaattcttggtagaggtggatttgggactgtatttcacggttttatagatgatggtactcaagtagctgtcaagatgctttctcattcatcggatcgaggctatcagcaatttcaagctgaggtatacatattattatgctacattttaatattatacctcacgtaatttttttaatttaataaataatattaaaaataacttcacaatactctttcggtctttccatatagactactgtggaagttattaatgtgttttttattgaagaaaaaaaaaatagcctaacactatatgtctacttcatctacatactataatctaatgttaatatatattgtaattggggccgatctgtatttcattcattttggagttatattatatagtcatttaataatgaaattacaatctaaactaaatatatatatatatatataactttaaaattgattactgcaggttaaacttcttatgagagttcatcatagaaacttaactactcttgttggatattgcaacgaaggatccaatagagctgttatttatgagtacatggccaatgggagtttagattctcatctttcaggttaagtagc

SEQ ID NO: 121844 - DNA, 540 bp, Cannabis sativa
aattttcatatgtattcaattagggaaaaaattatcccccaattaatgcatagatattcaaatttacctttcacattttaattaattttttttgcctaatatataaggtaagagataggaatatatatttaatttgcaataattaagaggaattttactaaaaatatattgttattagctgtagagcaaaataggatagagaaatttctttttttagatgaaaatagcctttatttttacctgaaatagtttatctcattactcaatataaataaaagtgtcataaatatattggtattatctgtaaaatatgatagggtagatatataggaaaatttaaatttctatgcatgcattaggggataattttttccctaaacttaaaatagggggtattggtaaaatgggataacatttacttaattcccacaatcccccccccccatttaaaacctgctgccctctctctctctctctctttcgcctctctttctctctttctctctcgctcggtgtcgcacccacacacgcagaccaccc

SEQ ID NO: 121845 - DNA, 860 bp, Cannabis sativa
aagaactccacagttaagcgtgcactactacaaatttaccttttagtgacacactttagtgacccacatttttttggtgtgtcactaaagaattagggatgagctttagtgactctcacaaaataactctaaaaatccagtgttagtgtcctaaaatcagagtcactaaatgtatgaagtgtcactaaagagttatttccataatttttatttttattttttttataaaaaatactggtatatagtgacactcttagcgcaaatgggtaaacgtgtccctactcccatagcgcgtcaccatatcctaacctattttttattcttttattttttaagaaaatacaattggctccatgtcataatcattaattatttacttttttctttttcttttttttaataggggttgagttcaaaaaattgtaataatgataataaataattctgatttttttttttttaaaaaaaaaaagcaataaagttgattttcaaaaaaggcagtaaagtatagaaaacaatttccaaaatcaaaattaaacgctaattctttctctgccttctcctctctccagtctctacaaacaatgcttcccaacccagacggccgcaccaccggtttcccaaaccagatggcaccaccggtttcccaacccagacaacgaaggctcgcctctctttttcccatctttttcttcccctcgtcgactccaaacctagatggcgccgaaggaacgactccaaacctcaccatcttcgcttcgtcttctctcttccttgcccacgcgactgcagatctgagactccatcaatgaaactccaaggtatataaacttctctgtttattctctctctctctctct

SEQ ID NO: 121846 - DNA, 1169 bp, Cannabis sativa
aattgcttcagaacagttttacagtgtgaaatcaatattctcaaacactcaaaacttagaatcacctcaaattaaacaaatcaccatgcttgaatcaaaactaggttcaaaattcaatttttccaaaattctaatctcaacaaccaacaaatcactcaattcacatttaaaacacctaatttaagcccaaaatataacctggactcaatttatgcaacaaacccaaaatcataggaatatccaataaaactaaaccctaaacctaaaaaattaaagggaaggaaaaagagacttacctccaagcttggacaacacctagaattaacttaattcaatctagaagtggtagattgaagaagaaaaacttagttttcagctgggtttctatggtttttgagtgagagagagtaatatgtgtatccttagttttggttttatcttaaattccctaatcttatgttaaaattgataaacctaaaatgtaactctaattcagccaacaaaaatactaaaatccgtaagacaaaactagggtaatacttggtaaacttactattttacccctcccattaaacttaaactaaacacaacttacgggtattttggtcatttcttatttccccgaacgaactaacaatttgactttctaaactagtttggtataattccaatacaacacaacttaattaccgtgatattactgactactccttttagtttccaaggccgccgaacccaaaaatattttattccaaaaaaatagtgtctactatacccacgtaatctgataaagtctctgtagttaataaattatgtttttttattcatttactaaatttacactaattatcacacaattagcttaagtaagattataatcttactctaatatcagcataatcacatatttaataaaatatacccaattaaatattattatattttttgagatattacaactatcccctccttataagaattttatcctcaaatttcatctaaatatctcgagatacatcttgtaacgtccctaacatgtcgtgctctatttcacgatgcatctccgttgactgatgacacaagccaaatgaacacctattttatgttatattgtgacagtcagtagtcctgtgatccgtaaggggaaacactgggtaagctgtgcaatc

SEQ ID NO: 121847 - DNA, 1467 bp, Cannabis sativa
tagagaattcatattaggatgttaatgaaacatacttgtttaaaaatctagatcctggtaaaatatttccaacactaccagcctgatagggaaatgcactttcgcgcacttgacaagaacacggtgaagtgccacagcttcagcaaagataggtggcagtcctgagattgcagaagaatggaaaccagctattactctatcaatagaatcttaaataacagctccataaccatgaagattattctcacttcttactgcagcatccacacttaacttgtaaagatcaggatgtggaggaaggccttcttcaatcgacttgcttgcaatctgaacttggaggttgttataaggttggtgcaggatcttagattgagcttccttatattcctggaagcaagaaacagtaacaggctctatctccttatagctagacttcccattttgaaaaagagatttatttcgatgattccaaataacccataaaataccaaataatgttgccaagtgttaaaagtttcataaccacgtaagaagaattctttaatatcacattatttattagtagaatagaaggtggagaaagtagtgtacctccaatatttaccagctttagaacactgtaagagggagtgggaattggaatcaacatggctgaaacaaaaaaggcagtgggggtcttagagaatcttcctagtgaagaggttaagcttagaggggagaagatggtgaaaagctttccaaatgaagtgtttaattttgggaggaatatttaaggaccaaatcgatttccaccacttcttaaacgtgtctgcattagacgagctagggctggagtgagtagtgttggcaaggtggtaaccagagttgacagtgagagaacccgaaggatcatgcccccaaataagacaatccttagaattggaattgatagggatactaaggattgacttaacaagatcattgtcaaaataagtggtgagtttatttagatctcaaaggccatcctcactaataaaacaagaaatcgaaatatccggaggagtgaggttattcttgaagtaaaaagaatttgatcctggaatccaatttgggctagtgaagtgaatagaattgcaatccccaaccttctaaactaaacctttaagaaagagatctcttcccaaaaggagagtacgccaagaaaatgaaggaaaatgaccaattttggcatgaagaaaatcattgtttttaaagtatttagcttttaaaaggaaagcaacaagagagtcaggattcgtaaggatacgccaagcttgtttagctagcatggcttggttgtggtgaacaatatcctgaaatcctagtccccaataaaacttggatttacaaagagacactacaagaaaaggcctttttaccggcgcagatcgtcaaatgcgccggtaaaagttgtcgacgtaaagcaaaaactgaaatcccatttgcatt

SEQ ID NO: 121848 - DNA, 778 bp, Cannabis sativa
  modified_base (733)..(737): a, c, t, g, unknown or other
cttgtgtagcctttgaggaggtcttgaaaaatgaagatgttgtgagcaagcaccctatttttaatgaaggcttcttgattgtcatgcaccaaagtaggtagaatctcattcaatctagcacacattatcttggaaatacatttacagagcgtgttgtaacaagatatggatctataatccacaggggaagtgggagcattagtcttcaggattagagagatggtggtggtgttcaggtctttaggcatgattccttttttcaaagaaataaagaattgcctctattatttcagcttagatctcagaccataaatccttgaaaaaaactagcactaaattcgtttggccctgggctttttaatggtgaataccaaacattgcatctttcacatcatttttcaagaaaggccttataagttaaacctgctgaagaatattcagtttatgaccatagctcaaacattcctcattcaaattctaagtgaccaaagtgttcgctcccatgaagttcttaaaatgttcaaaataataggagataacactatcataatcatcaatcaccttcccattggagacaaaaaagaggtaattttattttgctccttcattttttatgctagcatgaaaataataggagttaccatcgccaaaatgcaactgagaaattttgctattgttgcaaaaagctaacatactttctatcaatagaagcaaatattgttgggttttatgnnnnnaataaaactctttataatatgattagttatcaatataagaa

SEQ ID NO: 121849 - DNA, 726 bp, Cannabis sativa
  modified_base (56)..(67): a, c, t, g, unknown or other
tagaaaaaaattaacataaaatttagtatacgtgcctcgcacgtagctttttgctnnnnnnnnnnnntatatatatatatataattctatcatgttatatcaaataatcaaaactaaaatttgcgagtggtcgtaggcataattcagtgattttaaactttttacaaaagaggatgactcaaattccaatccctctcccccaatgtcaaaaaaaaataataataaaatttgttaataataaaaatgtgtcttttattattatttttttgacaacaataataataaaatttgttaataataaaaatgtgtcttaaaatcatactgacgtgatgtaacacaaaattatgtcaaataatttttagtgtaataacctaaagtactaggttcaaattctcataatgatattttttaaaaaaaaaaaaaaaagaattgtagctattaataagatttgaacttgtaacagtgacaccttactccagtccttcacttctacattgaattaaaaaaaaaaaccaaaattaaataaaaaattacagacatatgagattgatatatcataatagaatttttgatttatgagaaattattggatgactttttttttaaataaaaaaaaaataacaaattattagatgttgcagggtcaacatacatttagttagttaaacttaaaaatataattaatccacctacagtgttgcaattaataataaatttgttcatatt

SEQ ID NO: 121850 - DNA, 1449 bp, Cannabis sativa
  modified_base (27)..(67): a, c, t, g, unknown or other
  modified_base (1371)..(1404): a, c, t, g, unknown or other
aacataaaatgttatttttgatctttnnnnnnnnnnnnnnnnnnnnnnnnnnnnnnnnnnnnnnnnngggcataaaacccaacatgtgggtgccttcctccttctacactgatggtttgtttcgatttttgattacatcgggctttgcccatattagatgtatctaaatggttaccagattttgtcaacattcttcatcttctacaatctacaaaactggcccatttcaacctctcctaagatcaaccttttgtgtgatgtaaaaagatcccacccataagaagaatgcttttgtgtgggctttgcttatactatggaagacgaacataagagagttgttgagcttgcagagacgttgtcagtttttgagcaaagagcctctaatgcagaggccaaggtcactaacttggagaacattgtcgatgaacgtaagaccagtgtctcgaatttgagaggtgtcatggatagtgccaaggatcatgaaaaaagcttgaagaagaagctctcagcttcaaggaggaagacttcagaagtagaagagtcctttcataagtttcttgagaaaaagaactcaagtattgttgaattggaaggtcaagttcatcacctataggaccaagtggcagttctagagacaaagtgtgttggggacgtcggtctttaagagggctatttcttcaatgccatctataaatcttggtcagccaatgggggagctattagctttaactggaaggctttgttaatgataaggttgcattctttgtaggccaatgtgaacaacattcaaatgaggttgctcctcatgacatcaactttgatttgaatggttatgtcccaaatgtcagagatactggaggagttgaaggctacaaccctgagcatccgaagttagctacacttgaagatgcaccagaagttacagcagcacaaattgaggagcttctataaaacaagataattattagtttttgaggacattatcttggtccttttagcatttatctttactgtattagtcgatctctcatacggcctttaagtgtggatatgccctagtaaaaactttagtagaattttttccaattttattagaaattaattccaatttaattagacattattccaatatttatttttttggtttttactttatcccttacagcatgacctctaacacttacacaatatttcatgtcttaagaaacacagttattacgtgtaacgtcaacattccttaatgtttcattaccatgaaagtactatgaaggtgtgcaaaaagtttttgaatacccctataacacctagctcacgttcactagggtgtttatgccccctaagtgataaaagaagtgttgggttttgtgcccnnnnnnnnnnnnnnnnnnnnnnnnnnnnnnnnnnttattaataaagatcaaaaataacgttttatgttgcatggttcac

SEQ ID NO: 121851 - DNA, 4390 bp, Cannabis sativa
  modified_base (981)..(985): a, c, t, g, unknown or other
tctctctctctctctctctgtcatgcatatgcccaaaaggctcatctcactatatctctgacacgcctctaagcctattcctctctctcatcagagatctgccaacttggagttagaacttttaccaaaacactaaaattgcgaacatctcggtaagcactctcactagcataagctactaaacttatggtcgcttgggaggcacccatatcatagaaggcatcaaacaagcacaaagagcttatgtagagaaattttaacaattagaataagctactaaacttgcctctaagtcatgcaagtatacttcgacttaacaaaataaatccagacccttacatgttaaagccataagaagatagctaggatgatcatatgtccgtcataaaaggttttaaggctaaacaatagtagtgttcaaaaatagagggccgataggccaaagaaaaaacatgaaagcattaaggtcagatatgagatcagctcacatgtatgaagccaaggccctgtaagaaccatatagtcaaaaaagaaccggacagagctcctataggggccacgtaccgcactatgactatggtagaattccttataggttccaagccatgtttaagtcttaagttgaacatccaaccataatagactcgccattaagtttcatacagagtttctaaggaaaccacgtctgagtttaaggttatatatgcctgtagagtcgaattctttttgaagtaaaaagaggacaaaacaatgacaacccctcataactaaggcctgtgatgctcaaggttctcaagccttgaaagggtcagcaacggtgccatgatgcagctaggaatcagccagtgtcactaaacccacgcatgaacagacaagctttatagggtaaaaccctaaagctggccgactcccatgattaagccttaggttcacccatgtttccaagaagacctcccaggctggccaaggtaagttttgaannnnnatgtgtgtttttctttcaaaactcaaatatgtgccttatattctttatgaataaaagagtcaagaatcataacaaaggcagagtcaaatcttttccatcaaaaattcacacattaaacattccaaaactatcatgagtatcaatataccaaagggattacaaactaacatgagaatcaaaaagtttccaaaagcttaaaaagcttgaaacttgttaatggcaggtacaaaaaagagataccctagaagagaagatcagatgtatatagaaaaagaagataaaagatccaaaagcatgccatgcaaaaagcctacacttggctagacaaggctgctaaacagagattactatagacaagacgagagctagaaagtccctatccgaccagatgtttgagtagagacttgcgggcaaatttcatcctaatttttttccacttgacgtggcatgtccacgtaaggcaaagatagagtgtaggtacagtacaaccctgccaataacaaaacagggcctctatgcaagatatagcaaaactataaagtagcaatcgaatagagtgaaacaagctctcaaggagctgtgcaaacatccctgaccgaccaagagaagcctatatgctagccatagtgagcatatagggcggaaaatatctgggcacaagctagttgattaaaaagtgactatcgcaccaagggagctttcgttcgatcatgggaacctggcctctacaaggaaatgctatacaaagctttcattaacttgaaaaaggctggcctcctcttggtaaagccatagtacttgcaggatcctggtaggcacatgacctgccaggtcttggcaggaccatggccggccaggagtgaccttgcaggatcatggctggctagacctcccctgtaggtctatgggcggctaggattaacctgaaaggactctatgtactgaataaattgtggaaaacaagctaccttcaaattaggcccttaatggtccaacaaactgatggaaaatatccacttttaaggggaaatttagtcttttgtatttaataaatttaatatgtaaatatttaagggttttattgtaaattagggttttaggcttcctatataaaggccttaattctaacctagcaaaccaagtcactaagcccaatccttagcctccaaattaatctaagtcaagaaccctagactttctttctctctctgctacacgcgcccaagggctctctctctccctctcttcctctctcagacatttataaggctattcctctctctcattagggatctacctactttattcataatttgtaaccttaagggtgctatattagatcccattacacctttagtaatcttattgacctccctttagccaacgataatgactcttaattgtaagagataagtgatataatttagatataatatgaaaagataaataaagaacatagagtttttaaagaggttcggccccgagcagtttggtagtagcctactccccttgatttgtattgacttaagaacaaagaatacagtgattattctctcaaagctcttacaatgaaatctctgagtatgctctctatgataattctatttttacccttttccagtgagaatggatcactatttatagggctacatgcttgagggaaggtttcccttttcttataatttctataattggtcagattacatattacatatatagagtatactgattgtgggatttggacagcttgccatatctctgtgatacaatcccaaatttatagggatggctcttgtgcttcacgatgcaagtgctgaaattgctaagtcttggtatgctattcgggttgtccacttttcggctgggaggacctcatccgtacaggtatacacagtgctctgcttggaacatctccttcatgcagatatggggaatcatttccacgtgtcaccagcatgtgatgccacgtcagagtgcaaaaattgggataatatttgccccccaagtctgtacgggaattttgaagttgcatgtagactttattcgagctacttttccatttgaatggaagacacgtgttgggtgcgtctgttcgtgatttgatgtgagtgtgaccagtcatctctttgatttttggctaattaatgctctgactaattaatgcctcaagacacggtttcctttgcacgctttagacggttattcccttgaggcacttgattacttttaattcccaatatttactttttggaggaaatcaaagtgtctaagggattttgaaatgattaccctttttcacgaattctcctataaatagagttgaagattttcaaaaactactttcaccattttctccacaaaaccaacttagaacaaaaaggaattttcttcgagtttgtcgtgagatttctagtagagctatccgagaagcctcgtttggactacgtttaggcttcaaacagtgagtaagtttccaatctttttctcttttatctttgatttttcggtttccattttagaaaatacatttgttcttgacttgttgtagaagatacatagaaaatctatgctcaaaactttgtagttttctctctaatagttcatacggcttcgttatttatgacattcttactttaatctcccaatgttcgattttcaccttgctcattcgaaacttcttgaaatttaacccttaacgcaaaaatttaaaactcctggattatgacttaatttttgtgcgtttttcctcaattttatttgttgagtaatcctggttggcatatttacctgtttattgtttgatatcccgaccaaacactcatctcgtttgttttcttttgtagatgaaccctggtgagttttggggaggcaaacaccaaattgactaggatttacttcaacttctgtatgaggatcaacctcgtcttcgtgccagtccgtcctctttgagtgacggactttctactcgagctttaaggattgggaagtgagtagtgattgttctcctactctagaacccgaagtgcaaccccactcttaccctgtgcagatcacaggagaagggtacggttacttcatttgagagctaaagaaggggttgagacgttacctttcgtccaactggacgtatattgtccaaccaggtgttgttaatactcttcctattggtcgtccaagttctggtaacttgggcatcccaatagttgtccctgctgttactgttgtatggcacacacatcagtatccatccaagagaaggatgatggcccgcacaaagaagatgatgcagaaagtcaatgcatctgaccctcacggggtccagcttgccacgtttccaactgccgagcaggatctgttgggttttatgccctaaataaaactctgtttcaatgtaatccagattat

SEQ ID NO: 121852 - DNA, 1193 bp, Cannabis sativa
tatataaattttttggtatgtataaatattttaacagtggtatatataattttattagcatgatatatatatactttttgattattaatttattattgttataatttttttgtggtatataattttattactatgatatgtgttgtatatatttaatgatcgaacatatttattcatatttatggttacccttacttagttttatcatatttttcaactttttcttatatttttctcataaaataactcttttgaaagaaaaaaaactctacaaaatttgtaatttcttcattattttattaaccattaatatttgttcttattaaatcctaattcagttgggtcacataagaaaatattgggctttatatatatatggaccgaaggtccacacatttagcaagctacaattaagataaataatttcaaatggtacattttagtttgaaaaatttacacaatacactcaaaattaatttttttttttttacacctttttaattttttttatttacatttttacgaattctattttgtacaagttttcacttatttatttttccaaataaaaaggttgttttttggtaataggaacatcaaaataacgttattctgaaacaatggaaaaatcatattttttattgtaaaacaaaattatgttgctttcctatagtaacaacctcaaaataatatttttcttaaaataatagaatataacactccacatttttgtaaaaaaaaaaaaaaatccatagagatttacaaaaaataaaataaatccataaaaatgtaaagaatttgttatttttaggtatttatgaaaaaaaaataacaaattcatcatataaccaaatattattcatcatctatattcacatcttgttttgctcttttaattatgaatagtaagtacataagggaaaaaaatatggtgggacatcttagagggtcaagtactttggtacgcaagattggactagctagattagacaacaagattgattgaatgaattatactgaaagtaatcttgtatttagtttaagaatagactcgactattttatttgtttctttttacaaaaaaaaacttgaattaaaataaaaatatataataattattattcaaaattaaaatatataataataaataaatactacaaaaaactataacttttagtgacaactttttactc

SEQ ID NO: 121853 - DNA, 1876 bp, Cannabis sativa
ttaaattaaaccacacttttctaaaaaaattatagattaataataataagtttataaaagcacacacgtggcgttcctgagggtcagggcgctacatttacctagacctagaccaaggatccaggcctagatgggggactctgacaaaaaactagtccctgaaacttggactgagacccgaaactcgaccccaaactcgagacacgggtcccagaacctaggacctgactaccgggacacaaccccaaacacggacccaaacccaaacataagacttggcccgggcctcgagacccaaactagaacaagactgggatccaagactgaaattcaaatctagacatgaggcttcacctgacatgtagtcaatgtttgaatccaggacctggactccgatttgtacacacacccggacccaaaccgggatccaaacccaatctcggacccagaatcgaaatcggtctaccactgggagaagaacccagacctgggattgtaacaggagccaaacctaaaccaaaactcagactagaacccataccgggacttggaccaaggccaacacttgtgatttgggacctaaaccaagattgggacctagacccaaaccaggacccagacccatgcccaaaccaaaaatcagggtcggatccaggacccaagaacctaacttagacctgcgattctaaacccaaacctagactgggactgggacccgaacccaaattgggacttcgactcggactgggacccaagacccgaactcaaaccagaacacaaagtttgacccacaccgggacctaaacttgaaaatagatgggagaccctaacccaagaatcaggcccccgaacttggaccagaacttaggccttggaacttggattaggattgcgagacctgactcagacccaaacctagacctaagacccaccttgagacttaggatccaggactcgacgcttagactcgacctgtaccctgtgacttgaaactagaaccgaaactaaaagcagatcgggacctaggaaaagggcaaggacaagaacctggaccaagacccaaaacggtaaccggaccaggacccagactcggacacagacgcacacacagattttgggtctgggtttcgattcaggtccgggtctgggtcagggtctaagtcctggtaggagtctaggtccgggtttttgtcaaggtctagatccccttttttgtttgggtcctggtatgagttcaggtcctaaatgcgggtctaggttttggtctgggtcaagatctcggtccggatctatgtcctgggtttcgatcccagtttgggtctaggtacgagtccaagttcgtattcggatccctatctaggtccaagtttgtgttttggatcgggtcccagatttaggtctgtgtccaggtcttgatcccggtatgggtacacgaccgtgttaaggcctgagtttcaatctcaatttgggtctggggctaggtctgagtttcgttctaggtctatgtccgggtcttagtcacagttctagtcttgttccagggtcctggtccggcaaatcttgttcaggttccaatttcggttctcgggtctaggtctaggtccaggtttgtgtccttgtccgggtttgagtccttagtctgaatcccagatctagacaccgactacgggtctgttccaagccccatttcctggatcataagtcaagatctggatccttgttatgggtccaggtctagttctggtttaggtcctgggtctgagttcgggtctgggatgaagactagggtgcggttctaggtcccgacccttgttctgtgcccctagtctggttccatgtttgggtctaagtttaggttcaggttcgggttcgggtc

SEQ ID NO: 121854 - DNA, 853 bp, Cannabis sativa
aaaagagacaaataataggagaaccaaacaccacctcatccctggatctcggtcatcactagtatccacaccaactcacaacatatcaccatagtcaggaaagtagtagccaaatccaaaccatcccggtgacaaaccttaaccagggcaccaccgatctgtttgcatcctcttcctctagcacacaactggagattccatcactagaccacccccgacgaaacggggatccacccctaaagaaggcaaatagaataattgtcgacggcaacccatgaccttgagggaaccctcatgcatgacacccttctcaaaccaaatcatgttgatgccaatatcagccaccacgaaccaagaacccaaacaaacgaggaagaaaatagttggtcctccataaaatgtctccctagagagtatcatcaatattcccccaattatgccacaactaagccccaaaaaaagctggcaagccacagccggagagaagacccaactctagcagaggcagcattaagaaaaacttagagagaaaccccaattttttgtattggattttctttgaatctatgattattagaatgtttctatctaaaatattatttgatattgttagagagttctacattattaatgtgtggaaagataataaaatatataagatgaatgggatacttctcccattatcaatttattttgagatggaacctcattcttcttatctcaaattcttctaacatggtatcagagaaataaataaataaaaaaaaacctctaacgactatccaactcaaaaaaaatcaatcgaagtagagccaaaaaaaaaagagccacaaaaaatccaaaaaaaaaaaaa

SEQ ID NO: 121855 - DNA, 1128 bp, Cannabis sativa
tttgtaaatttgacacgtcagttaaatattaccgttaaatatcatctggatgactactgtatacacctgtgtatatgtaacagtaaaacctcaaagtcaatatttaactgacactttaaatttacaaaaaaaaataaacttaaaagaattttaccacaaaaaaaaaataaaaaattaagtgtataaaaattaaaatataaagaagttttacacaaatttttattagatctcatttgttttaatttaatattaaaatatgaaacctgtgagatttttgattatgatatgtcatcatgtatgacaactcttttttcctatttgtttgttgggttaatattgtcatcttttgtatagtctctatcaaagtctttagttggttattctaatccagaattatctaatggtattcaattattaaataaataaaaataatagtttaagtattttattcataatttttattttaatggtttgatttagaaagataattgcaaaatttataactatgtaattttttaaataaatagaattacactacaaaaaacaactactacaactttttagtaataatacaatttttttttttactaaatgtaacttttaatcacaataagaagttatttgtgactaaaaacacatgtagtaacaataaattatgatttttgtgagtaatatatttagtcacggaccttttaatgacaacataagaataacgattttataattaatctagtcacaattttatttttacttttagtcaaaagttttattagtgattaaaagtaagattttttgtagtgttattttggagtactcaaatactcatcatttattataaatttaattcattacaaaattgttttgtaattttagtagtcatagttttttattgagtttaattttatttgaaaaatctgcaactttatttctcaaaatatataattaattttcaaacaaaatctaagcaaatatttgtatacattttaatgtatatgacaggttcatacatctaagaaagcatgtgtagctagttatccaagcattgttcaaaatgagattctttggttttggccaagcacagatcctcaatacaaagatattcttacaaagaaaagacctccctatatt

SEQ ID NO: 121856 - DNA, 2783 bp, Cannabis sativa
taataatttacgttatttagtctttggtaaaataaatattttattgtctttgttttcagtgtaacgtagataactacaaatttatttacattaaaaaattgagatataaaaaaaggtaaaactatacttaattaaaatggcatatgactgtaattttcatattttcaatcaagaataaaatgtgataaaaaattgaatattattagctgtataattaaatacaattttacgttacaaaactagaaaacaatatttatataagtaaaaagtacagttacaaaaatgttaatatatattttttgaacagatacattttttttttccattttttatttttatttttgaaatttgaacaaatacattgttgtaagaatattagttacaattggcaccttaatttattgaagtaattaagcacgacaaaaaaattttaagaactttttttcttattttaaatgacaaaaattagtagagtaatgacaatactttgttcacaaacctttgctcctagtcctaacacttgctgaggaggtacaacaagaggacgctgttgccttactctctggatctcttcatcttgttagataattcgaccttgcatctccgcaaacctttgctcctagtcccgaggaacctatagcagattttcataaccacctctgtgcaatctaccacggcctttgccgcgtccacagaggtgaagatgattttgacctccccgaccgcctcctatctcaaccatattaccatagcttctcgtatttcgccaggcgtccatattatacgactagcctgcgaacccataattcacgtaggtcagatagcgatcaaatacaatccaactaccgcatacatggaattttgagcaatgcactattcatctaacatattactaacatgcttcttatcttgtttttctaatcaaataaattactaaacaagtaaagacttactaaactatgagtcgagcttatctctgagtataattgtatatatcttgacagtcttcggtaaacaacctggcagctctgatgccaaattatagcgccctacttgcttaggcactctacaataatttctaattattgtgcacgcttttgctaatcaaatttcttgaaaaacgtaataattaaaactttgaaattaaacttttaactttaatagatacataactttacataatttttgggatcccatttaaaagtttaaaacaatatacaaaatacatttttcacataagtgtggccaagtaaaaacaaaataaaagttcatgtcgtcccaaaattgaacgctctaggcctaacaattccgatatgtacaatcacctgcaagctctagactcgctactgctcagccttcgtctttctcttacctacacatgtaacatatctatcagttaacaaactcagtaagaaaagcataaaatataaatatattaccgacttgtgtataggctcccatacacctatctacaaggcttaacagataaatcaagaacgttcttgcctttggtaagattgatcatgatattagccactactagctctatggtcgcgctgcgaatccagcacgataattgtactgctatgatagcatcattctatatccaaaagtaccattgaccataatatcactcttaaccagaactatatactcgtactgctgaccaggtactatagtttgtacagctatgataacatcaattagtactttatggaattaaatatcagtcaaaactagcaatatactcgcactgttgacctgacactatagtttgcaccgctatgataccaattcatatattctagcaacataaacatgtatatcacgtgcacacatatacatatatacatctaaatctattcttatcttttaaattcaagtgttccggtcaacctaaatagaaatatcgctcgctaaacaaagaccttatgtcacatttacgtaaaaacgggtaaataacttgttaaaaaccttatcggggacttaaattcagaactagaaatttttctatcaaaaatagtttggtaataccctaaatattaagaaaatatgaaaaaaaaataagacttcaaaaattgcctaaaaaaatagctggtcgtttctataaaaacagtagattgtttttctgggttactgccagcaaaaacggtagaccgtttctaagataacagtttgccattttttgctgcagttttccaaaacatgtcaaatctatcccaaatctcaaaccaagatccgaaacacttaattaaggtccaacaaacatattccaagtgataacaacacttataacataaaattatgaaaaccaccattgttgacctcaaacaagctttaaaaaacttcatttcattttatcccagatataaacccaagacaaccctaggttttgacataacctattcttaaaaaattgcacgttctaactaaactaaagctttcaaaactcaaaaagaaaagtgtttaggatcttactttttgtttgctcttccaacacacttgagttctagctgaaatccctgaaaaatttgatgaagaaaaccttgattcttgttggttctcttagggccgaactagagagagagagagagagagagagagagagagagggagaaggatttgaaaattaaagagatatatatatatatagagagagagagagagagagtgttcaaatttgattgaaaggctaatttgcatcatctgtcaatttgagtctatcactatctatttataggaatccttttagatttaggtttaaattatatgacattaaaaaa

SEQ ID NO: 121857 - DNA, 2071 bp, Cannabis sativa
gttaaaattctccctaaacttttatatttgctgaaatttagtcattctgttaggtttcatcctattattttgtttaaatactaacatatctttgtaaattagcaactttgtaccttaaactttgataactaataaatcgtactcgctccaaataaaaatgagaaagatcaacattttcttagtaaatcttaaaaaattaatttagatcttaatcattttaaatgattaacaaaattaaaaaagatagaagaattttaaaattaattaagcattttaaaaaattaattgttttttattaaaaaaaattcatatagacataaaagtatattaaaattcaatttttgtaaaaattaaattttatgggaaaaaatttaagtttatttttttctctaaaaatttagatttgtttaagtaaatataatttttttctagtttaatttctaattatttttaaataattttatattttatcttttattttgtaaaatacaaatttgttaataaaatgaaatttgaaaatatatttttgttttaagaataatttacatacagtatatgtcggctacataccaaactatatacatgatatatactagaaagaaaggtgatttttataaataatttaaactacattatttttaaaattatgatccaaaaaagagtgtctaatgtaaaaaaagtgaaatataaaatgattctaagtttgaaaactaaattagtaaatatttaaatgactaaatataatttttttttaaataaagattgcaactttcatcaaagcaaatcagctattaaaatagcttccaaatcagtagggacaaccccccttttggaaagacgatctagacatgaaccagaagaacgagctaaccaattagccgcttggttctcagaccgtttaacaaactaaattgaaatgtgaaacaaagaaatagatcgtataagactaatacaatctgaaataataagaccaaggggagaaagaatttgcctattactattaatagtattaaccagcatgaggcaatctgattccatcaccaccgcagaaggaacaaatccttcaaaagaggctccatctccccaggtgcttttaacctaactcaaagcctccttcaaagacattgcttcagccacaagagggtcgagatcactgctgttttttacagcagcaactgcaatacaaacaccatcgtgatttcgagttatccaccccaaaccgtggctcttttcccttaaaaatagagcagcatcacagttatcctttaactcacccatagactgtttaattcagagctcagcaccagccgagagctgaccagaagatgtcaagacaactccatttttaatctgagcaaacttttagagttcaaggtacgtaattgcagccgagactactctttctatagaagcaatcttcttgttccaaagcaagtcatttcgagctccccaaacaccccaaagaatcatagccattttatcaacactgtcacatggatgagtattgcagaaactctcaaaccagcaactaaatttgtcttctccatcgctaaaagaaaaccccagcccacgatccaaacaagctttagtgaaaggacatccaaccataatatgatatatatggtctctaactctccattacaaagaggacatatgctatacacattaacctgtttagattgaagagatacaagagttggaagacaattagtaagaaccctccaaagaaagttcttaacttttaggggaagttttaagtaccaaaacttcttccaaaaaccagagttatcttacaaattccatctcccgttacgcacttgcaaagctcgataatcactcttgacagagtaacctccataagctcaaatgcccaatactaggtgtccatatttggagttgaaggcagaggtatactacgaataagctccacatctctctttgagcaaacaagtcctccaaaagctcttcatcctagctcatattatcaagctatagaagattgaatacactacaggcatgaagagcctcatgagaagaaacgacataaaggttatgttggaaatattttacc

SEQ ID NO: 121858 - DNA, 932 bp, Cannabis sativa
aatcactcacacatgagcaatgtgggataaatacatacacacaacaagtttcttttttattagtgttaagttaactcagaattttattagcataaatgaaacttgataattaatacttagagtaaaataattaaagtaaataaagataagagtttttatgtagttcgatagttaaaatttatttagtccaagagttagttttatttcagagtatttctgtgtaagagttttgataggaattcagtatacaaagtttgtcgtctcttccatattattttcaccactattgatcgaagtaagacaacagttagtagttactcaatcttatctaagtagtagttacacatcgttggcttcatccgtacattctgtctataaacatatatgcgagaaatataaataattgtttgtgttttaaaaatacaaataaactgttgtttgacttagttaatacatgttgaaatcgagcaaaaattcttcatcttcttctaagacaacttatcgaaagaattataaatcgattcgagcttttcaagaatagacttgacaaccgaatcaggattagtcattctcgacctaagcaagacatatggttactcttttccttgaaaaaggcgtctcgagcatagtatgatttccaaaactttttttaataaagaaaagttctcggcggaaaaaagatttctttgtggaagacaatcttgagcaaccctttatcttgattttctttgttagttgatcaaattctgactaattataattttactaatattttttaaaatgttctttaaaggttattatatgacttagttttttgttatgcatgagataagttttacttatttgttatttattattttatatgaaaaaccgtgtttttgcaaatgtcagctgtatataagaaaatataaaaactgtacgcgtttgcagca

SEQ ID NO: 121859 - DNA, 1359 bp, Cannabis sativa
  modified_base (1313)..(1316): a, c, t, g, unknown or other
ggtagctacgctgggcggtactgggaagagaggggcgaccttggcgactcgcgactcgaggcggttggtgacagggacatctcgacctcgggttgggaaggaccagcctttgttgaagcgttgggttcccaaggaatggccaggtgaggagattcgaggaagttctagtttgggtaataagggtaagtctcttttgaatttggaaagaaagacatctgattatactcccagtttagagttgttgaagttggactccaggagtgaaccgttggtctctgtagacccttgtcgtggcaaggaaacggtggggattgtgccaaatctttgtgaaaagtttcctataactattgggccgaatgttgggtcgaatattgggccggatagtggtattgtacctggattaattggagagaaggtgctcatgtcttgtgatgttggaactatggcccgaatggataatgggattcttctaatgggctctggggtcaatgttgatagggccgaaagctctatagatgtagttgggtcgttggtttcctgtggttcgtcattatactctactaatgtgggagttaataagaatggcattaataattgtctcatctcccagaaaattaatagcttgcctcctagtttttatgatggttcatctatgggtccggttggtgtagtggaggccgagcccatccttggtgaagatagggctttgtctcttttctttaaggcccaagaaaaattgctctatgatctaaaacattttgggaagatggttttgtttgagattaagaacataggaggggatattggtgtattgccaacctcggaaaccaatgagagaacaacgccatttaagatgaggaagtttgaaggctctgcttcgctgtgctctagacctcataagattatcagaactcatcctggcgttattcgggactttccctgggacaagaaggatcaggaccaggattctaaagtggcttttgaagatccttctgaggatagctccagctccctgaattgcaatgatggaattatgaagaaccctctggttgggtcttttgtgatggaagactctgattcgagcttgtcggttcactcccatacccctgtggaggagaatgtcaaatctcctccacaagagccatgagaggcgtggcctggaattgcagagggttggggcagacctctaaagtttgtgaactgaagtccctgatcagatcgcgctctcttgattttgtctttatttcttaactgaaagttgatgctactgttgggttttatgccctaattaaaacccattacaatctgattannnntcaatttagaattttgaagtgaattatgattacatgtatgtta

SEQ ID NO: 121860 - DNA, 1805 bp, Cannabis sativa
aaatatgacccgaaacttagactaattttagcctaacatatatatatagatatatgataatctgcattataattacttaacacattatttatattttaaaaatttagagtatttttttgaaactgaaacttagagtaattgaaaatataaataatatatatcgtttttagttttttgcttaaaactaaaaaaatatatatgaaatagcttattttacaaatgtacaaaataaaacatgtagatgtgcaaatgattatttaaaccttatttttagcatgataaattattttgatactttcaaaattttgaaagatatcctaaataatttttaggatatatactatatatatatatataatatagaataattggcattattactccctgaattgtcggtactacttaattttactccttaaaatatacggttcgttaaaaattcttcataaaatataacaactacataattatgcctcttatgttaggttttgttatctttaccgctaaattagcatttttactccttgaactttgaccaatacaaattttttccctgttttattgaaaaaataataattttaaaattataatattctaatttttttaaaagcaattataatattctattaatttttataaaataataaattattagaaaacttgaaaaaaatataaaactaattaaataaatattaattttacttaaaaaatattaaattattcttaaaaaatattttcaaactttattttatttataaacatgtatcttaaaaaattaaatcaaaattattgagaatctaataaataatttaaataaactaaatttttttgaagaaaaagtcaaacttatttatatttatatactcatatcttaacaaataatataaataattaaaaattcaataaaaatataaaattattttgaaaaagaaagctataaatttaactaaaaaaatattatgtttacttaaataaatctacatttttttagaaaaataaaatatactcaagtttattcttgtaaatttagtttttataaaaattgaattttaatatttctttaatatctgaatgaatttttaaataaaaaatacataattttttaaatcgcttaattatttttaaaatttattttttaattttcttaatcattcaaaataattttttctttagatctatattaattttttaagatttactaaaaagaaaatattgaatcttttttatttttattttgtgggggtgcgatttgatatagttgtcaaagtttagggggcaaagttgctaatttacaaatgcatgtcacgatttaaacagaataataagacgaaacttaatagaaggactaaatttctatatatgtaaaagttcaaggggaattattaacaagccgtatattttaagagctaacattagtattgttgaaagttcagggagtaaaattaccaattattctaaaatataattataagtattgaattgtcaaagacataaaagggtacctctatacacctatttttaggagtgtattctagatttttattataattaatttcaacaacataataaaaagaaacaaaattaatattgggattttttcatttatacttttattattgtgcataaaatgtgtattgtagcttttatgtgtgtattgttactcttttaaaaattgagttacaattaattaacttcgttaatatatcataaaatgtgtatgtagcattagttttttaaattaatgttctaaatataagttttattggtaatatttaaatttagaatcacttttttttttttttttt

SEQ ID NO: 121861 - DNA, 1620 bp, Cannabis sativa
agttcatattaggatgttaatgaaacatacttgttagtaaatccagatcctggtaaaataattccaacatttcatactttgaggaggtcataatatctcgatctccttaataaccgagttaatttgttaatttgttgtacatgtgtcatatattcaaatgtccttatttattacttgaaaaataggtacaacactacctaatggaaacactagcattgaaatagaaactattatatctacaatggaaacaactagtcattaaatagaattcatgaacctacaaaatgtaaaccattagcctgtcaatagaaacaattatttgaaattaaattacttgtgttgagttgcaaaattagattgcagaattaaattgatttccttgtattgagttgcatattaatttcatttataagtgtttgagtttaaaaattatattacaattttaaatcaatttatttgtggtgagttccaaaatttatttggattacttgtgctgaatttaaaaattaaattgtaaatttgaattgatttacttgtgttgagttgcaatattgtttcaataacaggttgcaaaatcaaatttcaaatatgtattaatttacttattttgcattgcaaaatcaaattatcaaattatattagtttctgtatttgtatttatttgtgtagagttgcaaaactagatggcaaatttttgctacaaaactttattgataatatatacttaataaaattacaatctcaagaatgttcacaagtcacactgctgcaacatccaagcagccctaccaccacagatgcttccttattgttgtcatcaccaacatgtgatgtgctttggtttacacttggacaaaatactggaagagacaatgtaatgcttaatctatccaaagtggctcttaaggaagtttaaaaacagaggacttaaacagtctgaaactgtgaggaccagcaaagccccttgaaaaatggaccgttcctcctcatttgaaatcaattcaaattttgtaaaattcttttgtaatagatgagatgatgttagtcaattgatccaataatcattttacaattgacttaattcatttaatctgatattattattcaagtattattctgacatctgaagttttacttttttttcttcatttatgtttgttcacataataaaaaaataacaagcacaaaggagacaccaaatggtgctagaatttagatactatagacgactaagtagataacaaggacttggcatgtaaatttcatcacagaaaagatcatatctttctggactatatatccagtttgaactatatcataatttttcaaaggattccaaaatcatccttagttatgatctttttctacctgtgaagataagttacacagctcgtgagttcacataatgttttgtttataacaaaacgtatatagtcaaaggctatttttcaaaacattgaacacaaagtggaacacaaagtggatgtcgtttctttatgtcacaattgcaacaagttgtatcggtactggaggagcaccgatctgcggaggcaggaggggtttcaaggtgcagtttccagagagtgaacagcgaatatctgtaacaccctaactattatg

SEQ ID NO: 121862 - DNA, 699 bp, Cannabis sativa
ggctcgagctatatttggttagctaataactcatatttaatcgacaagtatataaatgtgaccgttgttatagagccaaaattatggaattgtgatggactattatattttagcattttttatataataaattcatttaatgttttctctttttttttttttgtggtaattaatctatttgttgggtccggtcgtcggagcttagagttagggatctgagtttggatttaggttcgaagttcgagtctgtggttcgaggattggatccaaggttcgagtctaggtctgggttgggtctcgtttgagatttagcaaactcaaacccgatttcggacctagaccctaaacctaaaccccagcctcggacctagacccagactcggactcgacctcggatcctgttctcaaaccttggatttggacttggacccggagtccgacccgaaccctaaacctcgacctagcccgaaccttaaaccccgaaacttaacacgaccccaactgaaccccaaacccaataatgctattgaccccagaccctggtgccgaaccccgacccactttcttattcctcaaatgaaaacaaaaaacataaataaaaacaaaatttactaaacatacttttgcttttgtttttacaattttaaaaagaggctttttcatttttatacttcaaaacagttttttttttgtattttt

SEQ ID NO: 121863 - DNA, 967 bp, Cannabis sativa
acattacactcctttaatctatgaaaaatctttgttaaaaaaaaatgaaaatatatgagtaatgttcacactctaatgatttatattttttatttatatgtatttaattttaatcaagtataattttagaggaatgctgaatagtactagtagtgtctagtatttttaaatgtgtaatattaatattggtgcaattaaatatcagatctcacataatttattgtaagagaaaattccaaatttatgtatttttatactttttgtgtaaaaatatagcttttttaaaaaatatatatattattttatgaaaaaattgaaaaatgtgggaaaataatattattttaaaaatactaaaaaaataacactttgtatttttatatataaaaaacaagtgaaaatatgtatacataaaaaaaattatttataaatccataaaaataaatggtaaaaattttgttatttttaggtatttatgaaataatcctattattttaatcatgtattttatttttgagtacgtgaaccacattactttttatttttttatagttgatattaattatatataagaataaatataatttaaatgtgctgtaagcattattcttaataatttatatcaatatcttaaaatttttttttaaaaaaaaaaaacagtataattaatttttttatagaagttaaattaattattagaatttaatcttaccttatttcaaactattttgtgttaatttttatagtaagaaaatatttttaaacataataataataataaagtgtgttaataaaattgtgaggcattatataatgcaatatatatatatatatagttcttgccatgtggcatttgtggtgtttaaaaagaaaaatgctaatgggaaatttgattttctatacttatatatacctaatattttatttctaaactaatacatatcagcattgaaaatatatgaccacttta

SEQ ID NO: 121864 - DNA, 1400 bp, Cannabis sativa
tagtacatgtaaaagttcaggggataaatcataattagcctaaaaaaattagtacaattaaatatataaaatataaattattaaaatagggtgtccttaacaatttagggggtgtaaataaaatttttattgacatttttcgcctccaattttttacactatccaattgtgtccttgtaatatacaacttattaataatacatcttagaatataacttttgcaataaaatagtccttccgtcatattttatttaattttatcgtaaaataagtaaagtgattaatagtaattgataaataaataaaaattaaatatctttcacaaatgaataataatataaaagactttttatattctataataatttatactttttaattttaattttcgtgatgaatattattaatttacttataattccccgatcacatgtccattatccactaatatacaccacaaaagaaaaacaaaataattagctacagtgatttttttcttccatttttggtactaagtaacaaactgcgttttacgagcggttgtaataatttttttatttaagagtgcagttataataattaagtcataaaattatatgacattttttatttaatttttttgataataaaaataattattcgattaaacttttattttttttctcgaaaaaataaattaatattttgaaaaaaatcattatagaataaagatatcctcaaacattatattgaaaaagatattataaattgaaaacatttcacacaaaaaattttaaaaagacaattgataaatttatcatagaaaattcatcataatttcaaaactgttgccatcatcgtcttgtagtcgctactacattaaaagttgttatcatcataaaatagtgacatcctcatacgttatagtgaaaaggaaattttaaattgaaaaaatttcacacataatgaagatataaaaaataataattgataaatctatagaaaattcaactgttgtcatcagtatcttgtagtctctaataattagattcaaaactgttatcatcaccacttatcatttatagatatcactatatttaaaatcgttatcaccactgtatctcacttgtgtatccaaataatcttcacctccataattcttattcatataacttttctttctcaaattttaaaataataagtgtttatgaaattagagtatcacaacctgttgacatgaaaagtggccaacatcagctcgctaaattggcgagatgattaatgagtttaagtaaataatttagagacacccacaaaatatatagtagttcactccctatatcacgatagcaatagggctacatctactttgagtttttatttctcacgagacggtgattacaacaatagactaagtattg

SEQ ID NO: 121865 - DNA, 1692 bp, Cannabis sativa
  modified_base (27)..(36): a, c, t, g, unknown or other
gcccaaaaaagttcagggggcatgatnnnnnnnnnntcaaagttcgggggaaaaaattgctaattagcctaattttttgtaagccgaccaacccgaacaacccgtccaaaccaaactcaacggaaaatgaaaaccgaaaaatctgatggaaatataactagcccaatctttatattgggtgagatgaaataatatcaacccacccaatcaatccgaactaacccgactaacccgattaagaaattttttttatgtatatattaattatagatcatctatatattatataatttatatacatatttataaaaaataaaaagttcaaactactatatttttttgtggcggatgatttgaactttaaattcaatccttatatttatcttattaccacaataactaaaatataacaattaaatatatatataaaaaaaaaacattagtgctcggtttagacgggttaagccgactaaatcgaccaattcattaggcgggttgaaacttttttttcttaattagatgggttgcacttagatttttgtagcccaatttttacattgggttaaataaaatgtaacataaaccgaccaaacagatcgacgtacacccatactcaaaagatacatacactggttcgggataagttgagaaatactattttttattaggaaatatcgatattagttcaactaaatatcaagtcctatataatttaatgcaataactagtatcgctagccaatcgtaatgcaacacgtctagaatgtgttagccaatagcaatgttcttttttattatacattaattaaatataattgtaaaataattttaattgataaatacctttttttataattaaagtactaaatataactttaaataacttatcaaaattagaattactaatgcacataatggagatataacttataaaagtgagtataaatttaaaagtaataaaataaaagtaaaaattaaaatgaagtaataaagtgagtatagagtgtaattttctctttttcttcttcttcaaatccaagtccattagattttattgggctaggcccatttaaatttgctttgggatgatttttagaaaaatacattatgtacaaaatttttaatatttatacagttttttagattttatttacataaaatatagttttttttttgtgtatttttatgttctattcttattattttgttattaatttttttttatttgtatatttttttttatgttttttgttattattttgatattattttcttgttacttttatgtgattttattgttatttttttgtgtttttatagaatattgtaaaaatgttaaaaaaaaacttgaatataaaaatataatttttataaaaatgaatattttatgtaattattgaccatgaaaaaattgtgaagtgttcaacatatatgaatatgttttttaaatgaatagtgaatttaattttctatgcttaaaaaatcctaaaattatatccctaaacctaaatgttataccataggcaatatatgactacttttgctttatccccataatacccctcacatttgaaccacttgagttttttttttttttttttcagtttgagagagacgaagaaagagaggttgggtccgatggtcatgggtccgattggtcggacccatggtccgaccatcggaccactggagt

SEQ ID NO: 121866 - DNA, 766 bp, Cannabis sativa
aaattatcgattcacttctaaatacttatagaagctatagattctatatatatgattagcgctcccactcaattatattatcatgttcccaaagtgtaagtattaggcagtccaagctttaacgaacaacactactagaaaacctctgccggcaaaacatgtcagcgaaccttggtcggtaaagaatgttttaccgccgcataggtgaaatgcgccgacaaaacagttttgtcggcgccgaattgcactggcaaaaggtaatcgccggtgtaaaatgatacccttatccgctctgaaccttctttgatatatttttgccggcgcaagaatgcgtcggtaaaaatgttcacgctatttcttagattggcgccaaaagtttatagcgtcggcaaaatgtttcgcgccaatctgaaaccttttagtgttaagttttgctgcgccggcgaaaactttttttttttaaaaaaaagataaattaattattataattaattatattatattttatattaagaaaaaaccaacataatttacatttaaagataaataaaaattaattatattatgttgtactaaaattagtatataaataaaacattaaaggatattcgaatgggataataaaaaaagtaaagttctaattggtatatgaaatatctaattatctacatgcgagtaatgtcatcatcgttgtttctctaagtctcgggaggatgtgatgacgatccagcaccaggagcaggcgatgacgatccaacaccaggag

SEQ ID NO: 121867 - DNA, 1005 bp, Cannabis sativa
tatgagactgaatactgagaactcgaccaatctccgaagtgagagctgatgaaagaatcggatccccaattccaactaaaatttaaaatgacatattttctacatcatagtatgaatttacatacaaataagtaaatcattcttcataatttcaaatcaagcctagattttagacccaataaatacaaaacatggagggtggtgatcatatcagaaagttctaaacaaaaaatttattgggtatgatttggtgagacagaataggaataaataaaagtagaaattacataaattatggaaaatatttaagaatttatttttttatgccatatatttttaagtcacttggtttatggacttttactaatctttaaatttttatgggataatttatgccatattttttgtaaaaatgttttaaaatacaacattttataatatttcctttttaaagtctctgttcttttcatcttcttcctccataggtacctacaaccaccattgctactcatctctgaccaacgaaattgtccgccccagacatcgaccaccaccacgaaccaacattccttctgtctctcttgctctctttcaccctcgcctgagattggaactagtatccacgagctaaccttccacatctctctcgctctcgttcccaatcgctgaaccaccccaactaccttagcccctaacctcgacgtcgactagagagaagaagcttggtgatttgttgcagagggagtggattagacccaagtcaatgggagtgaggatttatgaccttgaagaaccacattcgtattccacgacctgagtcaattgtagtctctctctctctatcactaagtcatcatcagtagtaccctaattgatcggagatcggaggaatttcgttcattcattgtccggataaacaattacttaactcactcactcactcactggtacctacgaatttgagcctaataatgaggattatacatgtattatatatatatatat

SEQ ID NO: 121868 - DNA, 1507 bp, Cannabis sativa
ttggaccttgtcctcttcctggaccaaggctgcactgacaatgttctcagagacggcccagtataataacaagtcttcttcgtgaactatttttaacaatactagtggtttggcaatgtgctcttttagttttttgaatgcctcctcgcattctttagtccactcaaattttcgacatttcttcaaaatattgaagaacgggatgcacttgtcagttgatcaggaaatgaatcggcttagggcggaaaccttccttgtccagctttgcacatctttgtgtttcttgggggaaggcatgctcagtaaggcctagatttttttggggtttccctctattcctcgttggctgacgataaatcccagaaactttcctgatttgatgccaaaggtacacttcttaggattaagcttcatcccataccttcacaccacttcgaagcactccgtgaggtcatcttcatgggccatgcatgtcttagatttaattagcatgtcatctttgtatacctccatatttcttcctaggaggtctttaaacattaagttaaccattctttgataagttgcaatggcattttttaatccgaagggcatgaccaggtaacagtatacctccttgccagtcctgaagctagtacattcttgatctgcaatatgcatcttgatctggttgtatccgaagtaggcgtccgtgaaggaaagtagcttgaatcctgaggtggtgtccaccatttgatcaattcgaggcaaaaggaagcaatcttttgggcaggccttgttgagatcattgaaatctatacaaagacgccacgccccatctggtttgggtaccaacactggattagccagccattttgggtagtacacatcccgaattaggccattagttaacaccttatccacctccttctctaacgcgtgtgcttttattggatcaagaggacgtctcttttgctgcaccagaggcatgtctaggttaacatttaagacatgggtgatcacataggggcttatgccggtcatatccccttgacaccatgcgaaatcatctgtggctgcctataatgtttcagtgatcctactttttcctctagctctaggttctttcctagacagaaaccttagtggagtcaaggtcgcacacatttacttcctcagtgtccttcataggttctacagctgtttcgaatcccacgcggggatcaaactcgtcttgttccatcaatcttggcgcttcacccctgtgcaccaccatattgataaggcagcgttgtagcattgccccacctctcccttgtttcctttcactgttcccacttcagcttcgctggtaggaaatttgaggcataagtgccggatgaaggtgattgctccaaaatcgaccaaggccgactggccgaggatggcattgtacgttgtcaggcaatctactactacaaaggtgcagtatttaaagtgctttgtgttggaagttattttaccaagaacttagatctactcacaagta

SEQ ID NO: 121869 - DNA, 2559 bp, Cannabis sativa
aacacatatatgcataattaattaaattaagatggatatacataaagtgagactccaacacttataatctcaaatcatattacttattactttaattaatacatattattatacgaagtaatcattaaaatgacataacaaattagaaaataattaattaataggccgcaaaagcgctgcttaattagtgggatcttagtaataattatgattagatggagggatcattttttctatatatatattgtatatgtaatcataaattaatcaaataattaagatcccttttgctaaaaaatagagtcacttgttgtaaagtttgacataacactataatataattgatgttttaacttttaagaatattcttattatgggcatcttgaggtttcttttaaaatagatataaatagatgatattaattacatatccaaattaattaatatatatttataataagcacacagtgcatgagaaagtactctcgatcgatcttcatcaaagaatattttcatttgcatggtatatattatatagttaacgaagccaaatataggacaaaattaatctatcaaaacacttatatatgtggtgatcatgatgttgtgttaatcgtatatatattatttcatattattaaaataaaatatggtatacaattttatatactttatatattacgagaaggtataatttagtactttaattagggtcgtttagctagaaagctatatcaagaaattgttgaaggtaattacattatttaatcatgtaattaaaaaaaaatgtgtaattataagtaattgaaactccaattacactagctcttaccaacttgagaattgagtgtaattacaaattttattcatttaaaatatttatattaaaaaatataatttttctatttaattactaactaatttgccaacaacacattagaaatccatatcacaagtttacaataacttcatattttaaaaatataatgtaattactagcataattactactctaattacacaaatgacattcaaataagttcttaataaatttggttatatatattgacggtacactgaataaaaatattagaaaaatatgcaaagtcaaattaacttgaaattaaatatatattattgcatgagggattaattggctgctacatatcatgatgtagtttcaaaatgtagaatcatgaaattttatgtggtatatatatgctcaaatcctttggctgtgataataatacgtacgttgaaaattatctgatcatgtcctagctagtaatttattcaacatgtatataaatataaatatgagaaaatttatatatatatacacatgtactggatagcatataattattgtctctatagtaggtccttgagaatcatctatatcacttcaaaaaggtgtgtatatatatatgaacacaataatcaattgagagagaaaacttaatgatcagtactcatccaattgattgccatgaagacctgacctctatatatgcacatgcatacatatgatcgatcgttctgtacatatatttatatatttatataatataaagaaactaagatggtcagaactataatgtaaatatatttgtgtgaaataactgtataagtaactagacgtttcgttactctgttggtcaagaaatggtccaagccaatggtagcctattgggaaccattgttttgtacttattattattgggggtgtactgatgccatttagcacagcaacacacacacacacataatatataaatataatatatgttatgtatttataaatatatatataaactgactcaactcaatcacttcgaaacgcactataatattatatatgcttatggtgttaaagagtcagctccccattttcctctccatttgcgtaacgtagcgacgtaaatgcttacagtgcttttctaccaacttgatgtatcttgtctctatcatatatcatatatcatgtataataatatttgaggatatattagtaatactataaggtgataacattctataattgattagcaattcttcattatttttattaaaataaaaagtaatttatagtgtaaatacttaagtttaactctcggttgtaaaaaaatatacttaagtttagtttttgactaaattatatttttagaacttctgtaggtatctgtctgttaagggttaagtcgttatctacgtgttattttcttattgatttatttaaattaatttttaaataaaaataaaaatgtaatgatttggaccaatcaaagattgccacatggtaatttacttaacattaacggtcaaacatctacaaaagtttcataattataacttaggtattattacggttaaaaaaaacaaatttcttcgtatttaagtagattgcctggtagcaaatcttattttaaagtaaaaaccaaaacaaaataaatagttggggaattatatttgcacctcataaaattataaatacactccattattaaaaaaaaaataaacttaaataatttttaaaaattactcttactatttttttaa

SEQ ID NO: 121870 - DNA, 1674 bp, Cannabis sativa
atactgtgtactgtgttaagttgtcactgttgttccactgttgtttttaattattctattttgttgttttacgattattttataaaaaaataatattttcgaaaaaaatttccatatggcagtattttttttttgtaaaaattaacccaaattctaatatttgtataaaaaccccttactttttgatggtaatatttaactatgtactatagtagatctaatacttgttaagaaattgttattctctggttgtgtcctcacagtaggtctctgcacctaccctaccttgtcagcattatttgctcatcattttgtgtactgtcctaatcattggtgtactgcaatttcgttatacctttttgtatttttctcaaagttgttatttcctttaatttattgccttgtaatattctaaatgattcctctgatgtaatattaaaatataaatacaaggctccttactcatgctcattgagctgagtttttctattttatcttttctttaaaactttaagttggtatcagagccactgtgaccgaagatgtcaaccagtgataaaacctcaccagcaacctcacctcatggaaatcgatcatctccatttcaatctggtagcaatgttgctaaccaatcctccactactcaaaatgcaacctttgcatcgagtgttgttgttccacactttcggagcatactaaatcagtcgtttactctcaaactggatcggaataactttaccttgtggaagaccatggtgtctgcaatcgtttagggtcatcgattgtatgggtatcttataggagctagagtcaaacctgtagagctcatatttgttccatctgttgatggacaacctggttttggcatggaagtaatccaaattatgaacaatggattgttcatgatcaacttctcatggggtgattatatggctccatgacagagggaatagccccaaaggttatggagtgtgaaagttctgcatatctgtggcgtgcttttgattgtcttggattcaagctctgttaagtgaagtgcattttcctttggctgccactcttataacttggtgtgataatatgagagctagtgctttggcttccaatccagtctatcatgctagaacaaaacacattgaactggatatacactgcgtgataaagttctcaacaagacacttgatattcgatatgtagcctcctcagattaaatagcagactgttttatcaaaagtctctccaactctcgtttcaatttcatggtcaacaaacttggagttgttgcttcatcactccagtttgagaggaggtgttaagaaatttttattctctggttgtgtcctcacagtaggtctctggacttaccctgccttgtcagtattattagctcatcattttgtgtactgtcttaatcattggtgcactgcaatttcgttatacctttttgtatttttctcaaagttgttattttcttaatttagtgccttgtaatattctagatgattcctctaatgtaatattgaaatataattaatacaaagctcctcactcatgctcaaataggggtgtggataaatcatccaatccaatgataaccgaccgatccaattataattgactgccaaacattggatatgtaattgtgattggatcggattggatgttatttttgaa

SEQ ID NO: 121871 - DNA, 999 bp, Cannabis sativa
cgttttgaatctccagtggccatttagtttccacttttgctccaatatacctttcagtcgagttcgtgaaactcctttccctcaaagaaacttgccagtattcccgttcttgctatttctgcattaatttcaaaatctggttccaagtccaaagtcatggactctaggaagttttttcggaggtctcatttctttgtccttttgctgctacatcagttgcttctgaacatggaatatcatttaatgccacatcctcttcaactacttgggtagtttgttggttactctccacagtagttgcattcattaagtcgttattattctcttcttgtcccacactttgattcccctcaacctccatctttgagtactggtacagagtaggcagaggagtaaatgctcttcaaacaccaataaaacttgcgagtgaatcacccttagaacctttgaaccaaagtagaatagtgaaactatttgacttgccaactagtcgccaatgaacactagatgaatctctagattcaaacaaatactctgtcaattggaaactccaatcctctcattgagagagctcactatgtctcactcgatcatcacacactatgtcttgggtattgtgacttaagaggtaccataattttgtgtgagaggaaggagacacactatgtctcactcgatcatcacatacaagcgcgctactggccatccaacgaactctgctagtttgtatggtttggtactttattttttctatggaatatttgattaatttattaataatacgttttaagtttaataagaagaagtaaacctagctaaagactatttcactcttgattttaccgcaccataccaactatcctcccatgttcacattaacttttcttcatgttacatatgttagagattttataacaatggaagaaaatcaagatttattacaactctattgtaaaataatacaaggactaaaataagagattgattaaatatatgcta

SEQ ID NO: 121872 - DNA, 2751 bp, Cannabis sativa
  modified_base (2520)..(2521): a, c, t, g, unknown or other
ctggtaaaattatttccaacacaccccggtgtcctaaggtttcacggtcatcctttgtctttgttccgtaggttgtcggtgcccacaaacgttcattctgatcattgtagattttagcatgtacacatattaacttagagtaatgaccctaattcatgctttcatctaatgaatcacattatatattgttgcacattcatgccaagccatacttagggttataacccagctctcagtttcactataataatcacacaatatatatttgcgccaccgtactatactccatgtgcataattcactgacttacctgctttccaatgtatgaggagaaatctcaatccatgagtgatcttgaccaagtaccggtattcctagtcataattcttgggttttacaaaatatggttaatccctaatttcataaaatatttatacaaaatcagggtccgcatactggatcaaatgatagagttctttacgagctttccaacgatataaagaacgtccaaaatagagtttagaatcaaaagttattggcaaaaataatttacaaaatattttggttctaataaatcgagagggtcacgacctggcaccaaaggtcgtggctcttggccccttatagggagcaaaaatgcccaaaagtcaagggttgcaactcacatgaactaggttgtggcgcttggttcagaacccacaaaaaccaaatttttgactccgaaaatgcatccaaacaccactacaactaaccatacttttcatacaaacttttaatgcaaagaggtggtttcaaaatccagaacatagaaaaaatatccacataaatcatgcttaatttacacaatattaagctcaaaaatcaccaatttagtcaacaaaataacttaatacattttagtaaaagaaatactcaaaataccattttgctcttagggccaatattccacataaaacacaattatgggcaactcaataatttcacatacacataaatattcacatgttccatatatattatgttataacataatcacataataaaataattttagatcccgaactcggtccgagccaaagtacctagttgtgactatactgtgccaacttgtcaaaatcacatgcggtaagacaatatacatatatgtatatactatataataatatagtccatttgcacaataactattaagattataattttacccttctctggtcaaaattataaaaatgcacctaactcataatggggtcttaactacaataaatctcaaataacttcatataattaattatataataatataattacttaattataattaatctattttaattcgggttgctaatctatttactaatcccaggatattacagtcagaatatcttagaataatctctccctctgaaggagtgtttgtttaaaagtaataattaaatgtactattagttcagcactttaagaagtgtggtacgagagaaatattagatacatgttcactggaatgaagtaggtgagaaaagaatacgatggactggaaagatctaaagaacttataaggtcatagagtgaatttgagttgtatgctcgcctcattgagtacacaaaaaaggtatgctgattcaaagggtaggaatattgagttccaagtaggaaattttgtatttctccaagtatcgcctataaaagggatatgtagaaaagagagttaagccctcgattcttcagaccttttggtactggagtaagtaggtcaggtagcctatcgggtagctttaactcgtgcgttgtccgaagtgtatgatgtgtttaataactccatgctgagagagtacgtatcaggttcgacctatattttgagttgtgacaattttgagctttagacagatttattatatgggaaacaacctatccaggttttagactagaaagagaaagtactttggaataagacaatttcgctagttaaagtgttgtagagaaacagtaaaataaaagagacgacttgagaattagagttgtaaatgtgggagaagtatttcgagttgttcaagtaaattttaaggacaaaatttttataaggaggagatgattgtaatatcccagaaaactaattgtgaataattaaggtttattatatattatgggttaattagagagtaatgagcaggattataattttactaatttaattcaacgtaaattataaattttgccataagtggataaagaagcataatttattaattacggagatttatttagaatatgtgagtatatgtgaattatttgtgaagtacaagtattttaaaatttggcaaccctagatacccaatcggagaccaaaaatatcacaacgggtttagttagtaatattaatgagattattgagataagttgattgtagaattactaaggtattttggggtacttgaagttgatcaaataccttagggttaaaaatttcttaatggctaagaaatgataaaataattcgttttattattattattattattnntattattattattattagtgttatcattatttttattattattattaaagttattatttttattactattattattattaatatcttttattcttatctgttatatctaatgtggctatataaccgaattcttggtttatgaaaaattattgggtgacttttttttttaaataaagaaaaataacaaattattagatgttgccatgggtcagcacccatgtagttagtta

SEQ ID NO: 121873 - DNA, 2999 bp, Cannabis sativa
tttcaatccaatccaatccgcacaagtgcggattgggttggattggatcgtacggattggattggatcggatactttgtgaacacccctaaaaaaaattcccactcccataataaaaagtgaattgtagttgataagtattacacgattgtgataaagactttgtagatgattataaaaatcaaatcacttgaattatatattaatatacgttttgacgttcctctcaaaaacaaactaattctagttaaatacagcttttagtttaactcatataattgtataatatttctttcatgattatttttataaataattcatgattgtgccaaaaaaaaaagtgaaatataacttcgtaacggccattaattgatggattatgaacttaattacagagtattgcaattaaatacatgtggtgttttgaaaataataacgaatgatattctattaaattaaatcatgtgcgctcaacatttaattctgctaataacgataatataatgtaagtagttgagaattaattactacctttatacttaactaacggttaattaacaagttagttagactttgtttgacaattgtactttcagctataattgttattaactaatttttgtaaaaatttctataaataagagatcaaaaggccaattaattgattgaacattcttcagtcattttattcatctccttctcattctatctctctttttcttccttagctcaagaacctcaagttttacaaagttcttttatggtatcagagtcatatctaacaatagcaatccatcaattagattccactagtggaagttcaacctacaagaagagatccactagcagaagaaagatttgctcagcgaaattcaccaatcaaagctcaacttgttcttcctaacaccaatcttcttcctttgaatctcagattggattaaacaaactacacaatctggaggtctctttctcttgctgctactcttgcgtatgagctagatcaatatattcttagcctgaatccaccaccactgaatcgtaggacccaatccacataactttcctcttttgcatgcatctcgaggaaatatggaatataacaacctccttagaggagacatgcgagttcatgccaagaatgatgcaaatcttgcattgagtagtcaaaatgtgccacacatgacgatcatgacccatctctgcgaccacctcatgttccaagaaatataggggtcgatgtcgagaaaaaaggggagaaccctcattgagaaaggcgacaacctactcaagaggcgagttacccttcaaggtgacaagctaccaccacatattcccaactgggggcacacgaaaatcatcaacaaactttcctcaaatatagtgacagcaccgattcgttaaattgctccataagtatttatgatgacattcaatcttggtcctatcaagcacattccactaatcctcaatacctgggggaaagaccaagtgaaaatatatatatatgggcatctccaaagagaagatctccatttaaaatatccttatgttggtaaccgtaccaacatccctccttttcaaggagccaatcctcatgttggtaaccgcaccaacattcctccttttcaaggagccaatcctcatgttggtaaccgcaccaacattcctcctcatcaaggagccactccacatgttggtaatcattccaacaattctcctctccctacaagagttgattgtggtataccaaatggaaatcctcgcataacattacttaagaaataactccaaaaacttttaaataacaataaactgaagaagtatgaatttgatgaaaaaacaaagcccttttgtaccttatatcttggcattatcttaccctccagagtttgaaatgccaactacaaccaagtatgatgggaccactgaccctagggtccacataagtgacttcaatactctcatgcaagcacacgaagttgttagagatttaaaatgtgtgttattccctgctaccttatttggagatgcatcctcgtggttcaaaaagtttaaaagacactctattactctatagtgtcatgggaccaactctcagatgctttcaaaaaggagtttcgagccgtgagaacctgcaagcttgaatgttcctccttggccaacgtgagacaattgctaagagatagtttgaaggcctacatcaactgcttcaacattgaagttaccaaaactcatggcatcgacgatagtgcaagaatgatggcactaggggcaagtattgcctatggttccatattttggaacaaccttcaaggcaagagcgcgcgcaccaatgacgaattcatgaagcggacacaaaaatacatcaacattgaagaggtgaggatagcaaacaacctccctctctaatccttatagcccgctcaacccgcattagccctgccagaacttactaatgccactatggctgctaactcttttagacaacagcaaaagagaaggcatagatgacaaggaccaaagtcccaagaagagtaggagtgatggcccttatcaccctctgtatttagtctacactgagttgacagaaacccaagaggccatctatgtggcgaatgagcatcgagttccattatgagttcctaaacccatgaagcatgatagagccaagagagatgctcaagatattgtcaataccataaggacatcgaccacacaaccaatgggtgtcgaaacctcaaagatgaaattgagactctggtacttaatgagacacttacccattatgtacaacataattttcaaggagcacatgtcaactaactgaaactctaccaatagagcgagaaggcatttaacatttcttgagtttttctaccttatttttgttaagaatattctaccaggatctagattaactaacaagtatgttgattaacactctaaatatgaattctctaaaataataaaataaacacataagggttaagaaaaccttac

SEQ ID NO: 121874 - DNA, 613 bp, Cannabis sativa
  modified_base (33)..(56): a, c, t, g, unknown or other
  modified_base (518)..(524): a, c, t, g, unknown or other
  modified_base (574)..(574): a, c, t, g, unknown or other
gaaagttcttatttagggtgttaaacaacatannnnnnnnnnnnnnnnnnnnnnnngtaaaataatatccaacaaaaggaaccttctctgcccttcttgcgactaaaggtatggatgatttttttaactatgacactattatcttgaatgcttctaccaggcataaaaaagccgcttgggttgggcaaatcaatctaggcaggataggcttaagtttattcgcgaggatctttgaaatgactttataagtaacattgcggagggatatgggtctaaaatggtttgttctctttgggttctgaatcttaggaataaggactatattcgtgtcattaaatcccttatgcatacgacatgagataaagaaatcctgaatagcttcacagaagtcattccctacaacctcccaatagtgtttgtagaaaagagccgacattccatctggaccaggagccttgccgctccccatctcgaacagtgtcttctggatttcatcattgtaaagaccgcttagtttnnnnnnnaaattagcagttaatcatgtttaattatggaaaattatttatagctattnaaataattatttatactgttattgttgaattctgaaatg

SEQ ID NO: 121875 - DNA, 903 bp, Cannabis sativa
  modified_base (27)..(30): a, c, t, g, unknown or other
aaccaagaattgccgttagataggcannnntaatatataaagatatagatatttttaattttattagtcttttgccttttgttgattgtttattaacctatcgtatttaaaaatattttatatagcacttaaggggtaataattataaagttcttttgctatgcggtattacactttattctattgtatattgtattttatgtaatatttttatataaaactatatgtgatattaatttttatagatacctaaatatataatattttagtataaattaaaatttaacataattttatattaaaatataatatataatctaatacaacgtaacaaataaagatgtgctatctatcatatattgttttttaaaaattaaataaataattccaacacgattatatggtgatgatattaattaaattaagtggaaaattaattaatggagttacattggataattaattaattaagtaataccaactacacatcacatgcatgcattcatgcaaaaccaaaaaacattctcacttccacataaaaaacatgttataacaaaacttacccaataaatttagtaagaaagagaggcactaatacaattaagtacctagctacgtctataaatataggttgtgttttataacaacctctcatcgttcaataataatacaacaaatatatatcataatatctctagaatgtcgtggacacctgaaattccaggagtgccaggaataccagggtcggcgccaggaatgccgggaatgccaagaatgccagaaacacctggagtgccggggataccgggggggtcggggggaccagggatgccaggagtgccagaaacacctggagtgccggggataccgggggggtctgggggaccagggatgccaggagtg

SEQ ID NO: 121876 - DNA, 1112 bp, Cannabis sativa
aaaaaaaaaaaagaaagaaagaacctttatttttattattgaaaaaaaaaataaaacaaacaatagtatttagaaaatagtatttaaagttatattacaaaaccaaatggactagtctaagataatttaaatacccgctgaccattcaaatctgtcatgtagtaaatttttagaaagaatgaaataagaacttcaaataatttacttttaaatatatgtataataattaatgctatatatatttttttattgaaaagaataatatatatataattgtagataaaccataaagttgaagttagggggggggggccatggccctagcatccatcaacatagttccgccactgagtatctgtattattataatgattattatataattaataaaatatgatattgtcatcgaatcataatgggatggatataatgtatttacacattcgtggctttgttctaaaacatctttggtcaacttattaggccaaataactaattctctaacattggacatgcatgtctaattaacctataattccttataaaaagggttatgctcttgattagtaaaaagagagaatgagtggctataatgtagagagatataatgtggagagaatagaagagtagtgtttatatcaagttttcttttgtctatacgtgtaaatttaaagaaatgtaattaacatagtaattggagatcaagatcaaaattaaaagtatttccataattaaattaatactctaaaattaattgtttgatcttgaatattattaatgagcattgattgttattgttagtgtaatgctcattgaattataaatttaacaagatatgcttgatgttttaattaatctatctctagctataaatatataaataaatatattttatacgtataaaatatggaatccactgcgtgactggtcacgctttcaacttaagtcattaaactgactcaataaatagtttattgttattttatggctactaataaataaaattaaggctaattaataattttttttcctgaattttgacatgtactaaatcgtgtcttctgaacttttttggccgttaaaaatttcccggaactattgagattgttaaa

SEQ ID NO: 121877 - DNA, 1058 bp, Cannabis sativa
ctaaaagaattattagtttggccaatactatatctacatgtgacactttattgatcaactaacagaacgataaattaagtgttaaatttatgaatttgaggatatcaataggaactacaatgatgacatcaattttatatgattggaatataaaaataatgcattatgaaaaattttgattcgtaatcttacacctgtttcttcttctacataatctcacacctgcttttttttgttcaattcataatgtttgattcataataaattttttctatctataaaaaacaattttcatatatatagttatgaatacatatatatatataaataattgaataattatttaattctaatattactaatttagtttatatttattattatgtgttttttaaaaaataactaatttaagatatatattttaatagaaaatatattaaaataatagtaaaatattttgtaaatttatgctttaataaaatattaaaaaattaaagaattaaggagaaaaaagaaaaataactttaaagagattttagaccaccacgtcaccgcctcatacttatcttttatatagatatatagatatagatacttatttgatattttatagtttgaaatcgtatatatttggtaattgaaataaaattttatgaaaaaaaaaataaatttaaactattaaatatgtataaatttaaaatacaggtagggcaccctaataaaaatagtatgaagcttgctgtccttaattctctagttgaagaagtttttcatcaaatacacaagaacactaatacaaaatgtataagttttcaaaatgtatatttttttttgtgattatattatttttgttctatatttatgaaaaaaaaaatatatatagattagtatcaaaacaagtaaataataaaaaataaaaaaaaaatctattattttataataattataacttatttgtaaagcttttattgctgactatttggagactttaaagtagtgtaacatccccgcttcaagccttcattgggtccttacacccacggaatgaatgactctta

SEQ ID NO: 121878 - DNA, 758 bp, Cannabis sativa
tctctctctctctctctcgagttccttagagaaccaacaacatttagagttcttcagctgggttttgtggattatagtttgttcttggtggatcttttgaaggtaaccccctttagtaccttttctcttagttttcttaagcttaaagtaaaagattttacttgaattatgaattagggttctgaagtttttagagttgtttgtttgggttttctaatgatatattatggtggtttgagctgatttgaacttaattggtaggttattttgatgtttagacaaggtttgagttttagaactcaaactttggtctctaatggtgaagtttgattttgagcatgttatgttgttctattgcttagaatatgtctattggggtataatatgcaggtctcgagagtttggttaagtttggaatccatttggtttgggtttggaatgttttgcattttctgggtaaaatcggctaactggttttacaatgcttgtaaaaccgcttactcggattttacagtaggtttcccaaaaaattcaactcgtcgattcgtactagtttcaggtttctggttaattaattccctgccagtttagggtattgccatattaagttgcaatagataggcttttggcataaaacgcaagtcccagttgtgatttggcgagtcacttattcgtgttgttatcgatgtgatttaggaacctataatttgccgagcagttgttccactcaggttgaccggcgcacctaaattcggaat

SEQ ID NO: 121879 - DNA, 1356 bp, Cannabis sativa
ttcaagcacatgtaatggaggattagcccccaatacataacagacaatagatggtgtccagaaagagacttcctcttcaatatcctcaaaagtgattctaactttactgctgttagaaaggggagaccatatttgattcacgtgttaattaagaataaaattctcaataaatattaatataaaaataaataaagaataaagaataaagaatttctaaaaaagtaatgcatagacacttatcaaactgaagatccaaaactaaataatagactactgtgatgcattctcatgatagataagagctaataaattttacctttgtcaaaaatcaaagccaaactcaacctccaaaactctatgattctccatggagtgaatcattgagaaggaaaaatttaaatagttgccttggtcagcatggacggtaaactaggttattataatttcaattgcatgaatgcatttatttagggaaacttacaaaaatactaatttttttttctaatctttacaaagatactgccacacggcagaaattttttttatactttccaggcccatttttttttcttttatactgcccaggcccattttttttttttcttttgtattgtgaacagtaacaagggacaaacgacgcctccttcttcattggaaatggacagagcaacaacacaacacctgctgtaatcccaaatatcacatccacaacaacaccatatcaagaaaatgtggcaagcaacaacagaatcatacacactcgaacaccaatcagaataaggaggagagtcaaaaataagagaatttgagaacgtcaaattcgacatagttgactatatgaatatggttgctgaagaaatagtagaaaaacttgaaaacaacagtaaaaaactagatccagaaattgacatcaacaacgcaaatctaataacagacaaacactacccagaagttgaaaaaagtcaagcatacaaagacaaaactgaagtatgtcctcagctactacgcaatcaaaaacaacttccaatacattttttgaaaacatatttaattgggtttcagtaagaatttttttaatatcttcaataacagagtaataaccagaggttataactctagaatggtagtattccgatcgggtgtacttggatttccgatcctataaaaaaacataagaaaacactattaaaacaaaactaaaaccaaaaaaaataaaaaataaagaacataaaaaacaagcataaaaaaactctggaatggtagtattccgatcgggtgtaattgaattctcaatcctataaaaacataagaaaatactactaaaacaacaaaaaaaaataataaagaacataaaaa

SEQ ID NO: 121880 - DNA, 2501 bp, Cannabis sativa
  modified_base (936)..(944): a, c, t, g, unknown or other
  modified_base (2468)..(2474): a, c, t, g, unknown or other
tgagtagatctaagatcctgggaaaggagggttgaagacttgtcacactcctagtgatcattcttgcatgaaagaccacgggcacacgagagtcctgttgaatatttatgtagaaggattcgacttctaggaaggaaggacgaagttgcgtgaaaattcaagctcagacctcgcttgaaaagatcaaaggagaacgcatcacgaggagtaagacaaacttcaagcagtcctttcattcttggaaaggagggttgaagacgtgccacacccccagtgatctttcttgcatgaaatacaacgtgcatgcgagagtcctattgaatttttatgtagcaagctttggcttctaggaaagaaggctgaagttgcataaaaattcaagctaagactttgcttgaaaagatcaaaaggagaaaaaatcacggagagttagacagacttcaagcaatcctttcattctgggaaaggagggctgaagacatgccacacccctagtgatctttcttgctcaaaaaaccatgtgcaagcgagagttagacacacttcaagcagtcctttcattattagaaaggacggttaaagaaaagccacattcctagtgttctttcttgcttgaaattcatcgtgcatgcaagagtcttattgaatttttatgtagaaagcttcagtttccaggaagaaaggctaaagttgtataaaaattcaaactcagacttcgcttgaacagacgaaaggaagacagcatcacagagagtaagacagagtttaagaagtccttccatttcgagatggaaggttgaacatgtgccatacccccagtgatcattcttgcacgaaaaatgtcatgtacgcgagagtcgtgttcaatttttaagtagcaagctttgacttccaggaaggaaggctgatgctgcataaaaattcaagcttagactnnnnnnnnnaagatcaaaggaagaaagcatcacggagagtaagatagacttcaagtatttcttccattctgggatggagggttgaagatgtgccacacccccattgatctttcttgcacaaaaaccaacatgcacgcgagagatattgaatttttatgtagcgggcttcagcatccaggaaggaaggctgaagtttcttaaaaattcaagattagactttgcttggaaagatcaaaaggagaggcgatcacagggagtaagacagaattcaagcaatccttgcattctacaaaagagggttgaagacgtggcacactcctagtgatctttcttgtacaaaaaccacgtgcacgcgagagtcctgttgaaaatttatgtatcaagattcgacttctaagaaggtaggcgaaagttgcatgaaaattaaagcttacacaaagcttgaatagataaaaagagaatgcatcacgaggagtaagacagacttcaagcagtcctttcattcttggaaagtagggttgaagacgtgccacaccctagtgatctttcttgcacgaaaaaccacatgcaccaaagagtccttttgattttttatgtagcaagctttggcttccacgaaggaaggctgaagttgcgtaaaaattcatggtcaaacctcgtatgaaaagatcgaaggagaatgcatcatgaggagtaagatagagttcaaggagtcctttcatctaggaaaggagggttgaagacgtgccatacctgaagtgatctttcttgcacgaaaaaccacgtgcacgcgagagtcctgttgaatttttaggtagaaccctttgccttccaggaaagaaggctgaagttgcataaaaattaaagcttagacttcgcttgaaaagatcaaaagaaaaaaggatcacgggagtatgatagacttcaagtagtcctttcattttgggaaaggagggttgaagatgtgccacatcccaagtgatctttcttgcacgaaatatatagtgcacacaagactcctgatgaatttttattagtaagatttgacttccaggaaggaaggttaaaattgcataaaaattcaagcttagacttcgcatgaaaagatcaaaggaagatagcatcatggtagtaagacagactccaagcattcctttcatttttgggatggaggcttaaagacgtgccacacccccagtgatctttcttgcatgaaaaacattgtgcacgcgagagttcctattgaatttttatgtagaaagcttcagtttccaggaaggaaggctgaagctgcataaaaattcaagctcagactccacttgaaaagatcaaaggaagaaagcatcacagagagtaagacagacttcaagaagtccttccatttcaggaaggagggttgaagacgtgccatacccccagtgatatttcttgcacgaaaaaatgtcgtgcacgcgagagtcctgatgaatttttatgtagcaagattccacttctaggaaggaaggctgatgttgcataaaaattcaagcttannnnnnncttgaaaagatcaaaggaagaaagcat

SEQ ID NO: 121881 - DNA, 964 bp, Cannabis sativa
aaaaaagttttattttcattttaagagaataaaaaatagtaagaaattgaatggtttacatatttactttgggggtattatgggttcttccccaaacaaagtttcatgattaaggtaagataagaaaagtatgaaatagaggagacagtttatttccaaccaaccacttgtttgtcaccaattaaaggtagggacccatttttgcacaagtcaatctccttctttatctttctttttactttttacgattgaggtaaagcaaaagaaccttgcaatagtttataataatagaagagagaggaagatagttttttagtgaaccttttcttttcagatgagtgggaatttaatttaccaccaaatgggaattttaattcaactcatataatttaatttgacattgtaccactcctctttctttcatggttgttgcatttattaatcacaagacataaattatatataagtgtatcaattgtataagattagattctggtccatggaatttgttccattatttctttacataacaagaagctggcatttgtttagttaatgaaaactattattattatttttttattttgcagagaaaaactatattgtatcctctttaagctttcaacagactagttttgaattgcggatattataattatatgcaaattttattttatccttattaatttggctgggaatgtttggaaccattaaggtaagcatttaaatgagtaatatacactgtgattgacaaagcttgggttgaatttgagtttatttacaatttcatcataggtatatgttgaataaaatccacttataaccagtccttttacaaacaaaatatccacatcagcaaatacaaacagaaataaaacaagtatgactcaatcctagggtggcttcgcctctagtggatcaagacttagtagttagttacaactgaaattgtaactaactccta

SEQ ID NO: 121882 - DNA, 1829 bp, Cannabis sativa
ctaagttgaagggaggtgcgggagccaaacagtatgctcaggaacattctaagcaggagggcgaggctaaagaggagcaggagataccgctcacaaggaggaagaaacttctgactgggcataggcccattgaacatacgattcggatcagggagcccagtttgcctgctcggccgtccactcctatagtaggaaaggggaaagccgccctggaggagcaggaaaactcgtcgaatgatgatgctccatcaggtcctgttcgggcagatgtttctgccaatgcgtaggatacaccatcttgcatttatctttctggatttttgtgctactatatttctcatgattttccctaaccgtgttgctttcatttcgtgcaaacatgtcttagaaaatgctcgaagctttgaagaagagagtgggaggaagctcgggcttatctcctccggttattgatctagggcagtgagacaactctgtctagagagaaggcatcgactgaagcggttattgatctctccgaagaacaaactgttatggatcctcctatctcgaaaatgactaagtccaaggactctctaggaggtagctcggataggccagagcaatcgaaaggcaggtctgagctaatcaaggcacctaccccacctccggtgctacacccggagaccaaaagaggcaaagacatgctcattcactatgtgaccgatcggtccctgaggtgaacaagaagctggttggagtagacaatgacctttcccttgagttggtgatgggaggagctttgaaggagtttgcaagggtaattctttcttgacagattccttttatccttctttacttagttcaaattttaacactctttctctgtacagactggtctgaagatagcttacgcttattcccgggccaaatctgatgcttctaagaaagtcgccatttccaacactatgcgggcagaagtggatctggctaaaaaggacgttgatgaagccagggttcagcttggggctgttcggattgagctgggagaggtcaacaagaagcttctttctactgagaagaaagtggccgaactgaccaaagatcttgaagattccgaccagcttgaagacgccatttcctccttatccaaagaagtgaccagccttcaagaagaaagggaggttctccggactgtctttcgtagtttggaagcagagaagaagtctaaaagaagtacaaatcagaggccgagtagcagaaaactgaagtggcgaggcttggagggagagtaaatgccttagagacagcgggtctcgagattttttatgacttctggaaggctaatcccaaggcaaactttgattacttgggcgattccaaagacatgtttctcgagtattgcgcttctcaggtggcttatggagaatttgaggtgaccacttctacctctggctaggtagttgacatggcccccacccagacaacagatcctccagctcctaccggcctagaggacccgtataaagagcctgggactccagccatctgaatacttctcttttttatctttttcttttttatctttttcttttttatatctgtccggccataaggccttttttaagataaagtgtccgacaaagcagtttttaaacttggaattttttttttcaattttcaggcaatgggctgaccgggcagcctttaatcccgattttacatgattttgctatctttaataaatttcatcatctgtttataatcatcgtgcaattgtgtttgttttatttttaccacatgctttgtacaggtataggtgcccactaagtgaccgagcagacttatga

SEQ ID NO: 121883 - DNA, 570 bp, Cannabis sativa
tcattatgttgtgtataatatgttaaagaataaagttgtaaatatagtaacctaaaacaatcatgtgtaataaatatgcaactccttaatgcatgattgggttgatgttattatttcgccaattctcatgatgctaccatgtgagtattcgattaaacaaacacgttaaatctagtaagaataattataacataaatacttaaagttttatgttggtataaatttaataaattttttagcggcataagtactaaatattagtaaaactataattttcgttcaattttaacaatttagagtctgttttaaaatttattaataaaagatttaaaaataactcatattacatattttcattcaaactcaatcatttagaatttgaacgtgcatccaatttaagacactaactgatgaaattaaatggaaatgatactttcactaatattgaatacttatgccgttaaaaaaaactagggaaattatagtaaatggcccaaaatcataggagtatgttagtttatgtcttcttttcaaaaaaatatagcaaatgatcctaaatcataagactat

SEQ ID NO: 121884 - DNA, 944 bp, Cannabis sativa
  modified_base (173)..(184): a, c, t, g, unknown or other
tgcttccatgtgtaggtaaaggaaaggcaaaagctgaattggagtgagcctgagttgggatgaggttgtacatgtcatggttgcgcgacctggagtgttcggtcttgggacatctagggatattattttgtagttactatgcgacctggttatgtattttggcatattttgtnnnnnnnnnnnnaaacgggatcccggtgtttgtaaatgactatgtaaattataaagttaaatatttattatcaaagttttaatatgacacgttttttgagaaaattctttgattatcaaagataacactgtaattgaaaaagcactctagcgtgccttagcatttgggcattataggtcatcacggaggggtcaatttcgaccatgtctctatgtgaccatgcaaaaaggtctaagtttgccctaagaattttatcagtattgatttaattttggcgctaaacctttcccaatctttagtcttctagctgcagaagttggatcaacctccacttcctccaacttttctatagatctattgttgtctataggatccccaaagcgaggatctatgtatgtctccccgctttgggctggacttcatttccctttactgggctcttcgtcagagctcttcgcaggcattttctctttcttggcttttcttagctttgtacaagccaaattgtaacaatgacgcgcagatagttggtctcctcttaaacatcctaccccatgccttattgagaatttcaggcataggtggtaaatggatgttactacctccaagtcgtatagggctagttatactatcatggcattaaatgccgagggaacgtcgattattacaaattatgccatcagagttttggtggttggattttctccaacagtgaggggtagtctgatacactcgatgggtgcaatgccttggccaaagaagccatacatca

SEQ ID NO: 121885 - DNA, 832 bp, Cannabis sativa
attgggtaaatgtaggacttttaggtcgatggctttaaggattttagaagaacaatgattttttgaggattttaagagtgtgccttttagcttgcattgaggtataaatcactttatttatgtatattagcttgtattgtattatttttatatttgtatatttttttagtattggtgatataggggttcgaatttttgggttagtgcacaaaaaactagcgacgatgctcaaaaaaggagcagtggtgctaaaaatattaatccgaaaatattataagatgcaaattaaataatgtgtctaaagttagcaaataatattttgattttagttacaacactgtttagtatagtattaaaattgaatgtttaatattataaggtgcaaattaaattagctaggattgtcgttgcgacgaatggagaatatgtttgttaaaggagtttgaatatcttaaatattcattcatagtgaattaggttatgaaattaaatgtgtacaacttttgaaaaggtggtgaattatgtattgttacatgagacctatgattattttgtattattctggattgtttgtagtaattatttgtaggttcaaattttgtttataataaattataaatactaaatatttacttgatttcactgtttagatcgaagaagcagtacagtacgatggtgaaatgatataaatatcatttttctaacttatgatttataaacaattaagtattcacaaaataacctatttttgaattttgaaaatattatggttagaatgtctataaaaatatctaggttaattttaaaattattaattatttaatttatcata

SEQ ID NO: 121886 - DNA, 2211 bp, Cannabis sativa
  modified_base (752)..(752): a, c, t, g, unknown or other
  modified_base (1489)..(1489): a, c, t, g, unknown or other
acaatccaagtttttttattttattttctaaatggtataccatagtatagaaaatatatataccataatacaaaatatatataccactggtagaaaaatttgactgagactttgatctttatttgggggtaatcattgtaatttggagatgtaagaaaactagaagaagaagaagaagaaaatgagcaaaacttcatcgctttcgattatgaggctttgtcatttagattttagagcagagcttctatttttattttgagaatgaatataatgttaataatacccttatataactaagggtattttaggtactaaaaaataataaagatcatttgctatattatttttaaaaagggacattatgcttcattaaaaaaaaggataaagggtcatctactactatttcgcattttataaacacttctatcgtgtcagccgtgccaatattttaaagacgacctgtaagcccatatttttgtgacgtgctttacttgggccgatccgtttttcataaataggccaacttgttttcttatacatgtcgaacttaggcttcactttttcactatttttttttttacaattaaattaaagagttaatcactaaattatatgtatttttatagttttaattatttttatataattttttaacaatactttacacataattacataaaaaattaattagaatgattaaaatttgaatatttattagtaaatgcatatgtattatattattattattattnttattattattaaattataagaatttttgatgtgttgtattttcgggctagtctattcgtgcttacgcgtgatgtgtctttagactttttcatgtcgtgttgtgctaaatctcatttttttcgtatcgtgtcgtgctaatttacagtatcatgccgtatcgtgcccaagcccatatttttttgtgtcaagtcgtgcttgtgcctcctgatgtgtgtcgtttaccacaataaatttactaatttttatttctatattaccaattactccagtattacagtaaatatagatcgatctcagaaggatattatcgatttattattcaaaaaattagtaataagaattgaaaatggaattatgaagattaaataacaaaaattacaaagcaaatagaatgagatactatgatattcaagaaatagttaaaagttaatctccactctcaaaaatcatctttaatttctaataatggatgttattttagatttctaatcgagctattaatctcgcagataactctgaagcagtcaatgatctcaatctctctattgtaagtaatcaaggcaaaacgctcaataattaactcttctacctaagtagtaaattcacgaagcatgtaatttatttaacttggataaaactttaagttcaatagagatagactaatctagacaataaattacgaaaccatataattcatttaacctaggttctattcttcatcacaattagaaatacntttgacaatattagaaattacaatttatcacaaacacatagaatcctaaactattacgtgaatagtaatcctaagataacattagattattaaagtaaaatagcttaaaaaataataatcacactaatcaataatttaaagaatcaatttaaaaatattaatacataaattaatcatatttataagataaatattttgtgtcgtgtcaaaaactccaacccgtatttataactctacctataataatgaaacatgtggatagggagatgagtttcaattgtggtgaacaacaatgttcttgccaataccacgtgttgtgtggtgacatcctttctcgtttggttcaaagattcgaaatccaccacagtcccttttcaaaagagattaaagatttgactcttttgaaggctagtttattgtatgtggtgttatctgtgtgatgagaactcttgaggtagttattaatggcctaattaaagcagactgaggcataagactttataattgacatgtggttcctgggattatcaaaatgacggaaggaatgagaaaaaaaaatctgcaccacgtgatccctatttagttagaaaaaaaaaacaatgttcttgccaatatgatgttatattatttatcaataatataatgtgtagattaaatacatgtaacaaactaatatgtaacatatgacattatatattatgtgtcatcattttgtaatattt

SEQ ID NO: 121887 - DNA, 1014 bp, Cannabis sativa
ctctctctcctctctctctctcttcatgttaaaaatgtcatctttttgttgtttggtggtatttggttatttattaatgttgggtttttggggtgcttgcataattgagattttagtttaaggatatttctattgttgtataaaatgtaagtgtaaccacttcacttttgtttcattactttaaggatcatatgcttcaaactaatggaactaaacaacacatgattcatcttcttttgggttttgcagaatgatgcagtcccagctgcctaggatgaagctgaaacagttgtctttcccaatcattggtaataatagtaaaaaaaaaaaaaagcttacttacaccttttaaagtttctttctttttggtgtttgatttgcattttggtatttccatagaaaaggccggagattgtcttatggtattaacttggcatcattggcttcaaagggtataattcatgtgaaagacaaagtcttttataacttaaactcttatgagcttcaacaacatggtgcaaatgcaatcattacaggtaagtaagttataaatttgagctttaactttaaacattagttgttattttcattaactaatttagttcttttcagagtccttgtcaggagttcctcttgttattagaggaaatgtccttgaatgggcttcaacaatatcaaagacacaatttaacaaactcttaaagcaggcatgtcttagctctttgctttggctttattgctataattatggttggattgaatgaattataacaaactcttcattgtaccttgatatgagaagagagactctattatcatttgtttagatagttattttcttcaatagcatatctttgaatagttatgcatgatttgagtagaaaacttaagaagggtagctcaaatgatcaaacatgtggttgctcccacaaggtccaagattcgagtccattcgtggtactaattgttatagtttcctggtctccaaaaaatgtagggttaagacaggaaccc

SEQ ID NO: 121888 - DNA, 1339 bp, Cannabis sativa
aggaggaggaggaggaaggaagtgagggccttgtttaatctcattgtaaaaggtttgtccccgccctgggcaaagacagtaaaagaagtaaggcggaagccaaagacaagcttcttcagcttgctacttctaggagacaaagctcaaagtcatctgggcagaaggaaggagaatctcaggaaactgagagactaagtaggcggactactcgttctggtagggagatcacaagctctcaacctctgccaccaaaaccattcaatgctcctcctcctcaactgcccagagacgggaccaactttcctccctttccacctttaagggtcatcttgcctgtttgccctcctcgttgctagaataagatcttgttcagttggatatagctaataagttctttgtgaagaggttcaatggagagtttgacgatgcgaagaggagaaccacaaagctctaaactagacgaggggcagagttcacaaattcaacaagaaagactgagcctcttcccccaatttttgaccgtccagctgtcactgagaatcttaggcctagagtgggtttagatccttctccgttcgtggcagatttattggaccaaattcgagtaacttgtagtaggttgggttctgataaatttgcttccatgaccaatggagatccaactttcatgctcgactgccttaagagccaagctattgtagtaagtttgtcgatctttgttccaattgtgatctcagttattttaatttgtatttaaccatgagtaattttttccataggcgagtctgatggcaaagaggtgttcttctttagtgaacaaactaacctacaagatggaaatcttgaaggccgaaggtgctaactcaaagcgaaaaagagaagagatcgtcaaggctctgaatgaggccaaggctcaatttgatgcttttgtcaagcaaagggttgaggcttcccttaatgctactgtggccaattataaagcagatgccaagacggagagggatcatgctgagaggtacaaggagttatacaaccagagaaactcttaggcgtaatatgggacaacatttatagttgccaaaatatatacaatattctaaaatattattttttttttatttctctccaatccacataagatttgtcacattttttttaaaaaaatactcgacaactctaaaagttacccaccatagtctcatatcaaattaaattaataattttttaagttaaaataacttttttttaataaaaaaatgaaagaaaaaaatatcatcataaaattaaaccacattagatatgtagagcatgtttggtattgttttctattttttgtttt

SEQ ID NO: 121889 - DNA, 1064 bp, Cannabis sativa
ctaatattttgcaggattcagtcataaaatctgctgcctatacccggagatctcgaggtgaggctgcaaaaaaaccaaaccgaaagtcatggaagcaaaggacagaaatgtatatgaaaccatttttactaaacgttttcttctcaaagcgatttgtgcatgcaaaagtgatgcaccggggcaccagcaaagttgtatcagttgccacgacaaatgccaaggatctaaggtttcaattgccatcacttacagataacaatgcctgtaaggttataggaaatctgattgcagagaggtcaattgaagctgatgtatatgcaatggcatttgagccaaaaaagaatgagagaatcgagggtaggcttgggattattcttgataccatcaaagaaaatggtatcattattaactgaaaatacccgtcttcttatagagtagggctatattttatggtatttcctagaaacaattctcttgtggacaatcagctttttaagagctaataataaagcatcataaatgaccaaaaaaaaaaatcactgattttgtgttcttaatacctcccacgttatacgattggattggatcattcccaaaattatcctttcatccttgactgttgccaccttagtgaaactatcattttattcagaagacgaaacaattaatataatggattattgatcgttcctaaacatgacaccaacaagctctcaatctagatgaaattcttatcacattaaaagaaaatattattcatgtaagtattacgatctgtcatgtaagtagaggataagcaagaataataatacagtaacaataataatgataaagagatctcatttttatgtaaaactatgaccccttctaaaacaataataaccaatagaatccaaaaacaaaaacttgcaaattgaatactagacctgtaacaattaacaaagataattttagtcatcgtcaaacaccagaagtgttgtcgacattgtcccacatagaataaatggtagaaaattgaaccatatataagaacaagggctactccactcattgccaattggttt

SEQ ID NO: 121890 - DNA, 746 bp, Cannabis sativa
agtcggggttcaacatcgtagagtgagagagttagagtgaaaatatttttgaaatgtaagagcatttttagaatgaaaaaaaattaaaagtatacataccatatttctacttgggtggtatattaaaagatcatactatatatttaagcatgttaagcaaaattttctttttctcttatggttatctttctattttattttttgttttggtttttttagttgcgtttaaggtcaatgaggtagaagttgccttttattaattatttaattttttttatggaaaattttattttaagataatcttatctcataaatattttggttactaatttctattagttaacattaaaacaatcatttcatgttttgatttttaagttatattatgttattttgttgttttaaggtacactaacttatttttttagaaacttctatattgaaataaaacatatttaagatactaataagttataataaaatataggaagttaccatatatgtagcttatttgtaaaattattataatcatattttttttttcttgttttggtattataattcaactgaaacatcgctgaaaaatagaggtagtatatatgaaaacgaccacttcgacgagtacatcacactcatgcctactatttgtcaaaacagtgcacgatattgctgaaaattcattgaaaaggggcagagctataaaatcgtcactggaaaaagtagtgggctgggcaaaatggcttagt

SEQ ID NO: 121891 - DNA, 1632 bp, Cannabis sativa
aacttataaaaaaacatagtaaaaaaataaaaaataccgcctagctgtatttttgtaaaaaaatggcaaaagttagtataccatgtaaatttcccaagataaagtccaacaagtcatgcaaaaccggaagcctactatcaatattttattacaatcttttaatcaacttttaaaaatacacatcaaaatttttatttttttcacactaatgaacgttatagttacaacatcctcccttaaacttttaataattttcgaatagtatacagtgttaaaaatagatttaaaggtttttgaacacacatgaaaaattgaaatattagtaattctattttttgtactataaattatttaaaaaaatttaaaaagttatagaaatgatattgtaactataacaaatactactgtaaaaaaaattcaacatgtaatttcatgtgtaaaaattgactaagaaattataatataatgttgtaattagcactcctgagaaaataaagctacacaaatctaataagaaaatgatcaaacaacatgtcgattacacagaagagcaacaagctcaactaaaaatggcacaacgctaaagtctccaagaacatagggaaaaatacaattattacaataaaaaaagacaaaaccaaccaaacacaacaacagtaaccgacttgcacaaaaaaaaggtttttatctacccagacaaaatgacccaaacattgcacgccactatgttgtgataaatccaacacgtacgtaaatatacattctttttcctcctatgtgatgacagattataaattaacttaaattttttttttcagatcataaaagtcctaaattgcatgtcaactaccgcatctttgagatagaataacaaacaattcgcattaagcaataatctaaaagtcacataagctatgtctattcatcaaatcttaatactctcatttcacatcaaatcttatgtctatttatttagaacattctcaatactcactttttagattttgtactgagatcatatatcatggataaggtggccaatcaaacacatagtacaaatataaataaatcacaataatagagaaagaaagaacaataaaataacactaatccataaaataatctcagtcaatatccatcaaatccttaaataaagagtttagctcataattaaatccataattaagctatacacaaataaaaacataagaaatcaagagaagagaagaaaactagatggaggattgtcacggatcgtccacgttcacttcaagagccttcttcttgtgtttttagggttctattctgtcattccttttataattcacgaccccctttcattaaatagagtttttcagcccaaaaatgagaaaagacgaagttatccttaacttgtacggagtcggcactgtggtggccaatagcctcaccgcggcagctgtagaatagtgaaaatgggattactgtactccctcaccgcggccaccaaaagcctcgccgcggccactggaccctttttttctacttcgatatctcccaataaaatatgtataactttcacatacaaacttcaaatgagttgatataatatgcgttggaaagataaaaaagagatctaaaactttaatgttt

SEQ ID NO: 121892 - DNA, 2538 bp, Cannabis sativa
agttcctggtaaaataacttccaacaagtacaacatgaagcttaacccccttaaatgttctttcggagtaggctctagaaaattccttagcttcatagtcaatactaagggaataaaagcaatctcgaacaagatccaaggcttttcagacttgaagttgcccacaataatcaaagaagtacaaagcttgatgggacgtattactgcactaagcatatttgtgtccaaatctacgaacaaatgcgtacctttcttcaacattctcaaaggaaataaaaaatttgagtggacaggggagtgtaagaaaccattccaagagctgaaaaagcaactatctcaacctcctgtcctatcaaaacctctgaacaatgaaaagctaggggtgtatctggctaccacagaacatgttgtgagtgcagttttaataagggaagaagatggtatacaacatctagtatactacgtcagcaagagactgtttgacacaaaagttgatacccactcatggagaaactaacatacaacttactcgtagaatcaaaaaagttaaggtcgtacttccaagctcacccaataagggtgtacaccgaccaaccattactacaagttttgtaaaaaccttaaacatttgaccgactacttaagtgggccattgaacttggccaatttgatatcacatatcaaccgagagagaatagctataaataaaaaaggccacaagcccttgtagacttcatggctaaatgtacaagcatacctcttgaaatctaccacgatttaggagaaaagtaagagccagagaagaagcgagagcaagaacctaaagaatcaacatggaaactacatgttgatggaagctgcactaaccaattgtctggtataggcattgccctcataacacctgggggcaatagctgcacagagcaatcaagtttggcttcaaagcctctaataacgaggttgaatataaagccctgatcattggccttaagctggcacacaaagtacgggctgaccacctggacatatataacgactctcagctagtcataaattaagtcctgagtgaatacacaacttgaggtgaaagaatgatggcatatttaagcaagatccaagacttgctaagtcggctcaaaggctatacaataaggcaaattccaagataacataatgccatagcagatgcacttgcccatctagcaagcaacaccattatagacaaggtaaacttggtgccaatgtagttcttgaaagaaccaagcattactatcattgaagaagtcgatatgttagacaaaattccaacctagatgacacctattacaacttaactccaaagtggagcctttcctaataacaaaaccgaggcaaaaaagatcagaagaaaagatgctaggtatctaatcctaaaaaaaagtaatgtacagacaaagcttcttaatgtcgctcttaaggtgtgtcactaagatagaagctgagcgtttaatgatagaagtgcatgaaggcttctacgtcaatcatgctaggggcaaagcctatccaaagagatactctaataggggtacttttggccaacaatgatcgaggattcgatggactttgtcaaaaatatgacaagtgccaaatattctcaaagatatctagagctccacccaataagctcacaaagatacagtctccttaaccttttgctttatcgggaatatacttaattggtcaactcccaaagggaaaaggaggggtgcagtatgccgtagtcattgtagactactttaccaagtgggtagaagctaaacccctaacaacaataacttccaagaaattccttgattttgttgtcaagaacatcataggtcggtttgaaataccatagaagattatgtcaaacaatagaaagcagtttgacagtgacatgttcactgatttctacaacagacatgacatcatcaaaagcttctctgccatggaccatcctcaagcaaatgggtaggtagaagctatgaataagaccctcaaggacaccttgaactgcgattattaaattcaaaaccgcaaactataccacaccacacagtttggcaaaaatacaaattgtaactttactataaaaaatttcaaactatattttttctatgcagtatggtgtggtatgagtaatttatatagtatgagcagtttgatgaacacgtataaagacaacaactataatgatttaatttttcacttttaatttatatattatgtagcacgtgttagactaaaaataatatgaaaataaagtatatatgaacgatatgtaaagcggaataactacagacatatcaaaatcttatattatatgcaataaaaggaggaccgaaatacctccagccattgatgtttgagcttcaatccctgtgatagcgtcagtatgggaattcaggcttcctcgctctctgaactctctttagatagaatttttctgtttgcacggaatgagtgaagaacttggagaccgagaccctatatttataggtgagatactccatcagtatc

SEQ ID NO: 121893 - DNA, 889 bp, Cannabis sativa
ttaaactaagcgggctttacaactttagtcgcctgtgtatgtatttctctatagccaacaaccactaagtaattgccttataccttatttaaggaacccaaactcttcaattgatcttttatcatcaccaatttcttctgataccaacttgcttgagctgaaggtttataggtccaccaatccttatccttaatgtagacattgtgaacccataggttgtcttccttcttagcaatagcccaaacatatttgaacaacgcagccttgttccaatctgaaatacatctgaatcccagccctcctgaactttttgattgacaaatcgaagcccagacaactgcgggaacacctgttaatgtgtattgtccattccataagaaactacggcagatggattctatttcactttcaattttctttggcagcatcatcacttggcaccagtaagagtgtatggccatgagtactgagttaatgagtactatacacccatcaaaggaaagatttctcgtgctccaagttttgatccgagccatcattttctccaccaatattttgcaatctgctgaagagattctctttgggcatataggcactcccaaatacttgaatggcatgtcttgcttttggaaacctgatacatccagaattctttgcacatctgtatcatacatgttgctacaataaacagctgacttaaagggattaggaaacaagcctgatgtgtgagagaagagcttcaatccctacaacatgtaatatatgctcttgtagtccccattgaaaaataatacaacatcatcagcgaagcttaagtgattcaactcaagacccccacatctttcatggaatataaaatctagccttttaccaatcttcctcattattc

SEQ ID NO: 121894 - DNA, 799 bp, Cannabis sativa
  modified_base (45)..(62): a, c, t, g, unknown or other
aaaaatattgcataaaatacaaatcaatataatacaatacaatannnnnnnnnnnnnnnnnncgttccaaacgagcccttaaggtattatttgcattttcctaataataataataatatttatttttttaaaaaaaaacaaagaaaaagaaaaaacatgttaggtcatcattgtgagtaatacttgttggtgttttatttttaagtaaaattgacatctcgtctagctcatttctaaaaaggatcatatgctgtggattggagattgtgtgatgagtgagtatctatgctgattctataaggtgattgttctccaattaattttgacagaattaattctttatatatagacacatacattcatacagaaaattaaacaaaggaaacgttgtacggatcatattattgatacttttcgtataattcttcatctgttctgtctctactctctagatattgcataaaggacaacaatatcatgtgaatgcagtgaaaaataaaataaaatttatatatatatataaattaacttagaatattactaaatatttttgaccaactatcacattcattatagttattgataaagatcgatctaaggagtaaaacttgtgtattaatatataagtatatatattttgaaaaattgttcttatataaatattggtaatttggggcataatctccttaagtggccatgtttttgcaactaacccccaattctaaaattttgatagtaaaacctcctaaactcaagttctgttagcacttagtcttttccatccatttttagctgttaa

SEQ ID NO: 121895 - DNA, 1594 bp, Cannabis sativa
cccccgccggtatttgtccgccgctaatgtgttttgaattacacccatttcagtttcccgcacttaattattagcggtgggctgtccgccggtattactaaatgcccgccgctaattagtattttatttattatttttttaaaaaaaaatcaaaaaaatagattaataccagcgggctcccacatccgccggtaataacctcattattaggggcagaccttccccgccagtaataggtccgcccctaataatcgaaattgttgtagtgttcagatttcatgcgttgaagatattcaagaacaccacctgtatctcttgctttcatttgaattgttcttttactacgtatataattctaacaatcatcaagaataaatccaagattctgacttccatcagttctcctaaccatcaagtctaaactagctttaggagcgattccagaactctcaactaaatcgatctcaacagcttgggcaggagtcaatgtcctcttggatcgatgcaaatgactcttaataggacttaaagtaacatgattatgctctgctatggattcaacaactttatattttcctatttgacgacaatttattttcatctttgccaaacatccaaatcttgtttcagcacgatgacgtttcacattaacattttgtttatcatttgcacgagtgccttcgcatgaacaacaaaaagttctatcatacattttccatcttaatttttatgccctttacttcttcggatgctaaaacttacattgtaagcataagtattagaaaaattgtatgcttcttcttcagtttcaaattccatactaaccttcggtatcacttcatcaagaatatttgtacgagttatgttgacatttttttcactttcaactctagtttcaacatatttgtcattatctttgaactttaattttcgacgtgagagaaaatctccttcatcaattttagtctccatatctatcatcactaattaaaaagtgaactattaattaaaacttaaaaaaaaattgaacactatataatcatctaaaatatagaataaataaaagaagcaaaaaaaaaaaaattgtgctaaaaatatcaaattcaaataaagctacggtaatcataatttgaagcttttttttttttaatttttaaaaaatctgataactaacataatataaattatcatcaaattttttttaacaatataaaatcaatcaatcaatcaatatattgaaattcgagcctatcataaaaaacacactatcccaacaatcaaacaaacaatacctctttttaaataaataataaaaaaattataaaaaaatgagctaaatgagaataaagaaaatacttactaaaactttaacctttttactttgtatgagattatctttgaggctttgtcagaatacttcgtagtatttcaagaaatatttgttctttgatgtatacttttcccaattcaaagtaatatgaaaaaaattaagtttaaacttaaaacattcacatatttatattttactagatgagagttacgtggcgagccacgtaatattagttttttttataagttctagtagtttttattt

SEQ ID NO: 121896 - DNA, 1988 bp, Cannabis sativa
  modified_base (1947)..(1949): a, c, t, g, unknown or other
ttaacaaaacagatggtctaattagtaacttttgcaaaacacaggatctaaaatggtatttaccctaaaaaataactataagttgaaaaacaactaaaagaatacataaaaataacaaaataaatatacatatgtacaataaaaatattacctgaaatagaccaaaatatacacaataaaaaaatacacataaactaaacaacaaactgtaccaaaaaaaacacataaaaataactatagaacaactacagaacacttaaacaacaacataaaaataactataaaataacaaaaagataattataatcaacagaaaaataaaaagacatcaatcttgttaaaatatacaaatcattcataaattaactttgaataaactataaaatatccaaaaaaaaactatatattacttttattaatcatataaaagatagaaaaaaaaaatagaaggaattaccttaatttttttaatagatagaaagagtgttaaaaaataagatataaaaatatacacttattatctatatatattatgttggagtttgactcaaattatttatttctttatttatttatatatatttgtaaagttatgatttttttggggtaattattaattgtggaaaaaagaaagtgttagtgtctaagttttaaaaggtcttcttaaggaagcttaatgtcttggtccccaagttgtcttggtgtccaagttttgtaactttataaatatgtattttatgtgttagagaggtatgtgtgttgaaaaatattgagttgtgaacagagaagtgtgtgagcttattgtgtaattttgaagtgataagtgaaatatatctctctttatgggtttggtatagttttaccaaattgagtaaattgctttgttttatttctttgttattttgctgcgcttgaagtttatcatttttttcaacaagtggtatcagagccaaaggtttaggagcactgtgatagtgggctgcatttgcgatgtgtgggagaagctctgaatgtgatgacctcacgactgacgatctatatggtgccttgtatcaaaagtcgacctgatattgaggtagccaggtggcgtgtctcgctgacgattacgacggtacaatatggcaatcagtgttaagagctatgtcaaaagtcctcctgacaaaggtaatggttaggcagcgagttccgttggtgatagcggcggcataaggtggttttgctggaggagaggccacgagtatgtggttcttagtttgaggggatgattgttggggtatcaatccaagtctcacattggaagaataggtaagagttgtcttggatataagtgttctacctactccattagtatgagaccttttgggaaggtgcccaaaaataaaatcgtgagggtctaagcccaaagcggataatatcatactaatgtggaagtcaaagtgaggtagcgacccgacaagatggaagaacaggacccaacaatttatatatatacaaagataaaaaaaaattgagaaaaaaataaaagaaaaaagaaagagagtgaattgaaaaatatatatatatatatataataaataaagagagagaagagagaaaaaaacttaaaaaaaaaaaatcagctaaagctgactaaaaaaaaagataaaaaaaattgaagttttaataagtaaaaaataaaaaataaaaaattaagtagaaaaagtataaatgtcaaaatttccttatcaaaacataaatgtaaagtttagaaaaaaaaaatagtatttggtgtaaattttctaagattaattgattaggacatgaaattttttgaacatgtgaacatatttttttgaattaaacttagcacctttattaactagcaattgttattatcaaaaaaaaaaactagcaattgttaataacaatagaacgcacttcgttggaacaatcctccaactgaagcannngacctgtagagaaacaagaatccctggctaaaacatgag

SEQ ID NO: 121897 - DNA, 2359 bp, Cannabis sativa
gctatcaagtgttatttgaaaatctacctagagtagattggagcaacattgtttggagccgattcaacattcccaagcatagcttcattttgtggttagttatgctttgaagaatcaaaaccaaagatagattgcaaaaatttagtattattgacaatgcttcttgtctcttatgtaatgatagaaatgaatcgataaacacttattctttgagtgttctttctggatgaattgtttgaagcaggtattgtaaaggaatggtttcattgggggactgcctccatttctctacatcggatcaccaagtggattggaaaagttaagataagtaagtttaaaaagaaagttatctcggttactttggctgcccttgtatactaaatttggactaactgaaataataaattttagaatggctcaatgaaaaatagtaatagaatagtgcacaaaattaaagatgtaatcaaaagtaaattatttttatatttggcctaaatatataactagtagtgaaaaagattaatgatattttttgtaaagattgtaaaaacattgtaaagattttataaatattttttgaatcctcttcaaattatagaatgtcattaggttatacaaattattttttggaataaatttaatgatattcttgcattaaaaaaatatatattttagttatcactgaaagcgaaattaatataacaaaatgtcagcggtacccatcatcactacggtgaggtaatgtatatgaacatagaaaataaaaaagggtcagcatttgaagcaaatcgaatgaggtgtttttctctccatataacagaaccatatacatagaataatttgaatattggggcgcatgtaatacttttatttattttatatcttgtgaagaacacttttttttttttttttgataagtatcttgtgaagaatttcatttattgttttttcttttagttaagattcgtattttttctttctctcctcttcccttaccaactcttgtagaaataattaatcatgaaaagaaatattatgtttgaagaaagaaaattatttatatttggacagacagctagctagctagctagctactcattctctactttacgtggccaatgcatgcagtgcaagaagcagccacgtacgtacgacgccctatatccaacaacaacacatgaaaaataaagagcattgccattattaatttgatcttctttctctgatattctctctctccctctgaagttatattaattaattcaataataataatattcgcgggcatatatacaaaatatttcataaaggtaaacttgcagaaaatattagttttgaagtactgcatcttaattataattcgagcatttcgttaaccaattattcatattaaatatttacattataaattaatgaaaaaaaaaaacatcgatgcaatcattttaaaaaaagcaggataagtgatgatggactggagatttataccttcatcgcaagtagcaaattaatattgtttcgactgatttatgttggcaaagttttggaatgagacaaacgaaactggttatatgttcaagatattggtcaacatttttgttttatatacaaatatatacatatatccattaattgggaaagaaaattgaaaaagtacaatgtaaaatgatccatgtatggcgacgtattcgatggtcagttgattattattatttttttatcattattattatattttgtaaagttgattattatttttttaattgttgttattacattttgtaaagtctatttttttttttgacagattatattcaaattatgttcagtttcatcaaagatgtttatctattgtaactagaagtaaatattttatttgtatccatttcaatcgatttttaagaacaattgttatgaattttaaaaattctgttgagtctcattagggttacaggtatatatagttagttatttttgtttaaagtctcaactaatttgttattctttttacaagtctgattgaaaaacttggaggtgttcatccatatgcctgattgagctaagttcagtctaaaggaatttcagttacatcttcatcatcagatctgaaaggatttcagattgaagcaaagcgttgaagatgagctctacacgtgcacaaagggatcttgtgtcttcgaccaaggatcttggttggtttggtaatgtttcactagattttgtaaaatgttgtattgtttaccatattgtgaactggtatttgtaatatacatctttgaatatagtgaagttattaccctatttcggggaacccaagcactagtcggctgagatgtgttctcagtgcagatgaagcttgtaa

SEQ ID NO: 121898 - DNA, 2188 bp, Cannabis sativa
cttagtgccatagctcttttagatttattagataataataaacatttaccaccactacacgtaattatatcttattattattagtgttatttaattattataaaattttatatgttttcatttaataataatattgaaaattaattgttaaccactcataatgtattatctattgattatatagagttagaacattttaatacaaaaaattgtaataacccaattttatgatttggttttaatttattttctccttaaatatatatacagttgtgctcatccaactaaattcacattatttcatttttggtacatctgaatgcaaatttcacattttaaattcattattttagatttggtaccttttcaatattagattatttattctttattaaaatactaataattttttcttatttccaaaatttgttaaatattaaaaataaaatatccctttttaatttatgtatctaatgaaaaaaagtaaattataattattcaacaacaaataaaaatatataaatagaaaatagtaaactccataaaaaaaaaagattttttttttttgtgtacgtagaaagataacattaattattagtttttaaatttttatttatatatatacataaataaattagatctatattacttttagtatataaacattaaaaaaggtttttatgttattatttttttatattaatttttttttattagattggatcggtcatttttataagatcaacattcaatttgtataagtataaatttgaaaatttttcagtccactgcaatagattagattggatttcatatttttttaacaatgttatatatattttttaatgggtactactttatttattcataaatagttattttaatattaactattacattaagatctaataatctatattaattaactatttgtcttaaataattcttatttaagattattttagattctatctactttccttattcatctttcatacctaatgacaaatttaaatttataatcttaactaatttaaaagtattgcaaagtattttttttttgccaagaagctttttttttttttgaaaatgaaataaaatttcattgaaatcttagtattcagagtacaaaagaaattcaagatcagaccatacattgtactcaaaaatactacgaccagagaaaaatcgagagtgcctagcaacaatatgggcaactcgatttactgatcgtctaataaaacgctaactcacataaggtaaaaaaacataatatagcctttttagtttgccattctttagaatctttaacacttattttttaaaaaaacataatatattttgtttatttttaatttttttgaaaaaatgtatatagccacccaattttgtctcattacaaaaaaagactatttttattctttagtaacaattttttagtcataattttttttttttataattaaatgtcttttagtcacaataaaaaaattacttgtgactaaacatgagatttagatacaagttgtcactaatttaattttagtcacaaatattgtgattaaaaacacatttatacacaacaaattatgatttttgtgactaatatttttagtcacagactttttagtcaccatgtacgaataacaatttataattaatcacaacttttttatttttagtcacacgttttgttgtgactaaaaataattttttttttatatagtattttaccttttcttttcttttttatttttcccatgtaagttaaattaaattaatttactctttcaaatagattatatgataacaaaaaatatatatttggtatttctaaaattaagataatttcaaaaaatagatcatatctaggtaaaaaaataataatgtaactaatgtaaacaaataaatgttagtaacttattctatattaagtcgctattttaacatctcatcacttttttaagttcatacataggtaatatctattaaaaaataattcatatatacactacaagaaatgtcatttttgccagcacatttttgtgctggcaaaagttagtatttggcaaaaggtggttggcaaatcaatgttcgtattagaacttttgtcagcataaaatgaaaagcgctggcaaaaaaaacttttcccagcgcgtaaatatgctcgtaaaagttagattttagc

SEQ ID NO: 121899 - DNA, 1118 bp, Cannabis sativa
  modified_base (149)..(153): a, c, t, g, unknown or other
  modified_base (1025)..(1034): a, c, t, g, unknown or other
ataaacgtatttttgatatagtgtaaaaagaagtatttttttatattttatttaattaagtagctaaattaaacataaaaatttaaatttctcttttattattcgctattagaccaaaatctattggtttaatatttttaaaattaatnnnnntagttaaatttatttagtacccatcaatgggtaatatccattaagaaatgtttcatatatatatatatatgttttatttaatctatttttactttgtctattaggtgcaatgttatgggtaataatttactacggagaaaaatagacaacatcaaaaaatgcaagtattcaaaataaacaagaatactcttttgcagaattgtgattattcacctatagtggtgaatactcgtacgagtatgcaaataaaaacaatataaatgagatagtgaattatagaggttcagtctgagcttggtctgtttagtccattttagaaagaatatttttcggtcccttattcaaattggttcaccccttatatagaaaacatgtgtctttttggattacataactagttagataggaccgttattacattaattacattcaattaagaaagaaaacgtttaaagaataaatgaaagagcagttttaattattttgattaattgtctgaacgtatgcgactagggaagttgcatatcggtcgttcatcttccaaacataccagctcacaagctctttggtgtttatttgtttataaggtttttggatcaaagataatttcggggctatcttgtaggtagaacacctgcgattaccttggtcgtgtagttgcgtattcatgtactgacaacagaacttacgagttcttgatgaattgttgtgtatttgtctttcggacaagatatatataaagatgctgctttatatataattgcaggagagatgcacttagttatcacatataattgacatatgcgcgactagtgctaacttcttttgatcctacttttttccttgactatgttgggctttgtgccctaaannnnnnnnnntttcaatgtaatctttatcatttaattatcaataaagagacagaagtattttcatcacttatttagtgtgtcatttggttcatg

SEQ ID NO: 121900 - DNA, 1240 bp, Cannabis sativa
gaaattagggcaaagggggacgttagacttcctcctactctgagtgtccgcgttccaagaagcatcatcctggggtgtgtaatcgaagagcttgttttcaatgtgggttaattaggcaccttaagaaagattttcctcagccgaagaaagattaacctaagcaagaagccaagcctactccagcacgggtatttgctatcacccaagctgacgctgcagccagcccttcagtagttacaggtcagcttcttattaacaacctcacttatactttttgtttgactttgggctacacgttcatatgtagcatcgaggtacttagccagttgggtaggcctagtgatatttttgaaatggggtttggaaccctgctacctgatggggagttgattatctcttaaaaatgggttagatccgtgctaatcggaattgagggcaaagaactaagtgttgatttagtggatttacccttggccgagtttgacattatactcggaatggatttcttttctaaataccctgccagtatcgattgcaaacaaaaaatagtgacttttcaactagagaacgaagaaccatttgttcatgttagaacagttcaaggttctcgtgtcccaagaattttggctctgaaggctatggatttactacgcagtggatgtgtaggatttctagcggttgtgattgattctaataagcccgtgatactcgaaccagaggaagtcagaatggttaaggaaatcttggatgtgtttcctgaggaattaccagggttaccaccacaaggggaaatagatttcattatggacttggtacctggggcaaaacctgtttcaaaagcaccctatcgaatggctctggcagaacttaaggagttgaagatacaacttcaagtctaaggtttacccgacccagtgtatcgccctggggagctccaattttgtttgtgaaaaagaaagatgggactcttcggatgtgcatcgactatcgggagttgaacaagttaaccattaagaacaagtatcctttacctagaattgatgacctgcttggtcaacttcaaggtaagacagttttctccaagatttatttgtgatcaggctatcatcaactaagaatccgagaagaagatattacaaagacaactttctaaagtatgtacggtcattatgagttcctagtgatgtcgttcgaattaacaaatgctccagcagctttcatggatctcatgaacagagta

SEQ ID NO: 121901 - DNA, 964 bp, Cannabis sativa
atatgcacctgcccttcaatattgggcatttgaggtcatgcaagttttcgggaagaagtatggccagtgcaaagggactcgattcccttgaatgttgaactggagtacccccgactcagtcacgaaacacgatgtgaagcaacctgatgtggctgtactgtttgagaaaagggtgtgtgaatctttgtctatttttgctgtctatttttgctataagtgttatctgtgtttatgtgcgatatggtgcgacatttgtgcgatttttgtgcgatttactttacagtacattttaaatgttcagttgtgtagtatattttctggcaattttatgaggttgttgtgcgattttatgcgatgtacttggcagtctcttataaatttattttggcgatattatgcgataactatgagatattggtgcgattttaaatgactgatatgtgtaatagatttttggcgatatagtgcgattaccatgcgatatttgtgcgatttctatgcgtaattttttgtgagtttttgcaattttcgcgcgacatgattgcgatattgatggcatgttcactttttgcagatggttattcttcaaatattgtatcctcggaatcaggaggttgattattggaagaccaattgtgagggtgaggtctccacggtggaaatgggcttagatgaggtcgaagaaacacaagctggggagcatgatttgactgcattcgagacctaagcaaaacgggtggcgaattatgttcaaagtgtaaatattattccaccatcctcacccaaaactacactagacccctccacatctgcaactgtgccccaacccctgctactgttccgccaacctctgctggagccaatgactccaactaccacttgttggcaaagagattggagaaggttgaagcgcaacaacttgcgattctcactgcacagaccaagatgaaggctgacttcaaga

SEQ ID NO: 121902 - DNA, 929 bp, Cannabis sativa
ggggggtctcgcatgcaagccgttgtgtgcgttgtgtaagtgtgttatggggattataaatataaggcgagaggtgaatgcacattgacaaggtgtgcaaggagaaagcgtataaccacgccttttgagaactctgaaagcaagaaggtacgagtagcggcgacaacgaacctgcgtggtctgaggatccgactaagagtacgctgcaatcactctcttgcaacctgtaatcggggaccacacgctgcagccactctcttgtaacctgcaatcagggaccactcacctgacactagacaagagtatgaggtgccagaccacctccaacacctgcgacatgcaacgtgaaagcaacgttttgtccccatgcgaccactttatacaccaggccattagagcctataaataatcccaccttagatgtgagagggggttggaaaaatcacttggtgtaactctggccttgaatgcaatatagagagaaaacaattttcagatatcttttcaccttcatctttatctttatcgtcatttgatttttgggttactttgtatattcgggctactagattagttgtcgagttctcatcgtcaacatttattttttttttttcattttttttaaatttgggcaagcccacatgatcttccattcaaagagtgtatatgtgtgtttatatatatacatagtcctcttgagcaaatcacaaaacacttatcttatatatttattattgtatatgagttctttctatctctcatgttcatcttcttcttccttttttttatcctttttttcccaagtctacaacattactcaaataaaagctaaccctgtctttttgtagaaggtaacaaaaaaaaaaagagtatgtgaaggaggaagaagatttggaaaaaataagagtgtggttgtgtgtgtgtgtgtg

SEQ ID NO: 121903 - DNA, 1128 bp, Cannabis sativa
ctttatggatttatgatttagggttttctatattaaagcacttttaggaatatgtttagatctgtttatatatttcttgagtgttttatcaaccgtaacagtctgcactcctgaaactatagtagattaacgttaagttaagaatacattaacaaattgattaaagaaattagtataattgtaattttgaaaggagatttattttatatgatttttatagttcataataaattcttgcaataagaaaactatacgatatatacaaatctttccaaaagccataattttgggtacaaattttattggaaaattttatgatgtactgatgcactttttttgagtttttaatataagaagttttaattttatttttttatatgataatataaattgtagttaagatattttgtaaattttttgaaaaatttaaaataatttaatgcattgaaaacaaagttctaacggtttgtaacactcgtgtctattttattttatacatatgtgaaatagacgatttgaaccgtacttgctatattgtaagttattctaaatttctcaaaacttttcaaaatgtcttaaataattataacgtcgatcatagaaaacatagacttagaaattctttctgatgccaaaacagacaagtgtggtgcattactcttagtagtccacaataaaattttgaaaaatttacataagagaccaaaatttaagaaaaaaatacaaaaatacgtcagtacagaaatatttttatttttgaactttttatttacaaaactatctcttcaataaaacaataaattgtgttcttagttgttttatagtatatttatagttgggtgcactcttaattgggtattacccatgaataggtaatatttagaaaatttaagtttttatgcttaattttttttatttaattagaaaaatttcttatttttacattatatggactgaggttgttccatcggttgaaaaaaattaataaaataaattttttgacaaaaaaaaaaagataagtttaacttaaatattttttatataaatatatttttgatatagtgtaaaaagagatactttttgatattttttttaattaagtagataaactaaacatagaaattcatt

SEQ ID NO: 121904 - DNA, 728 bp, Cannabis sativa
tggttttgggtgccatttaaatatgaatttcttccaagcttttgctacatctgtggaatcattggccacacagaaaacttctgccataaactattcgatacgccggaggaggctattgtcaagccgtatggggaatggctgagggctcaaactcgtcggaaaagctatttacttcattctcaatatcttcggactggtacggaggtggacgaccaaacatttgggccaagggaaccggcggctactgtcaacgccgatgaagaccctgtgccagctacaggtacgacgagcagaggtaaagaaaagttacctgttttagctgatggagggaatcatggtcatacaaaatctcaaccattttctcctaatatcatgggaggtaatcaagccccactattttctcattcttttaatagaaattcttttattgagaatattggtcaaaacaatttaaatgttcctaagactactaatttgttattggtcaatggggagaattcggaccacaagaggagaaggccgaatgacatttaccttgtggataatgggccgaatgaggtggactttatggatagtgggccaaatgatggtatggaggctgagttgattatttcttccaataatgctactctcccaaaaaatgggcttttggtgggttctggtgtccaggcccaccacgaattatgagtgttcttagttggaattgccgtgggcttgggaaccctcgg

SEQ ID NO: 121905 - DNA, 712 bp, Cannabis sativa
ttatgtaaaaatattttcaaatgtatacatctttgaaattaatttttttttgcacattttttgtaattaattaaaataatgtatacatttgtgtaaaatgcccattctttaaagttataaaagaaagttgtgtgatttatttaataagagattaccaattgttttctcacacattttgagcatcaaatactttttagaaaaattacatttctatcgtatctcattattttatttaatcctttcctatcaaaacttataaacaaaagtttttatttaagacaattatatttaatgatgcaaaattagtccaacatttcacacacaatataaaattttaatgagcatattttgttccatttaagtatacattttattcactttataatcgttagattaatagttgggttgatcgagcagttattaattattaaaagaagaatatatcaaactaaacttagagtaccttcaattttgatcaaataaagtatactaaaacaaaatttgctgtaaatgacggaatgcattctatttttttttttttttacgataacgattcaaaatccattccaatatacatataattttgttattatttgttaaaaatatatttttattataaaatattagtattatgtaatattataatttagagaaagaaaatagagaagagatgagaattttctgagtgatttattccaataggtgatctcct

SEQ ID NO: 121906 - DNA, 1251 bp, Cannabis sativa
  modified_base (625)..(627): a, c, t, g, unknown or other
taaaaatacaaaatttcagccgggctaggtgaagcccagcctctggcaacataaaaaataaataagcctgagagcaggcgataagcttgcgggaatagttggtaaggcgcaaggccgacaaagacaaggaagttaataaagtaatcttgaagagggagcatggccccggacatgagatgggtctggctctaggctccaaacccccagtagttatgattggacgtctcctcgtcccgaggcaggcggtgaaagatcccagacgcggatggcttgataccagccacggtcacaatcttctccagttggtgagcgcaaatcaaggtggagcgaagctcgtccacctcctagctgttggcacgggaagtgtagctctcttaggcaacagggcccttcatgacttcctccagggtggccagagtggccgcccccttcttagaagactttgttccagaggcaggagaagacattcttattctgaaaaataaaagaaggaatccagcagttaggccccaaaccaaaccctaatgttaaaaaagggaatgggggtcccttaactgctggaaagaggcccccttcggatgtttgccaaaaatggaaacccaaaggactttccttagcaaacatnnngtgcaaaaatcccaaaggcagcgaaagcagaggaaaagtgaaagaaaaaaaaacgtgcagaaggtggaaacaaaagtcgccccatgccctaaaaatgaaggaaaataacaaagacttgaataaggaagattacacacattacgcaacagattcagtcagagttacttcccaaaaattcagcattcaaccaagaaattctatcctatcgtgcaaacaaacagtagacaagcacaaagtatccagaaagcttacatgaaggatgagaactgggggtcggcgttgatctacggtataacgaggactgacaacggcggaggaagagcagcaagaaatctatggtgtttgaaattttttctctccaaagtgttcttgagaaaatatgacaaaacggtgaaagtaaccaaatgaaaggaaaaggctggcttttataggccagaacgggtgtgaagcagttgtgaccagacgtcatcatacggtgagaatcgcaatcaattcgcattctatagatttaccggttgggataagtgctcattagggcggctggaaacgcttgagtatttgactgacacccattaaatgcgtcggatcattaatggacgagaagcaaatcgttgcctgcaaaaa

SEQ ID NO: 121907 - DNA, 1229 bp, Cannabis sativa
agagacagccacaaaaatgatttccctgctgtacaaaactttcttaaaaaaatttctgatttgcagcatcaaaatcaagtttctcaatagcatcttagatgtttagtttataacttttgttagtatgaacatttatgaaactcttttatatatgtacaatatttagtattaaatatgaaaataatggaatttttttagtattaaatataaaaaatatttagtttttaaagaaattattttatagtaaaaagtgtgatattaaaaaaaaatatttagtttaatttaaatattctaaaaaatgaccttaggaacgaaaatattgtttcaaataacaaaatagttgttcctgataatgtgtaaaaactaagttgctagcttaattttttggaacgactttaattttataggaataactcatttttgttccaaataatttagcatacttcactatattttgttcttgatatcgaatttcaggcacgagttatcaggaataaaatattaggaataactagtcgctcaaaataatcttgtggaacgaagtaggaggtttcctaggacgaaaaaagtcgctcctgatgacagtttttgttgcagtggtgtctatagaacatataaggacaaactctatgttttcggatccggatcattaagaatataccaagtaagtcttttcaagagctttttgttaatatatggatgtggtaatatttaagaatattgtatgttgaatattttctttctattgaacgttaagtataatgctataaagaataaagaattgatctctattaaggaggaccagttaagaataggcatgctaagatcacatgtgcacataagctctatgttacacatccatgattgatctatgtcatttaattatattgatttatgtgaccattgatgggttctgacaagctaaatgtggtaaaaagccgctttgatcctatgttagtataatcaatggactagattgttttgaaatacctataattgtaatagtaaagttgaagcgcttataaactaatagaaaatatatgtagcctaagtgagcgattgttggattaaaattgataatgtgggctcataagtatttgtgtgtatattgctaggcaaatttacaaaaatacttttatttggggtaacttttacaaaaatactgtcacacggaaaagtttacaaaaatattgtgtttttataaaacactagtagaacacaaaacagaa

SEQ ID NO: 121908 - DNA, 1392 bp, Cannabis sativa
cttagtcattaaattgcctttaagagtttcgagcgactatgtcaaatcaaatcaataatttaagtgaatgaggggtaaataagtaattagcaaacacaattgtcttttattcttattatttattttatttcttgttctcaataattggttcctaattaatgtgattctgtgaaacgaaacattaatataggaataaattgaaaaggtaatgtcatttcataaaaattctttacaaataattgctatgatgaaaagactaattaattacatgattttttttaaaaaaaaaaattatcaaaatattaattataataataatccatagaattgcacaattaagccattgatcattaaaaagtgactaaatattaaaaataattatagctagataagactctcactaaatgaataaaatattttctttcttcaagctgtaaacaaaccattctctttcttactttccaattattaaaacataaatagttataattaataattttttttattaataataattgctaaaattctttttatgtagattgaaaaaaaagttatacatctatttgcacttaggagaattttatataattaattaatttttgttttttctacttttataaggtgttatccatgccacttatcaccaaataatataataacaaaattcaaagaaaatattaaaaaatatatattttaaaaaataattaattatatctttgcctcggattctatatataaatttatatttatgtatactactttttgccttttttgattaatatcatacaaatacaaaatttggatgtttttgtaacaaaatcaacttattatacttgtggggttcatcttaattatttatatatatatgtatattatttatatatactatatatttatattaattgtatttatttatagtataattaataatgggatgtgagtaccacggctcaaagctaaagctttttagtttggaatacttccaaattcccaaacataagaatattttctgtcttgaaaaaaagtcttaatattattcaatatgtataaatggaatggacccctttttgatttgttttctgttcggtatcaatccaagtcgcatgccagaggaatagataagaattatcttgaatataagtattttaactatttaattaatacgaaatttcttaaaaagtgtctaaaaataaaatcgcgaggacttaatttatttgagtcaagttgaagtaacggcttaacaaggtaaaagaatggggcccaacattttcttattttctttggacaatatatctttgagtaaatattattttagaccctgtattttataaaagttaccaattggaccctctgctttgttaaatggctaaatagaccatgtattttccaaaa

SEQ ID NO: 121909 - DNA, 1322 bp, Cannabis sativa
aggtaggaagcacatttgagactgcccgccacataaagttcttcactttaggaggtattttgaggtgccacagtttacgccaaaagcctgaattgtcttccccagaacaactgttcttctggctttgcagcagattgtaggccgatttgatagaataaccatttttaaatttattggtggtgtttttaacatgaaattatttgtgtgtacatgcattatgataataactactacaaaaatattttttttaaagaaagataaactttattaagacaaatctgttgttataaaagaacttaaaaattgagtacaagcatatgtttaaacacaatctcttaaactagtaatagaggttgttattgtgtgagcaacactatttactgatcgcataatggcgatgcaagaaccactaccaacaacaactaataaagaatagatatgtaataaaatagactgaaaactaaaattaatgtggagcttattaatctaaccaattgtcacagtagaatcactattaataattgagatactgaaaccaaattgatgcacgagagtcaaacccagacgaatggcaagcagctctgccatattagcagagaaatcccctaacacacttgaaaccacactaaccaaaccacactctctgcatcccgtagcattctcccaaattcgacaaagcccctccccgaaaccaccaaagcatctgtcgcaagagtaaaggatttagggggaggtgacatctatcgagtagcttagtaaactgctgggtttgctggatccagtttcaaatgaagacattgtcgaccatactccttaaattctgccaggtgattattgactaagtctggaataatattcaatcttgacttcttgttactaaataatattgagtttctatcatactacaaccactaaaaggttgtcatcatcaattcaaaaatctcacgaggtagcctatcaaagagaaatagaagaattttctgtattggtccacttacacatcaacggagcaccgaccacacctccaactattgccacattagaatcaacccaaaacagaaaaataaaacatgctgagaaatttcgaattcttcccgcatcaaaaacagcaaagaggtactaaaaaatgtttttaacaatactaattaaaaaagtctaattaaatcaaactaagggtgacgtgttgataggtcatgtcgagggttaggtatttcaattaataaataccaaatctaaacctcacctatttataaatgggtagttttcacttacatatctttatatcttaaaagtgcctatctaacggcatttcttggtttaac

SEQ ID NO: 121910 - DNA, 928 bp, Cannabis sativa
tagagactggccaagaaagccatgcctccccctccagctacagaaacttcctcggtggttgttgctccaactaaggagtctcatcgggtgccaccgttgcaccttcacaagaggtcctacatttgcatgcccatttcccatggctgcatcaacatcgggctcgggcccatcatgctttccgcctccaacagccatcgtagcgtgctagcgaggccatctgtccaattctagcagttggcatggggactcgtgttccaaggagaggcttttgatgcttatgttgcccaaagcgggcaagttctaaaaaacattggtacggggatctcaactttgcacgcttcaaccagcggggccttcgataatgaccttgtcctggtcaatgacttggcacaacgatgccttggctctctcaccatggtaattgaactttaccactttagtttatgtaatgtatattttttacgtggacacttataatgtagctgactattttgctttgtcttttttgtttctattcgatgacttcagcctcttccaaatgaccaatgcttctcataacatctatgcggagaggtgtaaagaccttaagaaacataactcgaaagccacagtgaagattaaggagcttgagggaaagcttacttcttctgagaagcagttagaagaagcgagcaccaagcaaaaggctattgaggaggaggctaaagccaagagtgatgatcatggtaccttgaatgccaagtttattaaacttgaggctgagtcaaaggtcatgtatgataaatatgccatagccattgttaatcttgaatcagagaacaccaactcctcggagaccattaagcggatgaagatagtgttggaatatgttttaccgggatctagatttactaccatatatgttgtttaacatcctaaatatgaatct

SEQ ID NO: 121911 - DNA, 1340 bp, Cannabis sativa
  modified_base (226)..(226): a, c, t, g, unknown or other
aaaggaaaaagaacagtaagatcagctttacatataatattgttacttactaatcacgtattaatttcaattagacatgcatgaaacaaatgtattactattagaaagccctcagatctcatagctatattggatcattaacaatattaaccacagatttttcatcaaaacccatctacatcttcacacacctcttagaagtgggggagagagagagagagagagngagagagagagagagagtagaaaagaaagaaagaaagagatatggatagtggtaatgataatggtaataagaatgaggtagcaaagatgtaaaggacaaagatgaaaacccagagagaatttgtttccaaaattgagtttttccatcacagggcaacatcattatcacacaagctaaatagcaatagtaagaactcagctaaaagatcagtaaacaatacaacgaagaaaacgacctgaaaatgaacagaagctccacactcgctttaagattaagagtggattcagatgaagcttcctgggctgcatgtccatcaaccaactgctcagagcccactgcattcatcatcatctcactctagacactataaaatggttcaaaataagcaattgcaaaagaaaaaaaaatcaaacaaacataataaagcaattataaaatgtgaactaaaaatataataaaaaagccctcagatcacataacttgagaagaatcatctgcggaagaagctaatgggtgttcttcagaagccataacacgccactacctaaccacctttaataaacatgtatgtgtgtgtgtatatatatattgtatgtatgtatgtatgaagaagaagaagaagaagaagaagaagtagtagtagtagtagcagcagtagtagcagtagctaccaaagatggtggcaatggcgagttaaagctggtgaaaacaagaaccacgctaccgctcattgtgatttgagtttttccatcatcgggccccaaaacaaaaccagaaaaaaaataataaaagataataattaattacttaaaaaatgaagaagaagaagaagaagacgaaccagaaaattagggttagaatcaacaaggttgtatttatgtgagacttgaacttcccaaaataccctccagcgggaaaattgactgggccatgaggatggtccattcttgtctcgttggataatggggcccaatgtttatgctatttttttgggaaatttacacggtacactaacttttgtaattttttttacaaaaatactgtcaagtggtattttttacttttttactgtgttttttataagtttcatactgcagtatattgtgttaagttt

SEQ ID NO: 121912 - DNA, 993 bp, Cannabis sativa
  modified_base (965)..(967): a, c, t, g, unknown or other
ccatcggcttacaacatattattgggtcgtccagcactgatcaaagtaggggcagttagttcgatcaagcacctatccttgaaattccaaacactagaaggggtgggagtggtgcgtggtgaccagatgctggctagcgattgctatcgcatagaggtgtagcataggaatgtcggtcatcagttgatggcaatcttggcagaagaaactaaaaagaaagatgaagatcgtgtgaaaatagaattgactattgtaagtatttatgggacgactggaaggggcacatttcacacgaaccagacgcttcggtttaccccaagagatgtccgatgattggatgtgagaaggtgaaagagtaccttacttcccaacgggcgactaaaatcattacatgcatcgtgaaaaacgctcagcaaatgagaagactgcctaagtccaatcactgccattttcagcttcccaaaaacacgcgcccagcacgtgcacaaaaatccaaaagtcagcatttaatgctctgtcaaaaagcaagagaaatcatgcctcccacataatgacactataatttgacggctaatgatgcaatacattaaagggctcatcataaatgccacatgtgcaaaaaatttctcgaaggaagatactacaacctcccagaccatggcatatcccggaagcttgggggtaattcttatccgcaatttttgcaagcatgacacttgggaattaatcaaaaaagtccaagtagtgattaagcctcccaaaggcctcgctccgcgatcttggaggaaaatggccctaaacatgccgaacaaacctccgcgacagaagtcttctcgagtgtaggccacgaaggaaatgtccgtaagctggcgactctctcccttctagaaggcaggaccttttgctcccacaaagattatggaccttccatcaagatgcattggtcctgttgggttttatgcccnnnataaaactctttacaatctgattagt

SEQ ID NO: 121913 - DNA, 4360 bp, Cannabis sativa
  modified_base (4311)..(4335): a, c, t, g, unknown or other
atctaagttttggtgcgctgcgttcgattaatgttgaaaaaataagagtttgtaattattatttgggttttattttgtgattagaggtgtagtggtggtgggtggtggcaaaaatggtggtattgtgatggtaatgggtatggtgttatggtagtctggtggtgtggtgtcgacagaaacaaggaaagaagagagagagagaaagaaagaggaagagagagagaggagagagaaagataaattaagttttattattattattaagagttaatacaaatgttttttagttttaatttatttttaaatttaaaataatataaattaattaaatcaattgtacatttgtgtaaatatgtaccatttatgttggcagccacgttggaattagtggtgatgtgttactagccacgtagacaaaatgacaaattaacaaagattatgggacggcaccttaaaaatgcaaacagaacatgagttgggtaggttttcccaccaaaatttaagtttggatggttaattgcaagtaaaatgagagttgggagggtttagccgccaattacactcttgttcttttggcaagctttaaaaggccccttgcttaggattctcaaccgaacctccttcctaatattcaagctcaaatgacaaggagaagtacagcacaaataaaaaatgcatctatttctattcttctacaagttatacaaagtcgcagccaagattgcattaatgattcgattttggagattcttcatcccttttctactttcaagcaaatcctcaatagatttaggcaattgaaactctccaagccaagagatgtttcaaccactacctgtttagcaaagcaacaagtaaaaaatagatgttcatgagtttccaactctacctcacaaactgggcataaagcgctcaagatggtcatgatctgagaaagaaaatctttagtaagaagctgggtattacctatttgccagaataggaacctgtgtttaggcacaataagcttatcccaaactgctctagcataatctactttgtccacctccaccaacaagtcatagtaccttttagctctaagcttgttccctttcaccgcaaggcacattctatcttcatccattgtttctcgaaggctaagattctttttgaagtaccagctgtcatccatcttctgtgggtagttccaaatgtcatgctctttcagataaactgagttgatccatttaacccataggcaatcctatttactagcaattgcccaaaagaatttagccaaaagagccttgttccactttttaccttctcggaatccaacccctccaaaatttttaggcagacaaaccttttcccaagaagctcagtgaagcttacttctattcccagttgttccccaaagataatcacgacagctcttatcaatagcagccgtaatctttgaaggaatgatgaagatactcatccagaagttccttattcccaggagcaccgagtgaatcatttcagcacgacctgcaaaagacaaatttttgctagcccagcaattaagattcttatttactttatccagaataataccacaaccagttaccttccactttgttggccgaagattcaccccaaggtattttagcggaaaactaccttcttcaatgtggactaaatcaaggatcttggatttgatttcttcactaacccttccaaagtagatatgagactttgaagtattggctgacaaacctgttgcatcacaaaacttctgaaaagcttcaaaagtaagccttactgaattatagttccctttgcagaagatagcaagatcatcagcgaagcacaagttagtcaatctcagatgcttacataaaggatggaagccataacccttcttatctgcataaaaaattagtaaccttgtgaggtagtccataatcaatacaaaagagtaatggagacattgggtctccttgacgaagccccttttttcctttgaagctgccttggattcttccatttaacagcagatggtaagtggttccccttagacatgtcattatccacatgatgaatctagaggggaagaagagcatccaaagtaaatcttctacaaactcccagtccaccgtatcataagccttgctgagatcaattttcatgatgcatctagcggagacattcttcctagtataaccctttagcagatcctggaatatcataatgttatgggccaatagtctattcttaatgaacgcaccttggttatcacttactatagaggggaggacttctgaaagtctaggaagcggtttgacaagcgccacccatcctttgcacctgaacccagaaatgtgaggttgggtttgtccactgatgggttccatctgtttggtaacatgagtaactcttacagtatgtggcctgttatcttaatcttgtatatattacccccttggaagtgcatcaaagtggagtcgttaatattgtctctattgatttgagggtgcactatgcctgcaaaagacatggatgttttcatgagaccattaattgatgaaataaaagagttgtaggagtcaggtgtcctagctcaagatgcttacaatgagattttgtttacaatgtgtttttctattttgtggaccattaattacttcctagtgtatgctttgatgtttggttagagcaccaaagggtacaaggcgttccccacttgtaacgaacacaccccttctattggattgcacagcaagattggttaagttggacaaaaatggtttcttgaaatggacgacccaaggcggagaagaaaaaaatatgatggtgttaacccgaaaacttttcctggggatgtggatatcaatgtttgacacatagcatgaaggatgacgtcatggagttgagtagactcgagtcatagcagtcaacgtggaaggagagcctagccctgcgcccaagttgactctgagatctctgagatggaagtttggactttaataacttgaatccaacccattacctttaagtattttgtaccatgaagacatgaaataaccgaatctaaaccttgggagtggaaattacacaaacttgcaacccataagccaacctgggcacctagggtttcacatggcgcccaagttgacatcctcaactatggtttcgatttttgaggttgtcttagtgcaaagtggtcaaaacttgcattgtgatatcaattagacataccacaaacatatttcttgcatcaaaataaaaatcaaagcaacttgatttttgagctctcgatgccttaggccctggggccccgagcacctagcacccaggttgacaatctgtcaatttgggcaccttaaaagtgtctgatcaaagatccaacttttacattgaatttgtctgcatcaaaaatggagaaataggtccttttggaggaaaaacaacaactgttgggcacaaataacagggcccaacgctaaggtttacacttggggctggccctgcgcctagattgacattttgtcaacctcaaccatttaaaaaatggagttttcatgaattattttgagcatctttcccatatttagaaaatattgagattcaactatttttggggaccaaacagaatttccgaatgggaaaaactgggacctagcgaccagtttgacattttgtcaacttgggttgtttccgatcaatttcaaaaaaaaaagtgttttgggaattttttcgatcataatgaataaaaaatattcaagtaaactcaaagtgaaaaccacaaacccgagtccctggaaacgggacccattgcccaagttaacctagggttgggcccagtgcctaggttgacaattaacctaggacactgccttcaattgctcaaatgccaaatctaatatgaccattgaatctgacatggtaaaagacgggggaggagactctgtcctcaagttcagaagccttggaagtatcaaaaacagaatcccaggagctcgactgaaagggcccaacgcccaggtcaacaaatggccttgtgtactggattttgcttattcgaatctcatgtcatttcaaattttcatctagtttttaacaaatacaataatctatgaagttagaggaatcaaattcacaactttgcatttctcatttccagcacttctagaaatgaagagtttcgagtctcccatttctgcaaaatagcaacatctccgagaatcgatgactagctttgccaaaacctataaatggactaagtggtgtcaatctaacacttgggcatcttaaaggacatccctgctgggttttgtgccctaaatnnnnnnnnnnnnnnnnnnnnnnnnnttactaattaataaaagatcagaaa

SEQ ID NO: 121914 - DNA, 2044 bp, Cannabis sativa
tttttagcggtaataatacttaaattatatttttaaaattttttaagtatctaactattaaatgttaagtcattatttacgtattattttcttattagtatatttaaactattattatatataaaaaattataatgacctggaccaatcaaagattgttacgtgtcagtttacttaagatttaataattaagtacctacaaaaattttaaaattataacttaagtattattactgtcaaaaaattaattatttacaactgagagttaaacttttataatatttataacgcaaattacttttttttataataattattaaattttaagagtcaattttaaattactttaaaatatgttttacttaaaaaaatatataaataagaatagatttacatttttatctaatagaatgacggatagaagtatgaaaatacataaatagaaataataatatgaataaaaataagataggaatgaaattacaaaatttaatataaaatcatcattttactctattttaattttataatagaatgataattttttttaaaaaaaaataattattacaataaaatagtaactatatacaagtaacttgaatgacattttaatactttaaaataaatatgtgggataatatcatttattacttgttgtaaaaattattgattagattttctgctttgttaaatgataaattttatcctgtattttctaaaataatacaaaataatatcttgagtagaaatttttgtcaaaataaaatttaataataatacaatctagagatattatgacaaaattaagtatattttctgtatcttttcgtgctaaaaattacttttaaattaattatattaaaaaatatatataaaaaaaattgaatttaaagtactattttatgtcattttaaaaaatacagaatttaatttattatttaataaaataaaaaatttattcattattttttacttgaaaataatattaacctcaatatataaatttaaatgtatttgtggttccaaaagtttagaaaggaaagggggaagtagttggtttgtttaaggaaaaagagttgtactaatacatgtgggagaagaatggctttgtgagcttatattataatttagtaatttataatatgtacttattataatattaataatataaagttataaatataataattataataaacttttttttttttttgaaaagataattataataaacttaatttaatgagagaagaaaaagggttattgtagtctggcaaaatttttgtcttggcattggccaactgtgtccgcacaaatcaacaagaaaataataaaaatgattataattaaataatgcactaaatgacgtgttagtttagttgagttgagagagtaaaaccaatgaaagagaggtcttaatttttgggagtggttaggccaaaagagatgataattgaatataattaaagctccacttgcatataattacaagcagaagaatattaattgaaggtgaaagtgtaacacaaaaaaaatcaatataaaaaaaattaaaataaataaaaataaaaaatgtattctctttttattaagaaaagcctcatcatcatttccatgtattggtatgctccttcaatcattaactagaattgcagccatgtgatgtgcatgaagggagttgaaactttggaacataacaaccttatcctactaaaaaaagttattttaaatttttaatccaaactttatgaaagcttgtttggtaaaaatagattcataccaaaagtctaaaatgtaagtagggtatatatatacatatatatatatatatttgacaatatattaaaatgaatattgttattaataattggtagtgattagtattattataaagtgatattatgcaaataattaacaatttcactatagttattaaatttaaggaaaattatccacatattattttcttaacttttttttttaaaaaaaatttacggcttgagtttctaaaataattgcaacgctagttgcaataggaggttcta

SEQ ID NO: 121915 - DNA, 2210 bp, Cannabis sativa
tttggctctttctggttgtgtctccactcgggtatgtatatgtttatgtttatgcttttttttactactattaatactctagtactctattcttcctaacattaatgttaggactgtcgaacactatttatttctctatttatgtttcattctactggagatattgtttatctgaaaatacgtaagattgtttttatttctctatttctggttgtgtctctacttgaatatgtttatgtttatgcttttctttcgatacatgttacgtttgctgtgattttattaaaaaaaaaaaaaaatttaattatgattcttgtcatccgaacttctacctatatcaaatctcaacaaatttttttgaattattgagaggttgaattaaagaatttttatctaaagagaagtttaacttagatgaaaatttaatggcatgttatggcatacatcgaagtgtaaggagtagatatcattcgataaaaaattttaaatctaataatctcaataaatcaaaaaaaaaattttaactaacaaaaaaattttaagaggcaaacaaaaattctttttacacaaattcaaattataaaatattaattaattaattaaatacaaaagagaatataattaaaacaataacaataaaaatagagtattattggagaaattgttatagcaatgctcttataggtatagtaaccttcttttgtaaaataaattgttaaaaggtattatcagttagatagtgtctaaaaaagccacactaccttatatggaatagcacacatcaatttttcttttttgttaccttcattatttttatcgaaattaggtagttattatggggtgattagtaggcaaaaatatataaatatatatatagttagttaatctcataatggtattttttattataagatttttggtaaagggcattggtggtaaacattgatatcttcttttcttttgattgaaaattattggattaataggcaaaactttttttaaaaaattcttctgtagttaatctcataataggcaagatataatttacaattttttttgtttaattatgatttttattttttaatattttttgggtgggtttgggtatattgaagaaaatccttaactaaggctttctaatttggatatatagataaattataattttaagagaaaaaaattaatgaaaatcacagtatatgttaaccaattatgaatttgacatatttttatttaaaatgacttttatttatacatcttaatttaagtacatgaaataaatgtgctcttttttttagcaaaatgtagacaaaatataaagtaatttgttttcttgtcttgtctttttttttttcattcttttaaactttactaaaatttaaaaaaaaacaaaaatgatttgatcttttttaaattatgatgttgatatttaaaaaaaaaaatccccaatttttataagtacttctatctgtcctcttgattattaggcttttttttagagaaattagttttaatattttattatttaaatttctaagattatgatgaacatttacctattcaaaatttcaaattttttgaatttggtagctcctaataaagctaatagtttgttaaaaatatttgaccatttctaaaataattttcattttgtagaattgaaaaatagttcttctaccgttagcaattgactctatttttgaattttgagcaattaataaaatttaaaatatttaacatttttttttgtaaagaatttaatatttatacttagtgatttaaagtcaattgaagaaaagctataatatgttaagatattaaagctgaacttagtgatttcatttctttttatagaaaattggtgatggggcatgattgtttatttgttttttgttttttatgtataaaaatatataaatttatttatttttgttttaaaaagacaaggagaatcaattcttttgttttattaaataggaacaaatgtaaagaaaaaaacttttagcattcgaataaattttccatcccacacacattggatctaaatatatttttattgcataatatttttagtatatataatataataattcacctaatgagttactattaaatgataatgtaaaatcagttgtcagttactattattaggggtgttttgtatttttttttaaataattattcttcacaaaagtttttttttttttttt

SEQ ID NO: 121916 - DNA, 1676 bp, Cannabis sativa
  modified_base (829)..(842): a, c, t, g, unknown or other
tccaatgtaataaataccaaattacgattatttaattgtaacccaccttattaaaaattaaaaataagcttaacttgtccaatatttttgttaatttgtcgaaactatatttttttttgttagtttaaggttttcaaatattaaaattgaaaaataaatatatataatatatatatatatatatatttcaaatttaatatgtcatagtctaaattaatattaaacaccattgattgaataaacatcaaactatcaaacaaatattcactttaacataataaaaaatatacatgaaaaaagtatattgatatagtctaaattttaactttaatatccaaaaacaatcaaaattattaactataaagtccaatttcaaattaaacactacaaggtataaattttaaattacaaatagtttaatgattaacaataatttatgtaatatatcataaataatcttcataaaaattataattacatctttgccactcattaatattattcattagtaaaaaaaaaattatatttataaaatattaaaatagcattgtcattagacacaagtgttgcctaacacaatctagatatattgctaaccaatcgtgaagtaggggtatttgcggtgcgagtagtgtggtttttgactattttttcaaaccaacccgcacatgttgttttttcaatttcccaaactgcacccgcaccgcgaaactaaaaaaatcacagaaatcgtgacgtaaaaaatgatgcggtgcggtttagactatcatcaaataattaaactatcacaaatacaataaagtttgagcaacacttgtcaaaaataccnnnnnnnnnnnnnntaaatatgaaaaaaaaaagtttcaagtttcaacaatataataattagtgggtttgggttgggtcttcacatattggacctaaataaatataaaaattagtattttttataatatgcgatgcagtgcggtttgaatcgcatattaacaatttaaaccgcaaaccgcatcgcatcgcgcagtttaggaaaaattcaaaccgcgaccgcaccgcgaagaatttcaaaccgtattttttttgcggtgtggtgcagtgcggacagtttaggcagtttgaacagtttgatgaacacctctcgtgaagtattacctattgaaggtgttgagcaccagtgatgccctatagcaatgcttattaaaataatatatttatttttttatttttcaatgagcattaatagtagcattgacttttatagttaacctgcactttgtgtattgaagcacaaatataaaaattaagtaaaatttaacataaaatataccctatttatgaaaaatgatcttaaaaaatattgctaatcaataataaaatgctatttataaaaagtgctagaaaccaccaattagttagtgactattttttttttttttaatttaaacgtttatatattgcacaatgcataatctgggactcgaacccaggacctccaacgcacatgcaccctccatggatacttgagctagcctcaagtagtttggtgaccaaattaaaaggccataacatcatctaagagcatctctatgttatattatttattatataatataatgtttaagattaaaattgtgatatgttatatatattattacatataatataattggaaattatat

SEQ ID NO: 121917 - DNA, 693 bp, Cannabis sativa
catttcctaagtttaacaatgtctatcataatagttggccaatgtcaatttacttattaaaaatagatttcatagaaaacttatgatgcacaccgttttgcttattaaagaagcagttcttattttcttgtgctatatctttttggttcttatcaactttcccctacagttacactatatatattagaaattatatattgagcatgtatataatactactctcttttaaattacacacatacagtggaacacaattttcatatataattaattagttaacatgcatctgtagaacaatctgtcaaaattatttgtatgctttatcatcttatttatattcattatatagccaaaaacacacatacagagggggcattatttgttgttctgaattttgagctctttgaatcataagatttccatctctatatatcactagctctgcaaatcacaatgcttctctcaataataccttctttgacctatgatatatacaaatttatataccttttattggaattgtttcgtactgatcattaaaattattacaattgtttgctgggtctaagtgattatctagttgtggtgattgtatgttgtgggattcacaattttataaggatgaatgcagaaaaagatatatattttgatggagatgaagacattcccgaagtacaagatactactatacaa

SEQ ID NO: 121918 - DNA, 710 bp, Cannabis sativa
aaaaatatgaaagaaatgaagaaaaaaaaagtgaaaaatacttaaaggaaaaaggaagaaaagcttgaacaataaaaagtttgaagtctttttttgaaagagactacttttcattatttcaagaaaaaaaaaaatatttgaaattaaataagtctataacatattattaggttagagcttaaaaaaatgagaacaaaactagaaacaaaaattatccaagctcaacattatccacaaaaatatcctttcaagtatagtttcagaaacaaaattaaatacattctatcttaatgcttatttcgccaaattgtgagcagcaaagttatttttttcaatcaatttgtgagatattctaaagtgagaatttattgtgtttcagtatataaatttatacataacatattttcatttagtcaacctttaaattaatgtaccttaataattatctttcttagataacaaacacattaatcatgtcaataggtcatctttttatgacgaatattccatgtatttcaatgtatttgttacttaacaatgtattttatgtatggtcgtactaaaaatgggcctagaattgtgttatatgcaaggctaattaagatttttttcgcccaaattttgacatatactaaattatgttctctaaggtcgttaaaaatactcctgaactattgagactgtacagttaaggacttttgtccaatttt

SEQ ID NO: 121919 - DNA, 1751 bp, Cannabis sativa
  modified_base (1213)..(1213): a, c, t, g, unknown or other
cttgctgattatttttctaatttgttgagccaccaaccttggggtcagatcccatgtacacctcatcgtatctgttgtaatagatagttgcggagtgaccatagcgcccacaaacctggcaagtgggtatgggtccatttgaacggccaccacgacctcttccactttgatttccaccaccatgagagtaatttcctcgaccactcctgcttggttctgattcgagtgatagtgattctaatttggatgatagttgcctcaaccacgattaccagtgttggagtgattagctagattagcattgggagtgactgaagagttagcagatttgttgttggtgttaaggctcaagttctgaagccgctccatcttgctgtcaaaggcaagtaatatccctgtagttcttgccaagtagtggaggattgagcttcaatctgcaagactatacgtagatattcaatgtcaagaccagaagtcacattagatatgagttggttctctaggtaggatttcatgccaaggcaagtgaattagaccaggccttcttctacttcaagtattcttccatggacacagaacctttgcgtgttgtctgaattagagtttgagtatcatccatctttaatttcgagtctgcaccgtacaagttctccaaagctttccatagtgcagctgatgaatcacagcccatcacctctgtagcgattcaatctgtcatggaactatacaaccaacccatcaagagttggtcacgaacaagccaatgttcatactctggattgatagtaactccaaagcctggctctccttgtactgttgcgcagtaggaatgaactctgctggatagggtcttgtaccattaacaaacccattgaggcgatgacctcgtatgatagtggaaaccatggttttccacaatacatagttctttctatcgagcttgagagggaagggttgattcaaagtactaaaaggttgagtgtcattgggttggacagcaggaatggttggggttgcagcacctgctgcaccagtattcgtaacttgtggagtctgagaatgggaggacattgatccaggccttttttattgctctgataccaagtaaaggtttacacaaaaatgaaaaagtaattctcggctcaaaggaggctgagtaaatcatattgtatttatactctatagagagattacaatgacaaatgagagtatnacaggtggccctaatgttggcaccaagggaacaaggaataacagaaaataaaggttgattacatcttaatacaaagaactgaaaacacagcaattcacaactaatgacaattaactaattcttaacatttgtgtcactgaatagtgaaatggttctattattcatagggaagaattacattaaattggtttctctaaaataaataagaattaaaatcagaaacttgtttatgttccttaaataaatacaaaaaagatgagaaactagacatgtttcctctcttctttgttattaggaatctctcctatgattatagaactattgccgtgacttgcaagcttgcagatatatgggtgaagcatttgattcacattcactagtagatgtatctgagttgagtgcataatagatacttatcggatggtgtaacacatttgtctggacattcttaggtcttgtagagtgattacttactagtggttaatcatcttggatgacactgttggatatattttaccgggatctagatttactaaca

SEQ ID NO: 121920 - DNA, 592 bp, Cannabis sativa
tcgatttatgcacacccctaattctacttggtatcttgatctttacataaatttgttgtaggcttattttattgacctaatgaacaaactagatcttatcatgaaattgggcttgattgttcagggttttttaaagttgtattgtttattattatgatgatattactaaatttttccataaaataataataataattaaaaaaaaaattagaaactaccaaattatttaaaactatgtacttattttaataatacttaattcttgcatagtgcccgtatagctcagtggtagagcgtcagtcttgtaaactgaaggtctgtagttcgatcctgcatgtgggcacttaatcttttattccttatttcttttttaaaattatcagttatatttgtatgagtttgggctttggcttttccaggaatttattattgggctatttacaaaaatatgagaaaatgaatatatattttgatataaatggcataaaaatttaattactctaaatatgacatattttttaaaaaacttaaaaaagtcatgaggaatgcagtaaaaaactttaaatttgtgtgtttttttttattttttatt

SEQ ID NO: 121921 - DNA, 2556 bp, Cannabis sativa
  modified_base (55)..(58): a, c, t, g, unknown or other
acaatacttgttgtgactaaaactaaatttgtgacaacttgtaactaaatactannnnttagtcacaagtaacattttgttagaactaaaagtcacatttagtcacaaaaaaaattatgtgacaaaaaaattgtcactaattaaagtaatatttttttgtaatgattattgaaaaaaaaatttgtagctgaaccctctcaattattattttatttacacttaacattctaagtttaaattttaaccgtaaaactttctaaactatttaaaaaaaaatataaaaataaattcaaattttataaaaaatttttattttttaaatttttaaattttttattttaaatttttatttaattttaaaataaattttgaaaataatttttaaattataatattcagtgtaccaatataaatatatcacatatacaaaaatattatacgtataagcaatctatgatgacatttaacttaatgatactttaaatttgctactagttgagaaattttagctgccaaaaactcattgttaaattatttttcataaaaaaatttgagaaatcttatgctaattaaaattttcaaattattcaagtatttataatcgaatatacacatggaaccgacgtaaattgcgcttatgctaatacaatttttaaataatttaagtatttttaattgaatctattacatatggaactgacgtaaattgtaattttttttgaaagatgagagacgatggtcattttatttggtaatgggctatatatgtaaattattttgttgttgttgacggcaaagtggtaattaaaagtgaggaagcgatatgttaggcatacagatcggttgacacatcaaatgacagttgttctctcgtttggagaacgaaatcagtgaatatcacagcttttgtttatttgattaaatgacaaaattttcaatgaattctggtgacttttattagcaagtttcgtattattaccaaatagcgtaatttaaattaaaagaaataagaaagagatttgtcccaaaaacatgggtcctgtgcaacccagctttcacgaatgacttcagccgatgaattatgccacacttttggtgcgtgaggtcgactgttttggacgggctccaccaccaataatgctacacttctccaccccaattaagaggtccaccgccaccactccgtataaatataataggagcactgctattaggtataaagtgctcaacatcttacccatgtggtgtgttgtggatagtcattatattatttattaaatcaaaatatacgagcagtatgtatgtctgttgattttatggtactaattaattaaattacggtttcatatcatctaatcattattgtaccatattttcataaatctctaaatgtgtatattaaatccaaataataaagtagcaagtttaaaatatacctctaataagtgtataaaattgttcttattaaaagattatctcaaaaactttaaaattttgacttttatcctaacaaattttgttttaataatatttgtctttttcctatttaaataattattattttaccaattcaaagtagatttttctgaacatctttatacaactcttaatattttaaggcagcagcgattcaggggctatgaacctatgattttaagctctaataaattaaattatttattgagtttcatcaaccaaataatacttgtttattaattccatgattactccactgtaaatatagaatttgaactcttaataattatagaattatatttagtcatgattttaactgtagtgtccattgatataattaattccagtgattagcattagttcataattagttttagtcaaattaccgttttaccattccatcaattaacttgtagaagtataatttagatctcatctaaatttgtgcacaacattctagttcaagaattaacacttaaagggaactagcattcgttctgttaggaaagtcaggattctataattgttaatcatgttcccagccatatggcggacccaagatatagtgtgagggtgggctaactaaaattcgtactgaaatttaaaataacattttatttttttaaaaaaaaaatatgtattacattttttacttgttgttatacccaaaattcggctgtacttcagagagtgacacgtgtcgaacaaatggaatatgaaccaccagatataataacgattatgtcattaaatataaaatggaataattcattaaatattgaattaataaggtatattcataactcgctaactatataatcttaggcgagacatggatacacaaactattaattcgtgtattgacaagaaactatcctgccttagaaggcataatctcgagggaactgcggacaatgcacagtgagacatatacctcgcaacatgtagggaagtattgatgaggcgaatcggttgttgagataattagcgtataatccatattatataattaagtgtaatagcttgggagcatagaggacatgattgtccagtctgcaagaccttatggtcaaagagcag

SEQ ID NO: 121922 - DNA, 1459 bp, Cannabis sativa
tttttttttttttttcatatatagcataaaaatctaaaatataatagtttgaaaatataattaggctttttccttataaaatatgaagtcttaaaaaataaattaggtattttttttaaaaaaaataattatatttttcaataaataataataaaaatacaaaataaaacatttttaaaaactaaatttggagccttttttatcaaagagttttttagatttggatatgggccttgggcataagcccttttgcacgggaagaaattagactctatactttttttatattatagttttttatttttactctttttcttaaaacctattatttttactttttttctttaaacactttaccgattttactcttatcaccttaatatactctccatgtgactctcttatgtcaggatattttaagtacaatacatataaaaagaagtatgtttcaattaaatataaaattagaggtagatttgattaactgataaataaaagaggtatttttcaatacaccccttgctgccatataagtccctgcctagctatataaggcccgatgtaaaatgttcttcttcttcttctttttttttttttttaaattattactgttatatataaaatggtaatattctaaattttagtacattttcatatataatgttccaaattccacaagcctcatcatctcaagtcaagtttttatatttcttttacaaataattagtgacataaatatttaagtttaactttcagttgtaaataaatacttaagtttaatttttagcagtagcaatacctaagttatatttctaaaactctggaagtatcttaatattaaagattaagtcattatccacatgtcattttcttattggtacatataaattattttttttaaaaaatacaaaattcatgattggaccaattagggattgtcgtgtggcaatttacttaacatttaacaattaggtacctacagaattttagaaatataatttaagtattattaccgctaaaaattaaatttaattatttatttacaactgaaaattaaacttaaatatttatgtcgtaaattactatttttttaccatttttttttcatagtaacaaatctatgcatattgatagttggagaatgttcactctccgagttcgttttcttttgaattgagaaagttaacacaaaattaactttttaataatttatttaaagttaatatataactttaacatgaacgtgctaaatatatcataaatgtatatgtatgttattaataaattaatgaatcaacatgtttaaataagttccatctataaacgagttacacaagtcttgttatgtcaacctcagggccggccagagggtggggcagccggggccttggccccaggccccacaattttggaggccccgaaaaaattaaaattaatatatacatataaaaacatataa

SEQ ID NO: 121923 - DNA, 1351 bp, Cannabis sativa
tgctttggaagaaccattctatcctaaatatttctagcatagtcaacagtgtgagcttggatatacgagtaataaaacaattttgaactgaatttatctctcattatagctgcaataattccagtttcattaacagttgaccgaagatacacaagtatcacaaactcttctatacaaaaactaatagaagatacacaacaatgataaagtacattggttaaaactacattttctaagaatttagaataaaaatatacattgaagattctttcaccataaacaccactattaattttcaattcaatgcgacttagaacagagtttagcttacccttttgcgtaaccatgaaacaccactggagaggaccaacatcgctgaacgtttcttccaacttattttaccaagtaaaaaatataatacaaattagccaaaatctagctccattaagcattcaatactaactaatccctaaaatacagcttagaatccctaattttgtatacatacaaattagttcaagtattttgcaatggtttcttgcgaaaaaaaaatagataaatcatatagctaagatcaaaatttttgggtaaattgcattcactgctcaaattaaccccaaaaacagataaaacaattccaaattttgactccacacgagaaatacaccccttaccttttcgacaacgctcaagaaaagatgaaaaacttctttcactcattggtaactcagatctaagcaaaataaaattaaaaaaacaattaaaaatttatgaagcgagaactcacttcctaccaaacagatctaatcagtacaaaaaaaaaaagtttgtaaagactaaccccacatggtgtcaaatggcaaaaaagagaggtctggatgagagagaggttgaacatgtgcaatgccgactttggagagaagaacaaatgtatggtgccaactttggaaagaagaacaaagaaacagaggagagagattgactatgggtaagaggtgcacagagagagcggaatgacggggggagatgaggaccactcgtcgtcgattaatggaacaggaggttaaaatttctagagctatctgatttggagaagagaatgaatagtggcagctgatttcacaagttaggtttagaggaaataggccatttcgtgagtcatactcgaccattataaactgacgttgaacatcaataaatttttaagtttttttccttgtcgattatgttattagcgtgtaatataccacagacacagataatgtttccttagtgtcaattctaaacacttgcataaatacatggcctactattcacgtcggtcaatgaaatgaatattagagttgaccga

SEQ ID NO: 121924 - DNA, 2139 bp, Cannabis sativa
  modified_base (1367)..(1369): a, c, t, g, unknown or other
  modified_base (1573)..(1581): a, c, t, g, unknown or other
  modified_base (1744)..(1744): a, c, t, g, unknown or other
ctctctctctctctctctcctcgagtctcctctcttcttttcccagaaacaactttgtcctacattcccaccatccgagctccgccatccgagctccaatcttcatttctcaaatcttcgtgtttcgtcttcttcgttatttttcttattttgggtgtagatggaaagaacgataggaagagagccgtctgacccataaaactttgattggggtcggtggaaccagcgatgaggatgacccgtgatagatcatcgtcgtcatcgagagtcagatctgttcgtcttctaatgactcacaagtctagatctagattttttgatcatttatattgttagatctgatttgtgattttatttttgggattttttttaattttattttttaggcgttgatttggatctaactaatcgatttaggaaccgacttgattaatcaaactagttaaactagcggcgtagacatcacagttcaagtgactctttgagcggcagttcacaagtgtcttaagactttttgtgttggattttgtgccctaactaaaaccctattaatttaatgttgtgttgaattacatttatcaataaagggacataattgttttattacttgcttaatataatttttggttcacatgtgtgtttcatgatcatatgtttgatatataaattctattaaattcttatcacattgctattaatgattattgtgttgtctacacagtgaaaaataatcaaaattatgtgattaaactaattagtcccataacttatcagtatacaagatttatactgatatgataatcaataatttagtttacttacacttttatagttaaatgtctttttcaaggcattagtaaagtaagcttgtattggatgtatagttatacattggactggaccgatattcacagtgaaaaagatatcataaacttactgtaatatttttttaagtaaatctcacttagttgatcttagatcaatgatctcaatcttgagatggttaggttctggtttgagtgtattatttgtgttttttgatttgttcattaaagctgactaattgaactggcccagtacttatatcttggaaacatagtagtgcagttaagtgagagtgctaatcatagatacgaaattaataacttctataaatagaagtgaaacgatgatttccttcgagcttggctaaacgagattaattggtggagtattcatttcaataattatattagtttattgacatattatttacaagtagctctgtatttaaaggataaaatacattgaagggtagaacggtaaatttttccctactcgatgtaaatcatcaatagaggataattgattatttagattgaaacaannnataattcatagcgtatctatacttagtatagagcgttctatataatcaagagtgtaatttcaaatttatagtggagtcaggaggaattaataagatagagaatttacttggtaaattctaaaactacttattgggagcttaattatataaactcatggtctctgtactagttgagataatattgtcttgtagactcagttaatnnnnnnnnnttaatcaattagaattctaaattatactatattttatttatgaattttcactaagcaagtgcttaattaaggaaaaaaaagagattgtagagtttgcttattaattaagagaccttgaaaggtctaattaataaataggttaaatgacaattttatttgatanttaattataattattaaatagatcaaattgacatttatggagatagaattaaaatatggtattagagaaaagaaagacaagtttttaataaaatgacaaaattgaaatctaagaggccctaagacatttcggccatagggtttaaatcaaagaaaatttacatcccatactgtttttttattttattttatttatactgttgcacggtaattgtttcttttttttttactgtgtttaatatttttttttgaatttcggacaacaagtcacgtgaatactcatatccccaaaatatataagcataaaaattcaaatttgtgatttcattattcgttattagatcaaaattcaatagtttgatatttttaaaattaatatttaaagttaaatttgtt

SEQ ID NO: 121925 - DNA, 2851 bp, Cannabis sativa
  modified_base (2397)..(2413): a, c, t, g, unknown or other
tatagttttgagaatagaaagaaagagagaattaaatcatggatggcgtaattgggttttgatgaagaagtgaggggcagtttggtaatttcaaaagcagaggaggttggggtgtggagtttgatggagggagggagtggggtcattgtccggctttgttgtgagaacgtgtgcgaataaaaaatatagacaactttttttgttgcttttggttacgcgtaagcgtgtacgctcagcagcaccacatcgagcgcccgcaccagcttcggcacacactcattcggatctgaatatatttgatgacttaatggaatggaatcgatgctttctctattggattttcttactatgacacacacttgcttttgcttagaagctactatactctctctctctctcacttattataagtcttttttgaatgggacatggtctatgttgtcgttgtcttttgttttgggctacaaaggaggaaaagttattgcggcttgtattatgttatagttaatttgcgtgtaaaactcgtgtggattgtggatatatttgtttgtgccatatgctttcactaattgagatgttaatacggtagaactcttttaaagaaaatgaatacttttttctttttgtttgaaaaaaaacaattatgataagaccaaatgacaattgattgaggtagaacaatttggtgaaatagtttgaaaagacgggaaatatttggaaagcgtatgaagttgttcagaaaatgatgtatgctaggttaaaataaaaagcaatgctttgagaaatattgaagaagaagaaggagaaacttcctactaaaagagacttttaacatggcgaaaaaaaagactccagttatccaataatattattcaatcaataaacaaattgacttatgagaatcttgctcaacaactatacgggtatggaaaaagtcatcaatctaattactgattggatatcctatcataattagatcggatgggatgttaattttgaaaatgtaatcggatcaattgttggatggcacatcttatcttataaaggagaagtatgaggctgcgatttgtcactctaaaataattttattctactctagaatttttctccttttatcatattttttaattacattaaatattaattaattcaataattaataaaaaaattcaaaaaaataaaataaaatagcattccacgttttttatcctttttttagttttttggttttttctttttctttatttttttttaaattaacatttttaaaaatgatattttctacaaaaaatcgtgagatttgtttattcttttttttcaaattaaaatttttaaaaatgatatattttatggctttttagttttttttttatcacttactatactctatatatatcctaaattatttatcttaaattcataattcagtttactacttaccttctcttttcttctcaagcataaagattagagtttgtaggatgtgagagtctcttaatactaagaagaatgggaaattgataaacctataatttttattgatgagaaggtgattattattattattattattttattcatattttattcataaatttatcaattattaaatacttaatatgtctaccatttatcctacaggaaaatctaatgtatgcaacaataaaaaaaaaatagtttctatgtttaagaagctattaagtttattcttaggtctttattaatcttttagacttctattaagtttatttagagatatttcttatattaatgctttgttaattttttttttaaaaaaaaaaaacgtgatagctagatgatatgtgatagatttggagttattattttaaaaaaaaagtattaaaatatatatttatactataacattagtttgaatgtaatgactattacaagtgagatacggtaatgacataagttttaaatatagtgacgactacaagtaagatacggtgataacaacaatttgattttataagcgagtgcttatcaatcatgtttgattttttttttttaagatttatttaatgtcctctatagatttatcaattgtttaatatttttattttataacttctaggaattctcaaataatatattattggaaataaaataatatacaatgtattttttatggagattcaaaaataagtatataagttaaataaggcttatacattattgataataatataatataaattaatagattattgatatattaacaatgtttttcacttattatcttttatttaattgttattattattgtgagtaaaaaatttaaacaaccgctcgcgaagcgcggtttgtttcctagttatcatctaatggtcattcatttatatttatatattttaaaatacatttataattttnnnnnnnnnnnnnnnnntatttaaaaatatatattaattgatttaatatacatttaacacatgaggttaaagaaaaaaaccttagatataaaatattaattctcatctttctaaacgctttgaataaattttattttttaacggttttattatgagatcataagaattaagttggactaaactaatatttattatatatgcatgttagatgggtaaatggcggcaaaacccctaatactttggttttggttttactaaatcccacaacccaaatttctgcgggtaaacccccaaaaccactattctgttagcaaaaacacacttccgtcgaaatttagctgttaactgccaggttggactggactgagaacacgtggtacaattttattcgtccacgtataaaattatttaaaaaaattaaaaaattaaaataaaattaatttgaaatttaaaaa

SEQ ID NO: 121926 - DNA, 1062 bp, Cannabis sativa
catatattgtgggtatccatcacccatttgggtggatatttgactttcagttattatttcaacttactccaacttcttatacgtatccatttcataacaatattattattattattattattattatcattatcttgaaatgagttaagttgaataatcagtagccctcttgcagtgagagcctggagaaaagtcacttattttgttatcccacgtcttagatatacgtcgtgccaaataatacaaaaaatagttaccatagagaaatgttatcatcaaaggtggcctgatttttcgatctcacacatattaatttatttatttttgataatttattctaatttagagtgtatttggtaatattttcttaattaaatttttgttttataattaaaaaagtaaagatatttttaaaaaacatattctataaaactaatttcactttttaatttttttcagaatcaaaattttaaaacttttaaaaataataaaaaaaaaaacatcaacttttaaaaaaaaatttaaatagatttttttaatcaatattttagactctgatctcaacgtggaccttattactcgaacttgggctctgtccccagtcttgaactcgaaccacggcgccaacccaaacacgaatctagactcaacttaaataaaatcacaaaataaaaatgaaaattaaagttatagaaacgcttttattttctatttttaaaataaaaaagcaaaaatgaacacttttttaattttaaaaaacacaaattttatttttatttttgtgatgaaaaaattaaaaaataaaaatattaccaaacgtccccttaaaatataacactcacaacgtcacattaatatggtgttagggaaattccaatactcagataaatttagtgctaaatcatcaccaaaaaaaatatagataattttagcattaaattttttctattccagccacaatactaaaaataatttctctcacattatataatgggtaaatactattttggatcttgtgttttgcaaaaattaccaattagacgctctattttgttaaatgac

SEQ ID NO: 121927 - DNA, 973 bp, Cannabis sativa
tagagtacctgtgagaatgagtaagcaatcagaaggaaatctcatcttttcaacaagaaaatacttcatgtaactaacatcgttaacacttcctttacaatgttgcttctgaccaatatagctcaccccacaaagcacagctctcctcctcccaaatgaagaaccagaacccaagccaggcctcgggctcggtctcggaggagccaccgccaccggggctggtgtcatctgaggattataatagccgttatatcctcctaaagctgtattcacgttaatcatgttggttacaacgtttctaaacttagttgcggcgttgtggagatagtcctgcccaccaccactaccatagttgttgttgttgttgttgggtcgaatttgggtgatggattggcagattgggcacttaaagtttggtgcttcgagtggaactagaagttgtgtcccacatcgacatcggacacatctttctcttctaccagccatatatatttttggtagttttagggtttcaggaaacaaaaatactaaaataattaggcctggggttgcagatatatataaggcgtgtaccaaacatagggtaaatagttatgtttaatttttaacaattttatttcttaatataactcagcttcaagacaatttctaacatgaagaatacaaaaaatgcaatcagttttgttataaaatttctaaatcatattattattaagttttattttaaaaaaattttagttagggtcttatttgtataattttagaaaatacaaagtctattttgtcatttaacaaaacaaaaaatctaattaataacttttacaaaacacaaaatctaaaatgatatttatcttaaaaacaaacatatggtatataatacaagttaatataatactatacagtataataatataatgtactaaataaatcctttagggctcgtttggaacgtcgtattaagtcgtattgtatt

SEQ ID NO: 121928 - DNA, 995 bp, Cannabis sativa
agtaaccttggtgtaatggttaaggtagttggtaaataggttagagggtaaaggttcaaaccccactaactacactatatatatatatagaaatgtaaaggttacatggtgactaatatttttataaagtgtaatatggttataagtctaatttaatatgggatcttatttatttaacttaataaatattatacaaaattactaatcaattataatatataatatcgtagaggtgccatgcattttggcgtcgtaacaatacttatatatatgagcattcttaagtactaatagtgtttaacactttttaaatgtatcattttaaaattagttaatggtatttttttaatttataattaattacactaataataatatttgacgagtaacaaaatattagtagtggtacgttttaatatttttcaatatatttatatatacatttatcagaaagatgacctttgaattagatattggaaattccaccacacgcacgctcgttgtgtgatgtcactacagatatcgtaagcaacgttacgtaccatatattacgattttaattaacttgttaactttccataaatatctttgtaaagggtccaacgtgtttataaagagttcaaaccaaacttgacttgaattaaagagtctagtcagttattattagctatatagtcactaattaatattttcactttaaatgtatagtggaattatataatatatatcatatatgaaaaatatattagtaattatatttgtatcacacacgtaattatatacgcataacattttttttttccaagagctatagctagccacaacttttattgcatcgtgaaatatttttgttgtttgtttgtgtcacatcatcaatttataacagtgaaagctttattttttttttttaaagaaagtatgttattaactcaaatcaaatcagctgttacaggatcactaataaatctaggacaagcatctgcccacatatgacc

SEQ ID NO: 121929 - DNA, 1284 bp, Cannabis sativa
attaaaatactaaatttgtcttatataatctccacaaagtaaaataaattcttagaaaaattaaagatggaaccatatttgattatgattttgcagtaatcaatttcaaattataaattatatttatctttttcctttttttaattcgtgtgagtatttaatatttatttgaaaatgaaattaacaatatatatatatatatatatttgcaatatttatataccaccgttggtttttcttacaagaacataagtagaatgaaattaatcaatcaaaagtagaatgaaatgaacaatagaaattactatttttttaaaaatatatatataaaattagtaagtaaattggatagtttttacagtattttttggtttttatttttagtattttcttacaattatggtttatactttaattagaaaataaatatattgaattaaaattaattaaaccaataatatatttaatttaaaataaattgaatatcaacgcaacaagcgtttacataccaacaaaaaatcaaatatatatcaaatatatataagattaaataatataaaagatttattataataccataattagttttatatgattttagttgatatattcaattaatacttttttttaaatgtaaacatacataaatatacataccttatattaaaagaaaacaattaattaatagtttattatctcttttttttttagaataaaaaacagagtttcttctttagtaaatgtattttagagagttttcacatggtcaaattatggtattgtcgaaaacttgtgtgaattatgctatgacttaagaaattaaaaaaaaaaaaaaattataaatgtaaacttgtgtttaaaaatggtgttttcctatagtccttttctcaaaaaaaaaaaaaatggtgttttcctcttaaaaaaagaaaaaaaaaagattggctgtcattatttattgtctaaaaaacaagcttatttgatttggtattttttttttttattttattattaacctttctagtaggggtaaatggcagcaaaacccccaaaattttcattttgtttcacttaactcccacaactattaaagctcatcattacattaggattatgtttgcagctccacttaatttgagaactatttacttgaagctaggactcaattaaaaatggaattctcatcccttttaatacttctacacaatcatctctatccatctttatttagtttacataaataacaaactaaaatatgactttaaatataggaccaaaacaataaaa

SEQ ID NO: 121930 - DNA, 1604 bp, Cannabis sativa
gggttttgaaaaaaaatgtatagtttttttagggtttaaatttttggtttaataataaattttttttaattttttaagtatataaaatcaaatttcccttgataaatttcaaacaaaagatagattgctcaaatttagaattacatttgaaagtttatgtgtgatttgtggtagccatgaaaagtcgaccatccaacacctcttctttggttatttaaacagtaaaagagttttagaagcccttcagaactggagaacttcgacttcactacaagaaaattaccctacctcggcagttaaacccataagatagaccaatctcggtggttatcaatcgtcgaggatctaactatcggcagttgggaaccactaagatagggtaccctatctcgacgaaaccactgagataggggtgccacatgctctcatatatgtgcaatctcgacatctgaaactgccgagatagggtaagaatcttggtaatttaaaaagaattcccaagattgctatcctatctctgcggttaataacccacatgataggttaataacgatgattttttgacaaccgctgtaattgatcttaggaggaaaaaaatattttttttaatttttttcccttcactgttattcacgatatatacaaagatacgttgcactacaatattattaaataaaattcataatatatcaatttacataagttttgtaaatggttacaagtataacaactacatgttctaactataaatttagctcagattatacttactagtaaaaagacaaaagtaaaactatgctggaaaatactcagtatagtagtctacccatttttcacgcacagtgttaatatcatccattgtatactcggtcttactatcacagtgcaacataagagtaaatcatatgttagtttctatcaaatttaaaataatatgttaattactacttacgtgttttgaaagatattcctttagatcttttgccatagttaaatctctcattagttgcatgatgtaaaaactgcacacaatgtcattaggttgtttaggagcctacatatacatataatatgtatcaatatttgatttatatatataaaaaaatgatcaaatgaaacacttgtcaattttagcctcatactttcattagaaactaaattattttcttactattcctcttggattgaaagcgtcatttatgtcaaatgcctttaacaatgaaataaattaaatttcaactagacaatacaataatttattaacattgtaagatttgcatcttagacaatttaatataaaacttacgttgtaaccacaatcatagcgtcctcccttgaatcactactagccggatcgtaaaaatagcattttttgttgaatggaaaaatgactattcccatccaatattgtctgtataaatacatattatgtcattatttattattagaaaaataaataattacaaatcaaagaataacactatcactcactcgaagttatatatggtactcatcgggggtgttcatccaatccaatctgcactattttgctcatagtgcatccgatccgcactaagtgcgaatttcattttttggatccaatc

SEQ ID NO: 121931 - DNA, 914 bp, Cannabis sativa
  modified_base (816)..(816): a, c, t, g, unknown or other
ccaacattggtatacatgtcaagagaaaagagaccacaatggcatcacaacttcaaagctggagcattgaatgctcttgtaacttcttcacataacaaaacctctttcctttttttggataattttttcaacaatttatgcattgaattcatgatatttttccaatatgcagttaagggtatcttcagagataacaaatgcacccttgattctcagcttagactgcgatatgtattcgaacaatgctgacacaattcgagaaatactatgctttttcatggatgaaaccagaggagatgaacttgcatttgtccaatttccacaaaactatgacaatcttactaagaatgatatgtatgcacatagtcctcctgctattaatgatgtgagtaaggagaaaaatcatgatcatagcgataactcggtgtcttcttttgttcgaatgagtactgattgttcgtgttgtgttttaaggttgaacttgctggagtaggtggatttggtgcagctttgtactgtggaactggatgttttcatagaagagaaagtatttgtggaagaaagtatttcaagggtggaaaattcgattgggatgttcaacgcgaaaaaaatgctcataagactattgaagacatggaacaatcagctaaaattgttgctagttgtagctatgagaagggtactgaatggggaaaagaggttagtgttctatctcatttgtagaagaattacagatcagatcctctgttttgttagataataactcggattatgtattttataaaatggtatataataatagagtaatttgcggcntaaatacttaagtttaacttccagttacaaataaataactaagtttaatttttagtggtaataatacctaagttatatttctagaactctgtaggtac

SEQ ID NO: 121932 - DNA, 1128 bp, Cannabis sativa
tccttacaaattttagtggggagagaaagcaagccatagcatacgagggagtagattttaggacagccttgattaaagtttctttgccagcttttgaaaatcatttatgatgccaagattggacaacagatagaattttatccttaagaaaggtaaaagattggtacttggatcgggagaggcattgaggaaggccaagatatttcgagataaaaggtttgttatccaagtgaaaagtttgggcaaatagagtctgcatactatcatttgtgtttggggaaaagagaatagaggatttgtcaaaattgacaacttgaccagaagccttcgaataggtatggagagcattattcaaagcatcacaggagttagggttagcagaacaaaacaaaatacgatcatctgcaaaaaggagatgggagatatgaggtgcattgcgagagatagcaataccagtaagaaggccttgatcctaaaatgaatggaggatggcaaaaagcccttccgagcagaggataaaaagataaggagaaaggggatctccttgcctcaaacacttggtaggaacaatctgactagaaacttctcaattaaccaaaaaagagacagtaacagtagttaaacactttataatattggaaacaaacttgatagggaaattaaaatgatacatgatattattcatattattatttaattattcctgattactttattaatttgactcactgtcattggctaaaagcaaagtcaacactattattattataaataataatcgtaataaaaaagataacattcattgactcaaattaataaataatatttctaaaatacatgcctctcattcaataaaaaaatattttaaaatatgcataatattcaattattcttaaaaaatatatataataaataaaattaaaaaaataatttatatttttaattatgtaaaagtttatgctctttcttaataataaactcatttaaaattataatgtggcaaatggtaaactctaattttctcaccagggataatcttgttaagaaacatgttcccattgatagtgcctactgtccggtttgtgaatgggatctagagtctcatgaacacttattctttgaatgtcc

SEQ ID NO: 121933 - DNA, 1540 bp, Cannabis sativa
cgcggtttaggaaatattcaaaccacgaccgtaccacaaagaatttcaaaccgcattttttttgcggtgtggtgcagtgtgggtgggaacacccctacttatatctagtttggttagccaattcagtgttggtttcgaagccaaatggaaccttgaggatgtgcatcgacttcacggacttaaataaggcttccaaaagattgcttcccacttccccagatcgatcaagatggtgggcgccacgtttgaatacgaacttttgagtttatgaatgcatgctcgagcaacaatcagatcaaaatgcatatggtggatcaagagaacgctagtttccggacaggcaaggagtgtattgttacattgtgattctatttaggctcaacaatgtcgaagccacatattaatgtctggtgaacaaaatatttaaatatgttttggggaagaacatagaagtctacataaaagacatgttggtaaaatctaaaacttccaaggagcatagtgatgatctggaagaagccttttttatcatctagaaatatggaaagacgctgaatcctaaaaaatgtacctttggagtttcctcaggaaaattcttggattttattatcagcttctgaggaatagaagccaattcggggaagattcaagcccttctaagtataccttcctttcgaaaacataaagacgttcaaagtctaaccgaaaggatcgtagccctgagtatatttgtttctaaaccaatagataagtgtgtttcgttctttaatgttatacgtggaagcaactaagtttgaatggagtgccaaatgtaaagaagccttccaaaaaataaaagaacgtttagccaaagctccaattatgtccaaaccggttgagagagaaccgttgtacctatatttggtcgtgcctgatcatgtgtcaagaaagagaaataagccttgctcttgtcttatattttgcaaaataattcaatattgaattatttataataattgtgacataaaataatttattgtcaccccaaataaataaattgtaataatttacacaatttccaaaattcccttatactttatattttaatatttttcccgtcatgtttgcataattttttcccaacttaatcacttaatcaaaatttattttcctgtcaataaattttccatagttaacaatctcatcaaactatttcaactttaacaatatctagttttattcaaatatttacccgtttagggttaaaaatccaagctcaaaccaagttcctaatcataaattttctattccaataacttgttttaccatttcacaaaaaacttgttttacaagtttcctcgttagcttgttggttacagatggtggtgctttatttacattatcaacatttattaaggctaattaagatattttttttcccccaaactttgacatgtaccaaatcatgcctcctgaatttttttgaccgttctgaactgttgagatggttacatttacagggttttgtctaattttattcaattttactatttcagtgatt

SEQ ID NO: 121934 - DNA, 1231 bp, Cannabis sativa
tatgtttggttggcactcaaaaccttggcctcacattcaaaccggcacaggttctaaatctccaaggcttcaccgatgctgattggggtggttgttccattgacaagaaatccacctctggctacaacatatttctaggtggtaatctcataagttggtgctccaaaaagcaacaagttgttgctagatccagcacagaattcgagtatagggccctaaccttagcaacttcaaatcatgtggttgtaatcactccttgatgaattatctctcctcatttttcaaacccctattctctggtgtgacaacatgggagctggctctcttgcatctaatcccgtttttcatgcaagaaccaaacatattaaagtggatcttcacttcatccaagatcgagtcttagccaataagctggatgtacgctatgttgactcaagcaatcaggtggctgatatttttacaaaacctcggaagctgaagatgagtccattcaaactgaagcaattacttaatgtttttgtatcacgtgttagttaaatcaattagccttttactattaaagattagttgtaaaatttgttacagttagttagtttaactaactcctttgtaattgctaacatacttaatatataaatacactcactgcctgaatcgtttcatattgagcagtgacatttctctctcaaattccatcaagttcatttcccctgtttttctttcttttcttgttctgcttcattcttcttcactgcatataaaagagttcataacttgaattcttctgtaactaacaggatataatgatagaaaaaaattccaagtgtttttccaaaattagtttattcaattacttaatttaaatttgaacataaacttaagataataaagcaaagtgagttaggttaagtaaatgaggtgtggttaagttcaaacctataaatagagcctaagactttcatttccactaaacctttgtagtagaagctatctatggctagttttctccaagttgtacttgtctcttcaagagttaagccatacatcaccactaccaccattttcacattcaaatttttagtgctctaccagatttcttttggaatctaaggtatcattttataattttgagtttttagatttaagatcaaagtctcatatatatatatatatatgtaatatatatatatgggagctaatacaataggtattgtaatttttacctatcaat

SEQ ID NO: 121935 - DNA, 589 bp, Cannabis sativa
tttaaattttccttttaatattatatttccttattttaattaagttttttagttaggataggaagaaaacatgaaaaggaatcttaggaggagactaagaatgaacaatcatcattcccataaattattattttttaatagttttggtcttctacgtgaccccactttatcccaccaatcacggcactaattattattaacactagtagatatgtcaaaaataaatgaattaattaaaaagcatttagaactcaaaattcttaacccagaaaaagaaaaaattgggtttcacaagttcaaaaagaaaggcaccaacccactcaacaacaacaacaacaacaaagtgtccattattgtttggatcaaacactttaacgtttcctgttatgtgggtcacttgacgaggcctcacattgctgaaatacctcaatacattaacccaaactaagataaattggggctaaataaattcttatgggttggtgtcttgagactagctcaagtggccataggtgggtatgtgagtgttggaggtcctgggttcgagtcctaggtaaaacatggctttaatatataaacgcttaaatca

SEQ ID NO: 121936 - DNA, 1643 bp, Cannabis sativa
  modified_base (1571)..(1574): a, c, t, g, unknown or other
atgtaaacataaatgacttctaatattttattgataacaaatcagattagattgaaatgagttttatttagggcataaaatcctaacatcattcctcctgatttcctctcaaatcgtttttatcaaaaactagaaggaaagaacagagttaacggaaaaaaaaaagtgttaacggggttaaaatcaataattgccgtcagccaaaattaatatataaaatatttactgttccttccccgtaccgtactgtattactataaaaagaagtttttatccttttgttttgggagcttgcacatatacatatatgtatatatatatattggtatagagaggtcataacttcataagtggttctcattatctggttttctcatcttttttgggttgaaaatggcgaagttgttagcctttgtagtgatgtttagtctctgctttcttccactcattcatggaggaagaaatattccaacaagaacccaagatgggtctgaggaatggggttatgttgaagtcagacccagtaagccattctttcaaagttgttcacttttttcaaattttcatcatttttcttttctgggtaagaaaaaagatggattttttattttgagaagtgaatattgtttgttaatttctcagaagcccacatgctctggtggctttacaagagtccttatagagttgaagatccctctaagccttggcctattgtactctggcttcaaggaggacctgtaagtttaataactcttataaagaaaaagttagaataatttgtgtgtaagtttgtctagagtggcataattgtaataatattataatattataactaattattaagtaaaaataagtattgtttaaataggtacacttgtcaaaattaggatcatagtgagtaatgtgtttgtaagtattataatattcatggtcatggcccttttaggaaatatatatggtgtgtatgactgtgttgtgtttgtatatatgtttgtgtgtattaaatgcttcatttataatatctttctccactgtctaagccatatcagttagtttctcgagaaaagagtttcattggatgctttagttttgagtacccatgttatagaagggatatgaatctgtttctttgtttttcttgagaaaacaaaagggagcttcaggagttggaattgggaattttgaagaggttggaccattagacacaggcttgaagccaaggaatttaacttggttacaaaaagcagatctcttgtttgttgtaagtggggaattattggttttaatctaatcaatctactatggaaaactagtattgaaatgtgaattttgattcttatgatttttcttctgtgttgtgaaatttaggacaatccagttggaacaggttacagttttgtggaggacacaaagttgtttgtaaaaagtgatttagaagcagcagatgatctgaccacattgttggagaagctctttaatggagatgagaaacttcaaaagagtcctcttttcattgttgctcagtcttatggaggcaaatttgctgttactcttgctttatcagctctaannnncattgaagctgggaaattgaaacttaaacttggaggtaaaaatcttcaattctcataaccaatctttac

SEQ ID NO: 121937 - DNA, 1285 bp, Cannabis sativa
tcccaataattgtcccccaactcaaacaatccaaagcccaacacacatttcaatcatgcaaataaacacaaaagcttctttcaaaaataaataaaaaaaacacaaaagcgccaaaaagaacacactccatctccatccatatccttccttttccaccaaaccaaaaaacaatccaaaatttccacaaaagcccttcaacaccctaccaaaatccaaaatagccgaggggcaaaatggtaattaactttttctctacgtggtaatccttcatggctaagttgacaaactttctctctctataaatatatatatatatattatacacacacaaactccttcttcgaacccaataagagaactcgctcgctaccatgtcttctctcgctctcagaagactagaatctagggctaatactccattcacagtgacataatatgtagttgaaccgaaggaataatctttgttcgtttttgtttttgtttttgtttaatcggaggaagagaaattggagaatcgaaggtgcaaaaatgggggtttctttcaaggtggcgagaatgggtacgaggtataaaccgaagttggttgaggttgagaatgatcgtttggatgaggaggagaatgagtcctctgattctcggtcaagtggtgatcaggtaatttgcttcgtgctcacgttttcttctgcgttgtggtttttgattttttttttttggtagttatactgtttgattgatgatgattgtattttttgattattggtaatgagtttgtttttgttggtgaaattagggttttgtgttctgttttggatttgagtgttgaaggaagtgaagtggtggatgattggtgtacattggggaagatttttagtaattttagttttgatactaaacagagcatttacccaattactaaaactcgatttttggtaatttttttgcttgtttgttttggaatttgtttatgtaataatgctttgttgggtcccaacaatttgataactgacactgaattggaacaaagaattaatcacaccaaacaaacatttattcaattgctaaaacccgatttttggtaaaaatatgactgagtgtgtctatagtaaatatgtttcgtgtagaattttttctcattgcggtttttatcttttatgatggggttatctagagagtaataggcatcaccagtccaattgagtatgttttgaagaaatttataatctagttacattgcatgttatctttttggtattgacaattatgctatacttctatgcgctttgtg

SEQ ID NO: 121938 - DNA, 885 bp, Cannabis sativa
gtctcgctcttgcaccgttaatggccatgtggcaaattgggaataactcccaattcttattataggagggaccacctctagcccatataggtagaattttagtatcgcaccagtctttagacacttcttaagcttaagttctattaaaaaacttttcaattttaacctttagttttcaccgcatgtacttatctatagatgagacaattgagtagtacattcactctattgacttgttgttacatattgaatttaagattagatttttactagtgttaagataggttatgttgtcggaggaatttagacaacactaaataatataaaaataataaatatttaatagaaaaataatgagtactcaacttagaacaacgagtattcgaacgagactacccgacaatagaacaaaaatggaaaaatataatgaacataaagatatatagtggtttagtcagatcacggtctgcttagtctattattgcaaaagatttttctctagtttattcatgttggatcactcctttatatacaaagcaagtgtccttttagttacacagagttgatcgattgtagagtcgttttacaattaatatcaacattaaattagggtaaaagaataaatgaaaaaaagtttaagtccgttttaataagtatagtaacgtatgcaacctttagggtgcgagtttcctgttcatattctcgtacaagctcgcaggctttgggtacgttctgtctttctaaggaggactaatgagcctcgtactaaggcgtctgcgttctgattgatttgcatatatagacaccttatatgcgtcgacaacatggggcatgcaagtgttgggttttgtgtcctaaataaaaatcatttcaatataatcagat

SEQ ID NO: 121939 - DNA, 2566 bp, Cannabis sativa
tagtatgacatgtccagcacttaacaactcagccaaatcggtttataactaactaactaaccgacttactaaaacaagaaagtttgtaactaaaatatcagttgaacacaaccatatttggagaaaaaaccaatttagtttaaaatggattatcttccacaaattccaccttaatccatttaaactgaaccttaacaaaacttactacacttgggggagtgatcttgttgcactagtcaggacctatgttaagcaaatccaaacaatgtcggaatttgcgcactagcaacactttagttcctgcatcagcaggcttctcatcacttggaactttatcgagattaacttcaccattttctatcttttctcttatccaaaatcttctgatatcgatgtgtttagatctctcataatacacaagattcttgtttaggtgaatagaggattgactgtttgaaaacacaataactttatcatctgtagttcttctagaattcctttgatccatacagcttccttgaacgcctctgttgttggcatgaactcagcttctgtggtggagagagctacaacaggttgcagttgagatttccaacttatgcaacatgtgtttagctgaaaacagtagcttgttagagatttccttgtatctctattcaatgcataatcggcatcaacaaaaccttcaagttccaccttgattcttgccttcttaaatttcaaaccataatgagttgttgtcttgagataccttagcaaccacttgactcctttccagtgttcttcaccagggttagacatgtatctgctgagtgtactaacatcatatacaatgttaggtcgggtgctaattatagcatacatcacacttccaattgcttcagcatatggtacttctgccatttgtttcatttctttgtcatccttgggagaatgatctgttgaaaacacaagatgtccagcaagtgggacttttgtttctttagaatcattcatcttgaatttccttaagacagcttcaatgtaatttccttgagttaatgtcattttgtggttctttctgtctctcagtatttcgatccccaaaattttcttagccactcctaagtctttcatctcgaattcactattgaggacatactttagtttgttaatctaattttggtcctttcccatgattaacatatcatcgacatacactagtagaaatgtagcagcttgtgatttcagatttgtaaagtagaggcacgtatcatattttgatcttgagtaaccaacctttgtcaatactgagtcgaatttcttataccattatcgaggtgattgcttcaaaccatatagagatctcttcagcaagcacacaagtttaccatccttggattccaccttgaatccatcaggctgtctcatgtagataggttcttcaagccttccatttagaaatgcagtcttcacatccatttgctctatgttccaatcaaattgtactgcaagggccaacatcattctaatggttttcattttaaccactggagagaatatctctgagtaaacaacaccttcaacctgagtaaaaccttaagctaccaaccttgctttgtacaatataggctcatcatcagtcattccttcattgtgtctaaaaattcatttacaaccaattaccttccgtccttctggtttaagaactacaacccaggtcttgtttttctttaatgactgcatttctgaattcattgcagcattccacttcttggcttgtttactgttgatggcttcaaggtatgtctttggcactttatcttgagactccattgtcatggaaagtgcatagtcaataatatcagcttcagcatacttagcaggaggactgatttctctcctaactcgatctcgagccaattggtaagatcatctaaggcctctcctccatcatcaggatctgcttcagattcttcagagttttctggtgttatttcttggtcaggaacaactctttccaactcgatgtgagtgctgaattgatcatcaccttgcttgcctgaaaaatcagaaaccacacattcctttaaatggaaaatcattttcattaaaaatcacatctctactagttaaaattttgttgttttcaagaaaatataatctatagccttttactccattaggatagcccaaaaatatacattttattgatcttttctcaagtttgtcttctacattttgtgcataagcaacacaaccaaatatccttaagtgagacatagatggtggtttacctgtccatagctcttcaagagtttttagctcaattttcctatttggactcctgttaattaggtaacagttagtgtgcaaagcttctccccagaagtgcttcttcaaacctgattctaatagcaagcatctaaccttatttagcaatgttttattcattcgttcagcaatgccattttgttgtggcattttaatcacagttttatgtcttaatttgtattccaatttttaaacacaattcagttaactcatcattaacaaattctaaaccattgtcagttctcaatacttt

SEQ ID NO: 121940 - DNA, 1671 bp, Cannabis sativa
attattctatattttacaactacaaatatataaattaattgttcaaaaactaattatcttattcttttaactttaatattaattaatgatataataatatattattagtaattacaatacataaagtaaaaaaaaaaaaaaacttaataaattaatatatataatggtcagtttcgattttttcagttggtttattacttaataaaaaaaactgatgacagttttaactattagcggttttttcaatttcggttctgtcagtttcagtttcaaaagcgtttgataggtcggtttaaataattttttcattttctaaattttatgctcaaccctagtgtacctaaccattaattcaaagtaaacataagccaagtcgttgaatatttcatatattgtagcaaagactttttttaattctcaattttcacctcgtacgggaccactcagatgacttatttattttccattttctaattaatttggttcatagaaaactcccatgaaggagccttttatcattttataaggaagtatatatatatatggaatattctatgaatatatttctcaactcaagtgctctgctgttctcgacatggaaaatgtatcccaattcttgtatataagttaatatacaaatatataaatatatatttttgttatatttctcaatttagttatatttttaatttttatttttattatgtgtatttttaaaattttataagaaaagaaaatcacttattaaattttaatttttttttaaaaaaatatttaaagttttaaaatttgagtaaaataaatataaaatttaaaaatattaaaaattaaatatatttctaatatttttgatataatgttacaaataatatattaatatttacatatttaaattaattaaaaaaataatattaatatttatatatatatctaaattagtctaaaataaataatattaatatttataaaattaactccactaataccgttaaatttaacaaaatatttttatatttttaaaatattttgttaaaccaataaaaattattacataatcatattttatgtataaagatttatatatatcagtcatccgtgtctataaattcaagtttatttctttttttttttactaatggttagattcaataaaataaataaataaaaattgtaaagagcatttactaatgatatataaccattgtaaaatttaatattagttattttaatttaataattattatttataaaataactctattttggttatatcatttaagggtaatttctatgataaatgttaaatcaatacaaaaataattaaattctaacactatttttttatattccaattacaacactaagattatattttttttattattatattattttattaaattataaataaataaaaatactatatatataaaaagtttatttataaatatataacttaatattaaaaactaataaaaaaaatcaatgtaatttataatgttacactaatatatttaagatagttttagagtaggattgattttttttttttgacaaagggattagaatcgctcataaatttacgacgcagacgatcgccactggcgctggaatctcctcgaaccaggataactcatcgtctaaccgcagagcatgctttgccaaactatg

SEQ ID NO: 121941 - DNA, 1797 bp, Cannabis sativa
  modified_base (1381)..(1409): a, c, t, g, unknown or other
  modified_base (1762)..(1762): a, c, t, g, unknown or other
atttaacagaatattcttgtatttttaagtatattctgttaaaccaagaaatgtcgttaaataggcacttttaatatataaagatatatatttttttacaaatattaataattggtccacgattattaggaattataagtaattagttagagatattattatatttaataattaggaatatttctgtagtgattaaaatactaatataatcaaaataaagttttataattttgatcataattatatgtcttcacttaataataatttaatttcacttgaaaaggaattagaaaaagagaatcaatccaattagaaaatttatatatatagatatgttaataaataactctacaaaaatctaaaaaagtaagaaaatctttattcaatttcttatctaaaaaagaagcaaaatattaaaaattgaagaaataaaatattaaaaagttgaagaatccttataagaaattacagatacgatttttttgaaaaaaactaattgataaatctatagaaaacttatcatttgattttaaaattactcatgaccgtatcttacttgtagttgtcaatacattaaaagttgctatcatcactgtaactcatttgtattcatctatgatcattcttctaattaagtctgctctgtacataaaataaattaaacaatattattaactacttaaaaatatacataagtactcagtcattttcttataaatttattatttatttattttcaattaccttaacatgatggctaactaaattaataaataaacgtttgaaaaaaaagtattttattggcacataaaaaaaaagtaatatcacatttatgggtgtttattggatccatttaatagtttaggtctattaaattggattggatccatccaattaaaaaaaaaaattaatgctaatttttatatatacatatatattttacgtataaccataaaatctaattacttatcataattaaatgaaaatactaattagtttgattggatgttggaggtattggatttttagacacctcatccaacatccgatccgatctaattggatattcaaaaataacacccgattcgatcacaattggatatccaatatttggcggttggttgtaattggatcggtctattgtcattagattggatgatttatgcacaccctattcataggtacatatacacatatattcgtccgagtgaaaaatattaacttgaggtctcatagtatcttcaacaaattttaaattcatcaattataaattattaatatgcacttaaaaaaaaaaaaaaacaaaaccaacaaagctatgtaaaactcttaagccaataaagccaaaaaaagaatcgataaataataataataataatannnnnnnnnnnnnnnnnnnnnnnnnnnnnaataataataataataattgtaccatgcaaaagaaaagtaagtttttataataattgagtattgttattggatatcagtagtgcccagtattttttataggtagcgtctcacaattagttaacaatattctctaaaaataaattaattacaacccaaacataattaattacaaaaatacctcttgctcttcattcttagccacaacaccagaaactcagcttgaatatgaatccattcaaagtatttgcagattcgttaacgatgaaaaattattaaaataatagtaaaatattaatttgtagatttatgtttaataaaatattaaaaattgagagaattaaggagagaaganaaaaataattttagagtgattttaaaatgccatgt

SEQ ID NO: 121942 - DNA, 1474 bp, Cannabis sativa
tatgcataattaacaaaaaaaaatattttacagattcaaataattttaatttgagaaagatttttttttgtttctctttatacattttgaaggaaaaaatacaaaagatcatacttcttttatcattaatatttaatacatacatataattgctataaaaaaaatatttaaaaaatgttaatttagaatatataaatcattaatacatctaatacaaaaaataataaatttttactttcaactcatgataatttccataaatactttagtttagataatgcttactttttatgttaacaatacatacaaagaaaaaacgaatcaaaacatcagagctttgttttattgctaaggtttcctccttttcttaaactgaacataccaagaaaatagctatgggatgaacagaaaataagaaactttgtactattccaaatgcaatcagggttacctgtccaagatccactgcagggttgagactttgtccacagtcatagataatatctgattgcagaatggaggtttctccagtcagaagatttatctcaacctgtcatgagatgtattcagtaacacagtcacagactaaatatttttcattagctaatgactggaactatcatgctgataatctgattgttagtaagatcaaggaactgtttcatgtttaagatttaaggagatatgagtgtttttgcaagactcacctcacttactgccgtgccaaagttcaagtattttaaggaagacatatcagggacatagtaagaaattgatgataagtttatagattctgagtaaccctgcattgaccaaagaccaaagaaaattgatcagtgattaaatttgagactaacccgaacacattaaataattccagaatcaccagaaagtttctgctgattgaggaaaataaacaaataatagtaccatgattaaaaagtttacaagtcaggagagacttatttatcttctatcatcaagagaaagaacaatgaaatttaagtagatacctgagcaatcagcatctgccatttgatagaatcagagccaatcgattcctgcagcttctctttaataggtgttaatctctcaaccaagacattacagcatagtctgactgccgcacagtttgactcagatgtagtgctccctgctgtatatcccccttggttcaaactcaatgtatcagcctgtatgactcgaactttatccaaaaagttttcagttccaatgattgaaccgagagcaaaagcagccgtctgcttcacctttgtccaaagcccctggcccagctcaattcctcctacttcaacagcaacagatccatctgatagaatgcttactttagctggagctgctctgaccgtcatctcgaccataattggtactctagatattcctcgttttttccatctattacacatattaaactcttctatcatttgagccctttgactaaattttgaagaca

SEQ ID NO: 121943 - DNA, 1070 bp, Cannabis sativa
  modified_base (856)..(865): a, c, t, g, unknown or other
caagggtacgattagtggagacattattgttagagttttatgatctaaaaaaaactaatttctatgtaattttatttattatcaataaaaaaaagaaatcatttgttgaccttgtcaatagcctttcttacatattttgttttcataattatttgcttaatatataaaatatattaaatactaaacatatagttattcacagttatattgatgtcattatattaaaaaataattacgattatatgcttcaaaataaggttaattaggatttatgcccttcaaactttaatatgtactaaattatgacccctgaacttttaaggtcgttaaaaatcccctgaactattgagattgttggatttaaggatttttatcaaattttagtaagaaaagtctaacatggataaaagttcagggggcatgatttggtacatgtcaaagctcgaggggcatgatttagtacataaaaaatcactgaattagtaaaatttaataaaattaaaagtccttaattcaacaatatatctcaatatagtccatgaggaatttttaactgccagaaagttcagggggcatgatttggtacatgtcaaagtttaggaaaaaaaattaattagctttaaaattgtctagtcttgagatttatcagtataatgaatttacacttatgtgacaatcaatgatgtggtcttcttatactaaggcaagtggtatgtcctttcaaagttactaataaagtagacttgtgttatacccaaattcagtgagcacatcagaggaagacacgtgtcgagctgggaagaacgaaggactcaaccatgcaatcgtaagtacacttggcatggaacaactcgtnnnnnnnnnnatttgcagagtatgtttataactcggttggctgaacagtcttctacgagacagaaacatacgaactgctaacttatgtatcgacaagaaaccatgtgagtgaaagtgtgcacgacgaggcttcaacctctttgcgtggaagagaaacgataacgataaaaacacttagcgtatattacatggtatacaaattaagtataaacagt

SEQ ID NO: 121944 - DNA, 1679 bp, Cannabis sativa
  modified_base (26)..(42): a, c, t, g, unknown or other
acataaaatattatttctgatctttnnnnnnnnnnnnnnnnnattatattgaaatggtttttatttagggcacaaaacctaacagtcactatgttcttctatctggttaggtgtattttgagttgtctaatcaagttctggttccaccttaacttattttgtaggacctgtctctactagaacttgttccacttgattcacatcaggttcttcattaggattgtcctgaatatttggttgtatttcaaaatctgttatgcctgcagggttagttgatatatctgcactagaagtctggttagatatacagggaaaaataccattttttttaaaaaattacatctctgctcgtgatagtttttaacccccttgatccctcaaccgaattctatatcctctaactcctttagggtagcctaggaaaacccctttgattgcccttggttctaattttttaatgctttggtgtgcatatactgcacaaccaaaaactctgagatttgttaggtctggtggttttccagaccaaacttcgtcaggtgttttcaagtttatggcactagagggacacctattgatcaaatatgcatctgtaataactgcctcaccctgaaatcccttagataagcccacactcaacaacatacacctagctttatttaacaatgtcatattcatcctctcatccaccccattctgttggggtgtgtgtctaactaatttgtatctcataatatcctgttctttacagtaatgactgaacaaatcattacagaattctaagccattatcagttcttaacaccttaagtctcttaccagtttggtttttcattagggttttccaaggcaaaaatttttggaaagcatcatttttattcttaagcaaataaacccaaacttttcttgaaaaatcatcaataatgtataggaaataggagcaaccaccatgtgtacttactttctctggtccccataaatcagaatgtatgtattcaatgatattttttttgatttatgggtaccagtgttaaatttaatctgtggtactttcctaaaatacaatgttcacagaaatttactttaaatacctgatctttatcaagtaggttctggctattgattatttacaaccctttttcactgatgtggccttgttatttgttccataaagtggctttatcatcttcaggtgctagaattgtgttgttgcagctcactgtaggctccccacatagggaataaagtccatcttcctttacttcttttataatcaccgtaaatcctttgcatagttttatttgtccatctttgtttttctttcaatctgcaagtcatcaagcacacttagtgaaattatctagctaggttaggtacataccttacacctcttagtgatctggtcacaccatcaaacatcttgaagctcacaattcttatgccttctattccaaatgtttgattattttcctatatgacttttccttctctaacatccctgtaactagacagtaaatctttgttattagtcatatggaatgtgcagccagagtctaggatccattcattccttaggttagttgcagccacatagacttccccactatcataaccatcactaaggctttacgtcggtcaatttggtcggtttatactacatattttctaacccaatgtaaa

SEQ ID NO: 121945 - DNA, 998 bp, Cannabis sativa
  modified_base (922)..(930): a, c, t, g, unknown or other
ctctctctctctctcacacacacggatttagtagcccccctttttccacgtctctctctccctctctctctcgtacattgactgtcaattgctcaccagctcatcgtcgaagctcatcgcactagtttgagccactcgcaccacatgtcgacgaagcccctcgcactagaccatcaccggagctgatctctctctctctctctctctctctctctcatgtggtggctccaatggtcctctatggtcggggtggtgtgtcacacattgtaggagatctggtggtagcttcgatggtttctctttcatctcactacctcatattttttatataaaaaatatttatgtttagatctctatttgtatatttgatctaatttgtgtatatttttttagtttggccaaagagtgataattcgaagatctatttttacatgtatatatatatatatatatttagtgtgttttgtacttctgtacaaaattgaccctaatggtataaaagttagattgtatatactatttgcatcagttctagttcgacagtaacatttaatagtgtcggtttataactgacgcgattgagtattaaggagacagaagctgatgtgtcaagttagttaggatagttgttatcttaattacggttatttgttgtaactaatttagtgattctcattctcttgcttgtgtatatataaggattgtaatactctattttctaatcaataaaaatagtagattatttcttcatcttcttcctcctctctcctctttctcttctctttcaatatcttctacactgagtcccgactttgcgttggtggcatatatgctgatcttagcaattgaaaatgaaagtataaatgtcagttaataaattgacacatatacccaaagcgcaagtgtaaagcccgcttagttnnnnnnnnnattagcagttgtttatgtttaattatgaaattatttagatcggaagagcgtcgtgtagggaaagagtg

SEQ ID NO: 121946 - DNA, 930 bp, Cannabis sativa
tatagtgtacaaaaatagtgtataatgtgtttagcaatgtatgtgtaatgttttatttataagaggaaagtacagcttggcataaagttgtgttcacctccaatttcaactacatgcactgtttgattaaaatataaggaacaacacacgaaatggaaagagcaaaaggacttagaaagatctagcaagattgaaaaaaaaaataaagaaaaaaaaaaaacttgtgtcctgctcaattggattgacagatcaatcataaggaacaaaatacatttgagaaaatttgaagaacaggtgacttatctcaataatttaatttattatttttgtcatttgatttctataaatagagagcaagggaattattttggggaccttggattcattatgggatttttacaaaaatatatatatttttgttgttctcacgttgtttctgtcatactttattttttacatttttataaaattaaatttcaaaaatattatcttaaagtttcaaaattataaaaatattgtatttctgtaaaacaaaaaacaactaaagcaacaaaaaaaaactacctataaaacacatagacaacaacaagagaacaattataaaacaataaaaaagacaactttaaaacaataagacatcaacattattgtaatatgcaaatcaatattgtggaaaaattacaactaaaatgcagaatcaaatcaactaaaactaaatcaacaaataattagtaatgactaatgacaagattaacaattcacacactataatcggagattaaaacagtgatgaacagagtattaaaaccaaaaatgattaaggtaataaaacaataaaaataacaccaagatatatattggttcaaggctcatagattgatatgatctatggctctactctagttttagaataccaccaaatcttcttta

SEQ ID NO: 121947 - DNA, 1534 bp, Cannabis sativa
tttgtattcaaagaagtaattaataccggttgactgatatattaaaactactttccatattaaaaccagattctcagcctgaaatatcccatatttcccatgatgaccaagtcaaatatcaatatatttatcacacagaaccaattttagttttacaattacacagaagaagaaccaccataatagaacagcagtactgtattaatactttaacatatatattatatataaatataacacgtaccatatataagtatttggagaggaagtttcttgatatcaaattagaacttagttaaattggagctgaaatgatggatgtaagagcaaaagttggatttatcgcattggcttttaggaattgaatatttttatacacaagacagctccaattccaaaggcggagatatttataacgtgcgtgtaataatatataataaagggttaggtaatcttctacttttttaataatttgtatttggtacaatgttttttttttgaacaataattagtgtaatgttaaatgtgtacatatcatcaattttagtcaacataaattttataagtatttcgaagtttacagtttgaatatgttttctaaaattttggcaaaacagtaccttcaatatggttaaatggaatcctgaccgtacatttttttaatagactaagagctcgatggttgaagaagcaagcatattgatataggtttcgttggaacaaccttcgtactctcagtctccggcttttaacattatcctctaattataaaaacaagatccatattaataccaaaaattaatataatatcttgtatagtaattaattatgtataagcaaactttttaaataatatttttttttacaatattcaattttggaacacgcacctatataattatgtaaattataagcaaatgttccaataacgttacgtaattttagaagagcctgatgagataataatcaaggggatattgagaattcttttttttttttgataactggtgggtgcagaaacagcacccaaccaaacttcattaacaactcagcaaaacatcagtacaaaagttcgagaatgaaactgaaaaggggatattgagaatgatgtatgttatgaaaggcaaactaaatatactgatagaagttcttaaatttatagctatcagatgttgtcttttttctttagttaggcctgccaggcttctttaggcttaggtacaacttggtcgggggtgtgttctgctactataattcgatttttgctattgcgattagtcttgtctttgtgacattattttgagtatttagtcttgtttctgagacatggttttgagtgtttattcttgtctgtgtgacatgattttgttttggttcttctttgttctttgatgaatcgctgtcaaattattgttagtgtggttagcagggccggccctgaatgaaagtgggccataggagaaaaaaaaaattttggcccttatgttagaaaaaatgtggtatttttcaaaatcggtaaaaaaaatgtataatt

SEQ ID NO: 121948 - DNA, 937 bp, Cannabis sativa
  modified_base (907)..(910): a, c, t, g, unknown or other
tgaatttcacttattatagcattacatatataaatggtttttttttggggtgttaaatatagagattatcctaaaatattgccaatggagaaaaatcattaatgcaatgttacaacataatctctcataattatttaagaatatttgctattttaagtgaatccacgtggaacataatatacatttatgtagaaaaaaagaaaaatatagaaagcactaaaatggttataaatttttatggatatcttttgtgttgttgccaaatcctccatatatttatttcatttaataaattacttttttatggatttaattattcctcttaaaaaaaataaaattttacaaaaaatgtatctatttttttatttgagaaaaatgaaattattattaagaggtaaattagacaaaattcattatatcatgatatcgtttatcaagcaaaaatcaaccaaatcaattgaaaagaaaaccctaataatattttttaactataaaaaatcaataagctgtcagtggtgaagcttcaaaaatgtgcgaagaatgcgaaatttctaattttaataaatatgcgacaaatcatactgaaccaatcaaatattttttaataaataaagtatctattttggaaagcaagtttcgcacatttacgtgtttttctctttttttatgctatcaatgggctgcattgtagatttttgagtttagtttttgaggaaattacactacatacatcttttaacttgatatctttaatttttactttttttttaaaaatttattatgtttaccttttttttcaatcattctaccaattttacacatattacttcacgataattttcactcttctctaatcaaaattttgcccaaattttcccacaaacctatacatccatctacaaagaannnnaatctattatgtttgaaattatgtctt

SEQ ID NO: 121949 - DNA, 732 bp, Cannabis sativa
ctttattctgttattatattttctgcaattcattaattcatttctggtgtgttgattattgtttgtttgctggttgaggttgttgtctaacacaacataaataattaaattgatatatctattatcaataaaactttcattgttttaatctctaaaatgggaaatgcttctcaattaaaagattttacacctattaatttattttatatcttatatataaagcggtgtctcgaatcattgtaaataaattaaaacctgtgctcagttcttcaatatctaacttttaaagtacttttatttatgcgatcatactatttttaataatattttaattgctcatgaatttttacatgcaattaataaaaaaagaatggataaaaaaagttaaattagtctactaaagttagatatgactaaagtttttaatagatcaattgaatgatctttttaaaatttatatatgaggttttatatctttttattgacttggttatgaaatgtgtttctactattatttctgttcaataaatagtcaagttttaggttcagtgactccccctctaggcacattaggtaaggtgatcctttaatcacctttataatcttttttagctttgttcagaatggctctctacgctaggggtgctcattcaatccaatccgtactattttgttcatagtgcatctgattcgcactaagtgcagatttcattttttggatccaatccaatc

SEQ ID NO: 121950 - DNA, 607 bp, Cannabis sativa
tcaggaaggatccttgaactttggagggattcttcgagctttgattcaacatgagagcgaagagtgccgctcactgtctagttcaaactttgacaacttcagggtcgtgattacttttacaaaggctactagactttcaaactctgtcatattgacaccatgggtggtggcttacgtcccagtcagaacttctattgcccgatcagggtcacctgtagaagctcctgcttccaccagccatattttagtgacggtgtcatgcaagtcttttggtcttccaagtcgatcatgaaatctagtcgacttagatctggttgttgtgtcctgaccacggagtcaggcaacacaagtgatgtttctagagtgaggtctgaatcgtctcgggatgattcgctttgagattgattatctggagcattatagtgactacttcccttgaaatagtcttcaggaggatcacaaatgtgaagagaattgaattagttgctcaagtttaactcttctccatatactcgagggaagtattcatattgttggcaatcagggccacgagcaaagtaacagcataactcacctctatcatctcaaaagtacttttaagtatgaa

SEQ ID NO: 121951 - DNA, 1326 bp, Cannabis sativa
  modified_base (868)..(876): a, c, t, g, unknown or other
tctagagttttcttgtttgtttgagtactcttgaattttctagaattatctttcacttgtgttagtagagggaattatgtagaacaatgtagaagctagtaatttaataatgtttctagattagtccatagagtcctataaatagagatgtaatcccatcattttgtaccaagtcacaaatcacacaagttgagatataaaatatagctacttccattcaagtattctctccgaagttcttattttccaacattgggaatgattgaagctacatatacatgtgacaaaatattagtggttgtcaagaatgtttagtaaagttagttgggtattggcttctatataaagaccaacttaagtgatttcaatgagtgtgaaaattagagaaccaagttttctccatgtgagttgagagtctctcaaagagagttgagtgtttctcatgagagtttttcttgagatttagtgttttctccatgagagttttgagagaatttttatgtattagtgagggttgagttttaagaactcgttgtgtaaactaggttactgaaacttcaatcttaaaagcaataaggaagaagacctagtgctttttcttcatgaactagacttataattaactgagtttaaccatgtaatttacgtatttagtttcatggatccatctgtgggttacgtagtttcatctggcagtatagttcttacttttgttcatctcagcgtcaagttttaattttaaatcttaatttggttcattcatttatttaatcatctatttagtttaacttttttttttttttgatagaaatagtttaacattcttaatgagtgtgatttgtctttaacaacaacaacaacaacaacnnnnnnnnnaataataataataataagagtattttacatttaacactttatttgacatttgatttttaaaaatgacttgagcatatctatttttaactttttttaatgtttaataacgtttggcatgttttaaatacagcatgtgtcctctttttatttccttccttttaacagatatgacacgtttattatacagtatttagaatcagaataaattaattaggaaatgtaacggaataaatgaaaaataaacggaatcaatatttttaatatgttgtttactaaaatattttagaaatggaatagttgtgatttatcttgtttactttattagaaaacgtaatcggaatgtttacattgactaaattactcttttgagttaaactatattatacggtagttattttgtaagatatattttaaaggataaaattttcattacatatttaatattaaaaa

SEQ ID NO: 121952 - DNA, 1076 bp, Cannabis sativa
taaggttttatggtaataagaaaatagggattgctccacattgtggctttaagggtttgggttcaatcttgagaatttggttggtgattcttattggaggcattaaagcaagatgattcatgtggatggattgggaggtatgtatatttatgattttgatgctttaaataaatattgatcttggttgatgattatgagtaataaagattagcatttaatgtgttttgttagctcataatttgtagaaagtttaacatgatggtgattttcttttttttttttttaaatctggtgatgataatttataccataccaaaaaaataaaataaatgtagtaggcttgattataatgtgggcacaaatatttttctgaatgataaataagctccacaactaaaaattctggttggtcaacactattgatgatgatgatgaccaagaagctagtgacatactacatatgcaataaaaaaaataaggcactgactaattaaaaggagcggtattaaatactagtagcgcctaatatttctagatatctcgtttatcgttttgtgtttggcttaggataattcttaaaaattattatattaaattatatattactcatatactaaattgaactaccttttaacaattctcattaagtaattttagtgctatatatagatcgaaaataattgcatgatgagccaagcaccagcgtgcatacacatgctccattcatcaacattacatggtccagtccaagtagctgaacatgattttcagcaaagaagtccactcaaattaaatgaccctatatagcaataaatttttatatatatttattgaactggctatatttatagaatttccaccgcatcacaatattattattaattaaaataatatacattgtgctcttatttgtaatgatatttttttggggaggggtgaaattggcatatgatcatttactatagtttgtaattaaattaaggataaaaaataaggaaaattttatttacacttcaaaaagttctaaaagcacctcattttaataattttttttttatataaaatttatattttta

SEQ ID NO: 121953 - DNA, 1166 bp, Cannabis sativa
aattttattgagatttttgaattgttgagtttcaatatgtcttagaattttgtgttttgacggaactcgacaagaattaattcaccaaaagctcactgagttttgtgtttggtatgttatatagaatgtttaatttgtagagatttaattttgattgttgacaagaattctctctcacgagccagccgccactatctttaacagattcaaacttagtatatatattgaaaataatagcaaacataatacataatgaactttattatttctctaattggcttatatttttaatgagctttcaagagaattgaattcataataggtcgagctttgcacattgcttctaatggcacaagtttaggcattgcagtagctttgctttcagtcatgtctattttttcttcaccaaatcttttccattcaaaacactgaatcaatgaccccaaagtcaagcccaatacacgttgggctaagccatgtccaggacaagctcttcttcctaatccaaatggcatcaagtacttttcgtcattaatcctctcaaatctttctggcttaaaacttagaggatcatcccataacttgggatctctatgtatagcccacacattaaccataaccattgtatcacgtggaatgtcatatccttcaatagtacaatcttctgatgaatagtgaggtaggagcattggagcgggtgggaacagtcgtagggtctctgagataatgttgttaagatatggtaattttgaaatgtcttcttcctccattaatttttcaccaattttttcgtcaatttcagctttagccttttctaaaacttcaggatggttaagtagatttgataatgcccattctaatgtcacagatgacgtatctgttccggccaataatagaacctgaaatacaaaaaataaaatgcaacttttatctttagattacatatttcttgatatataaataaaaataaatatatagaaagtaagtttaatctaatattatcatattaatcttatatacttaattatatacttttatattatcatatcgatcttaaaatcgttaattatatataagaataaaaaagatttagaggctgtttggctttaaagtttaaaaactgttttttgtttttaaaaactgaaaataatttttaaaaactatta

SEQ ID NO: 121954 - DNA, 1345 bp, Cannabis sativa
taactcaaagtatgcaattatgatgatgttgatatttgatgtttgaaattggatatcgtcatcttaaagatgcatatttttaaatcttattaatttaagtttattttctattttaattgaacatctacatttcaatagtataagataattcacttataaaaataaatgatttaagttgcaaatataatatccttatttaaataaaaaattattttactttacaactgaataaaaatcgacctactaataaaactctttcaagaataaatatctatacttaaatgagcctcacaattattatcctaaccttaatattttattgatgtagaatgatatttcacatctcaaacctacatttccttgattgacataatgacagatggtaagattgtacaaataccgtacttaaatatttaaattcatatctacataagattaagcaataaatttctttaaaaatttatgtattttgtttgatattttgaagatcaaaacacacgagcttctaaaagaatctcatatagagatttgccagaagagaagaaggaagaaatacgtaaaaaacaaagagagagatacgccaaacaaaaagcattgaaaaattatcaaattgatacgactaattcaagttatttgaatcgtaacaatttacccctatgtactgttgatcatgcggcatctacaagtacgcaacattcgtattatcatgctgatgatattaacaatgagcgacaagatagacatggtcacagagtatcaaagagacaatgccatcatcataccaacaaaatctcaactgagggaagatcttcttatcaagatttggattcttcaaatggatgcagtggtagaaataatttctacccaagttcatcttccgaaaataatgagtgatttaatcaggtatatacaaaataccgccttcttttttctaattgatccgaccttctgttttttctcatcagtccacctaataacaattctacaaacagatcccccctgttgatctcgaggactcatttagccacacaattatgtcagcaacttgtagaagtaagggttatttctacatcaaaatatttgtttaatattagtaaatattcataataagaaaatatcagtttgctaatttgacctaattaaagctttcattattataggtcattcgcaaaatagggtcacttgttttcgaaaattgctacaaaatgtgccgtctaaagcattttcacttctgtcggttcctatatgcatacattgtaaagcaaagagatttatccatgaaacaaatggattctgttgtgcagatggaaaaatgtatctcgccacaaatgaagttccaaatgaa

SEQ ID NO: 121955 - DNA, 848 bp, Cannabis sativa
ctagttgcaataggaatttctataaagaattccgtaaaaaaaaaaaaaaaaaacagtttttaagtgtaaaaataaataagccccaataatttattcaattaatatttaactcattaaaaaaattaatatcttaaaaagctttattattatttatttatttttagatagaggaaagttcaaataagcatgttgtagttcaaattttttgcgtagatatacaggtacagtctcgtgaaaagttgccacgtggagccagtctttataggaaaagatgatttgccacaagtgtacgcttgtctccactcatgtacttttaactgcagaaagtgttgttgactgtaaaaagtgttggtaactgcaaaaagtattgttagctacaaaaagtgttgttaactacagaaagaagaagtatggacacaacaaccaatgtgatcatacaaagaatgattgattcacctcgcatgatgtgaacttacgagaagatgcaatcgagacaatgtctagctgcatactatgtctcacatagttaaaggataaggaggatcgagagaaggtaatactggtcgcgcatataccgattatatgcgatgatcaagtatgtctctcctaggatgagtaaagatcatttctttacataagtttggtttgaatgactgtttgacgacttgtcagggactcgcacgttccaagtcgtcaacgcatagaatgtctatctatgcgatcaagggtgaacacagacattcaataaaataggtccaaaggcccatcttgcgagtagaacaccgtagagcctgcgagcagggacggacccattaacattgatgtggggctatacaaacaaaaatatt

SEQ ID NO: 121956 - DNA, 1822 bp, Cannabis sativa
gatggggtgttgtggtggtctgatggggtgtggtggtggtggtagttcattttttttttcttttgcttcagttcataaccaaagtaaaaaaactattttgcgttggtgcattactatttacttcggttaagaactaaagcaaaaaccttttagtgttggttactaagtgaagcaaaaaataaaactatttgcgtcttatggctatagcgtcagttacacaaactaacgcaaattctttatatgtcacttaaaaactaaagcaaaataccatttttgtagtagtggtggtagggagcttattattaaatctgttatccaatctatccctacttaatattccatgaatttttccagattacttgttactttggttgatgagattcacaagttgtgtgtctgtttctgttggggagggagggtggataaaagaaaattacattggtgcacttagaaaaagctttgttggcacaaagaagatggtggaatggggatccgtgatgtttttgtttttaaccaagctatgttggcgaagcaagctgctcatcttcgttttgagcttaaacccttgttgccaaactcatgaaggatatttattttcttaattcaactctgttggatggactaatactaagaagtcttcctcatctagagatcaatctcgtggggtagggatttggtccacaatggcgctagatgacttattaatgatagtacgcatgcataattgtggcccgcatgtttatttttttgccactttgtttcattaaatgaaacttctttatctttttctaaaagtactatttttctattctgattatttaaatgctaattttatctatttaataattataattaatcattagaccaattactatttaaaattagttattagttagactcacaaagtgtctcaattaactaataaacccttataactcttttcttctcaaatatgcccttccttaatgaaatttataaataatacacagtcttctttagaattctaattgatttgataaattaattaattgattctacaaagcaatattatctcagatagtgtgggaaccatgagtcgatgtaaccaagcttccaataagcagaaatttatgaataaatttcctaacttattaattcctcttaactccattatagattcataattgtactcttgattacatagaacaactatatataccaaatacaaacacgttatgaataatttattgtttcaatctaaacaatcaatgatcctctttagacagcttacatcgaatagggacaaaattatcgttttacccatcaatgtattttatcctttaaacacttagctacttacaaatgatatttcagtaaactaatgtaattatcgaaataagagcttttccatataagtcgttaagccaagctctaagaaaatcatcgtttcacttctaaatagttgtagaagctatagattttatttctatgattaacgctcccaattaattgtactaccaaatttctaagatgtaagtattgcctagtcttatgggtaagttggtaacaaacaagtcaaagaacttgtatagtacaattaaggtagaatctaatcatctcgggattgagatcaattgacctaagatcaactaagtgacatcgacttagaaaatatataacggtaagtttataatatcttttccactgtaaatattggtctagtctgatgtatatattatacatctgatacaagcatactttgttaatgctttagaaaggacattccacttatctaagtgtaactaaatcatatcgatgtttattacgtcagtgtaaatcaagt

SEQ ID NO: 121957 - DNA, 2697 bp, Cannabis sativa
  modified_base (2645)..(2645): a, c, t, g, unknown or other
taatttccgcgcttatttttctagtaatcccaataaagggattagggtttcataagtttattgggaagcgtgcctaattatttagggcgttacacaacctatagcagttgttgtttgaacatcctttcttcccattaccctacgctttagtgtcaggggatggggagtatgttgacttcttcttactgccttttgagctcttggctcaagtgacagaatcttccagcttgataaagccatccgctctatcaagaaagtcgttcatggtgtagaccgccctcagacgaaggtcggaccataaaggactcatctccttgagtttgactgaaagtgtcgttacccttgcatcctcactaagtttttttgtcttagcagttgcctttaagaatcattgaatatagtccatgaggtgctcatcttcctatttcttgaattctaccagatcattgggctcgatttggcattgtcgagaaggagcgaattaccttttctaaaatattaataagcagtgctaattgccttttctaataaatattatgaaatgcagtcattacaagggaagtcttcattaaaatgcccaaccatgctacactgaaagcatgttttagattgcactctctgagatgatgtttcttacaacgtgggcacttagggtaagaataactctagcgtccaccattgccttggttctctcgaaaccttttgttttgtcccaaaccaccaaaatccagggtagtctttctttcctaattagcggtggaatcatcactatccctaccatatccagaagtaggaagagcgggggtttcaccaacacttggagtctctcggagctcttgaagaaatttcaccgcaccttcggctggcagagccttgtcaaccctcgcgacataagttgttgtttcattggtagtaaatactggatcatgtttaatttttgcatttagacccgccagatatttctctttcttactgaagtccgtggtactatacccgaagccaacttggctaaacgatagaacttcattgtatacacttttcttgacatgccttttacctgaaccagattagtgaactcttttcacttagcactgcagactgcctcattataatacttagcattgaacaattcctaaaactctttccaagtcgtggtagtgacgtctcgggagagggacactaattccaccacatgagtgtgtcttcctataaataaatgaggcacaagtccccagtcattcctcacgattcctatgaaattaaaaattctttccataacagtgagccactactcagccttcataacatccgggcctcccaggaaaactggaggcgcctgcttacaaaatctctcatatagtggctccagacaaatgacaacaataggttgctttgttggcactgctggaaccatggcggccgatgcttactgtggaggcactgtaggaggacctttttgcctcagccttagcatctcttcatcttgctggggaatttgagcttgcattttggcaaacctttgctcccaatctagaggagcttgaggtggattttcatgtctaccaccctaaaaccctccatggcctctaccgcatctacggggattcaaaggattttgacctccccgaccgcttgcagtctcgaccatgttacccatactccaggatgtccatttaataggtattagcctgcaaacccataagttaggtaggtcagacagcgatcacatatattctatgtaccagacttatggattttgaggcaatgtatttaaataaataattaaaaactattatgctccctaacatacttttctaatcacataaattactaaacaagtaaaggcttactgaactttgagtcgagcttttctctgatgatgatagtacatgtcttgatgatcttcggtagacaaacctagcgcctctgataccaaagttgtaacgccctgatacttaggtgcgctacagtgattttttaattaacgtgccgcctttgctaatcaaagggttttcctcgaaaatcatgccaaattaaatttttgatgtaaacaattaaacttcataaacatatacatatatatatatttacataagttgggatcccgtgtttaaacttttataatctttatcaaattacttttacaaacttatcgcacaacgactacaaaatacaacccaagttgtcccgagaccaaacactccaggtcgcagcgtctcgacatgtacaatcatcatctgaggtcagaactcactcctatttagcctttgcctttcctttacctacacatgaaagtagtatttgtgagtcaatagactcagtaagaaaaacatataacagaaaatatattaccgacttgtatctaggcaccaatatacctatccacaagacttatcatataagtaagaacattccttactaaggtacgacaactataccacatgcactacgtaccgctactgtatgagtgttggggttttccctatacctcaactacccctaagtgttataccacatacactccgtacttatctgtaccagtgttggtaacaccgtaatgtactctttatattgggttttgtgcgataaataaaacccatttcaatataatcaaatttactaataaagattagaaataacatttnatgttgcatggttcacatgatctatttcataattatatttaatgtataaatt

SEQ ID NO: 121958 - DNA, 2902 bp, Cannabis sativa
  modified_base (1950)..(1958): a, c, t, g, unknown or other
  modified_base (2853)..(2856): a, c, t, g, unknown or other
taagatcctcgtaaaataaattccaacagttttaccatttaagcatgttagtaagggtattatggtcattttggtttaagggctaggcgaccattccttttagtggcagatgtccatttattttattaatgaattaaaattatgttttgcttttcactaactttaagcaagtctgcggaagattggtagaaaatgttatctctaggatcgacccacaattggagggacctacaagcaatgttcagaaagcaatttgtagcagcaaagacctttaacctagaagctagttccctgaacagtgtcaaacaacaactaggagaaagcctgaagaaatacataaaacgtatgatggactactaaaaaagaggttactgatgatatgaaggtggtgactttgagatcaggattgaccacatgatctttgctatggggacaactctaacgtaagagagcatagactttgactaatttcttgacaagagcccaatgattcatcaatttggaggaagcttatgctcaagcttacagagtacttccagcaccttccaccaacgtagcaactgcccaaactttgcagatgactactccataaattttccctccggcaacttcctttacgactcctaccgtttacagaccaagtgcttctgcgcagccagctacacaggctagttttttcagatttggagtgatacaaacctgatacagtgtcgttctcggacaaacgaaccaaaaagcaaaagctctggagtcccatgtaagccaatcgcggagaaaaatgagttacaagggtccaagttggaatgattctacgaagaaagggaagactcaagggttaagatactctgagtaaacaagccttgtcgatactcgagagaatgtctataaggcaacttgtaacacggtccattacaagaagcctccaccaatgtacaagggcggaagacaaaaaagagatctaaacaagaggtgcgagtaccacgttgatatagggcacacaaccaacgaatatgactagttgagagatgaaattgaatccgaaatagtcatctatccaattgggtaagaataccaattatttatcctggataggggttgcacatggccagcttttattcctagacaacatgaagaagttaatcctcctcagggagtaggccatccacaagctcccaatgcacaatcccttcaagggtgcaaaatgctccagcagcaagacctgatgtagctcccgatcttggaaatccatagcctcttgaagtagcctagccaatgttagatggtcatgtaacaattatttctagtggaccacacattgccgaaaacacccgaaatgcacaaaaaaggtacttgaatgagttggatcaagaaaaaatttgtaacttggtacaataacttgctcagtgtcctcggatgatgaattcgccaataaatttcacggaagatgacaccaagcatgtgcattttcctcataatgatcctttggtgatagaagctcacattgcaaataaaagagtttccaaaatcctcgtaaataatagaagctctattaacatcattttcaaagatgcctttaaagccatcgatcttgtggtagaaaatttgttatcttgttcaattcaactgcaaggatttaatgaagacacattgattccaatgggaaaaatacaacttttaatgacgatcaatggagaaatctctggaagcaatgcaatatcttctttcaaatacaacacctttatggtagttgattgccccacaacttacaacgtcattctgggaggaccatttctagttgactttggggcaataacatccatcggctatctacgcctaaaattcccaggtgattccagaagtattaatggaatgatcagaggtaaccagaagagtgcattcgatccaatctaacctttttctcttcatctgatccaatccaattagtaattnnnnnnnnnaaatcatcatccgatccaattcaattagacctcaaaatccaatctaatccaatccaattactaattggatttgatcggttttttaattggatatccaattatacacttaaattttaatattaacataaaaatatgaagaaaattacgtaaaaattaaatatccccgctttatataagttcaatatccattgacataccatcgttacaatataatgtaactaaaagttttaaataattaaaacaacaatatttctaagtaataaaatagaacaaaatattatgaaaacaaatacacaaacaatcaagtgttacaaattcaacacaaaagaaaattcaataaaaatataattaatgcaagttatattttttattatataaataaatataaatttttaacatatataaatataattggattggatcgatttttaattggattttgagattgacatctaataaccgatccaatctaattagaatccaacttttagcatctaatgcaacccaattgtaattggatatccaattttttgtaattggattggattagatcggttcaattcaattggatgggattggatgttgcccactcctagtttcaaccaagagtattctcatggtccgggaagggaatgtgaacatcttctcaaccagcactgggggtggtccacgaaaaggatgagctagatccatgggtagacatggaacgaacaattgagcttatggaagaggtagagtaagtatgcatcggtgatgaagatcccactagagtcagtggaaaagaatctacctccaggagttagagaaaagattgtctccatagtcaaggcaaactgtaaagcccgcttagttaatttggaaaattagcagtatttatgttaatcaggaaattatnnnnagctatttaaataatttatcattattatttatggaattcagatatg

SEQ ID NO: 121959 - DNA, 971 bp, Cannabis sativa
  modified_base (26)..(41): a, c, t, g, unknown or other
  modified_base (68)..(73): a, c, t, g, unknown or other
aaaattattaattttacgtaaataannnnnnnnnnnnnnnntatatattttattaagatataattatnnnnnnatagaggtatactttgttaatatacaagacttataaaaatgtatattaattaattacagtttagaggttattcttatttataactggctcaaattgagacttgattttttttataacattagaaattattcttgaatagagtatttttagatagaagttctactgtatgtagtacaactatgtagtctgaagaactctatagttcatttcttttgcttagtggagtactctcttcaatcttttattacaatcttttaattggcatttgtacttgaaaatatacgtgacataattttttttaaaatattttttacaacaatatttgttatacttataacattattcctatagatttttaaatagtttacagtccttaaaatacaaaccgaaaaaaatacaactaaaatataaactggctaatctgttaattggcgaattaaaaataaatccagcttgtctaattaacccgatcaaccggattatggtttttttgtagtttttaatttaacatatatacataataaaaaaaaatgaaaagaaaagagcaatccctatcggactaagttagaaacccatcttccattcgcctctaccgcaatcaacatcaacccatccccggcatagcagcgggtaggacaccatattagggaggaggtggcttttttttctcggccaagaaccaagtcgacagttccatcgaagatccaaccgtctacggctccacccaagacccaacgtcgatggctcgtgacagtgtgactgtgacattattcttctctttctcagcatcgacgtttgtatggtggtgttaagcaaaaatttcacatttagaatattaaaaataaatgcaaaatacaatttcacctatgccaaatttatagcataagagtttattaat

SEQ ID NO: 121960 - DNA, 573 bp, Cannabis sativa
ttgcatccttggttttggatgatttagtttaatgaaatttaaccattattcaaaaaaaaaaaatctaaattggatgattaatatagatagttagtttttaatatttagatatatataatttaaataaaatatatttattacattaaaaaaaattacttaaatataaaaataaaatattattttcaatctctattagggcttttcatcgaaattggaaaattgtggtttaagttcgaaccgtgataatttgaactaccgtagaccataatcgggagaattgtttttttgtggtttggttaatatggaccgtttactacgtaaaggttaagttgtgatttgtaataaacaattaacggttaaactggactagaccgtttataataaataatcgatttatatatattttaagaatttttacaaaattatattaaattatattttttatttacaaaaatctgataagcatatattttaacttttattcagtttatattttgtttttcttttaataatttttactgtaatgttttgataaaagaaagagaaaagaaaataagagagagagagagagag

SEQ ID NO: 121961 - DNA, 1751 bp, Cannabis sativa
aacaaaatatcaaacatcacgggctagctttaaactctttcaagaagacaaagaaagagttaaagaagatgatggacgaattagaaacttgtataggatccaacacacaatagtttctacaatatgatgaaaaatcaagtcataatatttttattttttgaaaggaatcaagtcaaacttccactttttgtgtgtagattgtatagagtaagtatttaggcacttcttatagttcatctaattttgtaaaagctagattgatagcttaattagttcatctttgtacagctattaatgtatctatgaagtagccttttttacaacttggagagcgaactccaactatggttctcttcaattattttcatcttcaaaaagaaaagaaataattttaaaaattaattctctaacagtgtttggagatcaaagtagacagttgtaaacttgaactatattcatcaaaaaaaaaaaaaaaaaacttgtactatagaattcatgtaactctcactggtttaattaaaattagtaggaaattccatggtacgggcatgaatggacgtttctgtttttggcatatggagaaaattatgataatttatttatttatttatttttgaaatataataatgtacattatagttattatataaatacaaatagtctgtacatgtataaaaataaattcaaatactagtatatgtccaattgactattattatttttgacactgcaccagacatagtaaaaattcttattgtgaagaataaacccgctgctaggggttgggtaatggtaagctgattcgcttctgggatgatatttggccgtgctactctcctcggagatgcatgccataatttttatcaattcataaggttgacctcaaagtgatagactacattcaatataaaggagaaaaaagggttctccgttcctctaattgatcgggattgttattgacgttagatcttatctgactagattactagtgaacaggtaaccgtaatgacgcgcagaaagcacattctttctagcatgcaatgtctttagtattgacatcttttccgggaaaactaaagcagcttgtctcgatacgcgagaacagttgagaacaaagtggcgaatgggtgcgtaacgcgtgggaatctactgaacaattcaggccaaaatccttgaagaaagctaaaaagcgttgtttgatgagtggatttttttcaaaaatttgtgggatgcatgctataactgtaagggtaaatattacttttgaccttatgttttgtaaaaattactgatcgtactcatattttattaaataataattcgaatcctgtattatttaaaatgatgtaaaataatatcacaagtttaatatattttttgcatcaattcgtgctgaatattgattttaagttaattatgtatataaatatacctaattacggggatgtttatccaattcaatatgtaatatttttcttatagtacatctaatcctaggaatggcaatgatgcgaattggggacgacttttaaattaccatcccatctctgtaggttaagtatataactatacttactccaataaccatcggtgatagtgcaggtattaactaatataaaattagaaaaaattacagttacctgtaaccgttaatagaattgggtgattctacaatgcacccccttaaaatggatgtattgatgcaccctttacttgtttcggcatcaagaaaaattttttagtctaatttt

SEQ ID NO: 121962 - DNA, 1438 bp, Cannabis sativa
aatgctgatggcagccacaaatgctacaaagccaggttagtagcaaaagggtatcatcaacaagaaggatttgattactcagaaacttttagccctgtggtgaaacctataactataagggttgtcctcaccattgctgtcacaaagaattggaaaattcgacagcttgatgtcaataatgctttccttaatggagagctccaagaagacatctacatgcatcaaccacctggttttattgatccagtctatcctaaccatgtctgcaaactaacaaaagctatatacgggctcaaacaagctcctagagcttggtttgacaagctctcatcagttttattgcagcagggctttcacttctccaaggcagatcagtctttgtttatcaagattacttcaaccagttgcatctacattttagtttatgtagatgatatccttatcatgggcagcaatgatactttggttgatgatctaatcaaagacttaagcaacacttttgctcttaaagaccttggtttagttgattactttcttggtatccaggtcactcgatcttctgatggcattcatctctcccagaaaaagtatttacaagatctcttaactaaggctgatatgcagaatgtaaatactcagaatacacctatgaacagtggtcttaaactttctcactatggcagtgagcaagttaaggatgctactctatacagatcgattgtaggggcacttcaatatgcaactatcacacggccagaactatccttttcagtcaacaaagtttgccaatttatgcaaactccattgcaggctcactggacagcagttaagagaatccttcgatacattgcaggaactctggattatggcctctatttgactcctgcacccgactactctcttgaagctttttgtgatgctgattgggcatcagatcctgatgacaggaggtcaacatcggggtattgtatcttctttggtggcaatttagttgcttggaaatcacagaaacaagttaccatcagcagaagttctactgaggctgaatttcgaagtctagccaatgttgtctctgaaatatcctggctgcaatccttactcaaagaacttggcatctctcagcccatcattccttctatatggtgtgataatcaaagtagtgtgcttcttgcagccactcccattttgcatgctcgcacaaaacatattgaaatagacctgtattttgtccgagacaaggtgctgcaacaccaaattcatgtcaaacatgttccagcctctgcccagttagctgattgtctcacaaagcctgtttctagcactcgtttcaatgatctaagagacaaactgtgtgtagtttctcaagctacactcagtttgaggggggctgtcaaggatactaacggttaagttagttatcctgtgttagttaagtgtt

SEQ ID NO: 121963 - DNA, 2004 bp, Cannabis sativa
tatttaatatatgttagcacaccacactaatcctaggtcctaacattaccggccgcccgagtttcaccttgtcctcaaggtgattgatggcaacaaacgctaactccacaggttgagtctcagttgacaggttccaaatgaaagaatacggatcatgtgagtgaattccattggctgggctaaacaacagtcgccatccgaaaaatcgacctctatcataaaaccagttcagcaacgtcccctgttgagatatggtaatcctaggttggcgacccgaaaaaactcgcaccaaattctgccttcttcctcgatcaaaaatccaaaattgcccaattttctttttaacaatcttgatcgagcaaaactccagagcacttacttttcttacccatgtacagtaagacaattgaatgttaaccccattaacagaaagaggtaatgctcttttaccacaataaattctgaacaatgaagaaagagagagaagataaggatccttacaagtgtggcaacaatagaaagaatatgtaaaccttggtttttctttgtcaaatataatgacttctgcatccctccaaagagttacctccaagtgccctttcttatcttttgcttcccaataatttttagcgggataaatttttgagcagattatccaaagcttttgaaataacatgttgcagaaattaagttggtctccatcaccaagaattattgtatcattttcatccaatattgcatgtgcaacatctgtgaaatgtacacgtgtggagcacaaacttgccatcatactatatacaacccaagtcatcacagctggctttcttaccaaattacacttgtaattctcaattttgtcaagtgaaaatactttttttggttgcagatttatcaccaaaggagcacgacattggatgatatcctttgcaatattcaggttatgtgaattagacctatggtgtgggcctcagctagagtaagtgatattaaaggaaattggactgggcctggatcccatgtcttgggctcatgccattctttatctgaatgggccacctcaaaaatatccagggatagaacaagatttagagatgagctatatacgggaatccatgagtcagctcaggtcggagcaacgcgtcatcggacgttcaacaggcagtctcacgatcgggcatgagtgtcttgttccttggccatcttctcaggcggcgattcccgctgctgattcttctccggctccgtcttcagcggcattttcttctttagccatttgtcttcttctccattggagatgatctccgcaacgttcttctcaggtgacggcactatcttttgcttcttcaccgactctggcaacgcctccaattgctggtttttctccagcgtcaccaccaatggagccttggtctcggcggattccatcaacgaatgcacacccagatctcgtgaccaaagtcctcttcgagtctccttctccggcaatgttgcctgctgtgggttcttctccattgaaaatttcatttcagaatcttggaaactcaatacagaatttgtttgctgatctattgagatctcaacttttttctgtgagagttcctcaacaataatcgatggttctgcttgaacaggtttcacatcatttttaacctcaatatccatggaactctccgattgtagatcctccgcatcattagcaacattcgtcacttccaacacatgtgaattcctctctgtctcttcaggaaatggtggtgctactccctgaaggcgatggctgtaggttagagaaccattgacaatttctctggagctgtcgagtctagcaaaggctcgtttgtgttctcttattgccatttccatctcttcatcaccttcaacatccgtctctagtgttgaaggagatccagaagttaggttcggcatgttgcgactccggattccctcttggttgcgaacccatactgattgcacaacctggtggatccactcattgagattgtt

SEQ ID NO: 121964 - DNA, 1794 bp, Cannabis sativa
  modified_base (100)..(102): a, c, t, g, unknown or other
  modified_base (333)..(338): a, c, t, g, unknown or other
  modified_base (1738)..(1747): a, c, t, g, unknown or other
aatacatatgttctggacttaaaatttatacataaaatgatgtgaaccatgcaacataaaatgtgatttctgatcattattaattagtaaatctgattannntaaaatgagttttatttagggcacaaaacccaacacattctacttatacaagtgtaagtaaaccacagtgttgattatcacgtcagtgtaaatttagtgcattaataaactgtgggactaaatagtttaaagcataatcatgattattttctactgtgtagacaacactataattatgaatagaatttatatattaaacttatagtcatgaaagtaatcatgtgaaccatnnnnnntaaaataatttctgatcttttattaattagtaaatctggttctattaaaatgtattttattttgggcataaaattccaacaaaattttggtatataataaagaaagtagatttttagtgatgtattttaaaagataaattataaagagaaatgttaaaaggcaccaatggtcccaagcatcctctaacgtgtcgtgtcactattggtacagttaagtatcaggtcttatataatttgatatgataaattttatagaatatcgctaaccaataataagacgtcatttataggttgtgcgaggcaccactaaggtcttatagcaatgctcaaaaatactggaagtgttctaaaagtattttattgttaatgatataatttaatattagatctcgtaagttttaattaaataataaatattgaagactactaatagattgtaaagcattatcttacagtagtattagacacaaaatatacttttttttaagcttcaaccatataaaaatatatctttaaactagtaaatgtagtcgcgctttacgcgattttataataaaataaatataaatttaattatgttttaaaaaaaaagttagtggtcgttctttctatatatttagttatattacaatttaaatattgtattttacaaaataaaatataataatataccgattctaattataatcaaacgtttttactttaattttaaattttttttcctaacctcaataacaattgtgactcgattcctaatctatcttaactgtaattatttttactaatatgctcataatattattacgtttcatgttgcaaaatatagaatcgaaattgtcatttaacagtggttgtaaatattggttagcggtactacacttacattcaaaatgaaaaggtaggtcacaagttcaaatcttctccttatactttttttaaaaaaattattatttaagaaaataaagtatcgaatcaataatttttgtgatacgggttctaaaatgatatttattatttgtaatagtaaaaaaatatatatttatacttgattaattataattttgtaatatagtctcaataatgaatttatacattttgtgattagcacaaatatttgattaatgtataactataattttgtaagtgagaaggtcgaaattttttaggttgtaatatttgttactattatttagaattttgaaaattgacatgatacctattataattacaatatataataaggtattaataattaatttgtggactattaactgtaataaattaaagtaaaataccgaaggaaggatataatttagaccaaatggtttcatgatattgcccccggtactatttcttattaatggtcctaattttttttaaggtaaatagtggcataagtnnnnnnnnnnttatgtttgtaagcggcataaaccaaatgtttatttttagcggcata

SEQ ID NO: 121965 - DNA, 2377 bp, Cannabis sativa
  modified_base (2311)..(2347): a, c, t, g, unknown or other
ttattttaatttttttatacattaagaaaaaaaaatgagcataaataagagccttatccttcattagggctgccactgtagaaagtggtacttcacatttgcacaggtcctattttgttagtgtcaaacaaattgttttattatatagctaatgctaaattgaaactatgtgaaaaaaaaaaataataataaataaataagacaatctaatctattttttttttcgaaaacagacaatctaatctattataaatagctagtgacatgatatgaacttttaattagcttgtttgtaaaaaagttagttgaaagtgtaaaaaaatagaatattagtgttttggcctaaatatataggtagagaggatgacttatggtttgagaacttacttcaattgtaaaaggtgagttgtaaagttcgaatagaaatctcatgccttttcataaggtgttgttatggttagtttggtgcaatacactcgttgattttaaataataataataaaataaataaatactgtttgtaaaggaattatttttaaatgggatatagatggtaaaaccacttaaattttataatttgtgtaacttaaccacattaacatatttttttgacagttatattgagattttatgtcctaaataaaactcatttcaatataattaataaaaaatcagaaatcattttatattgcatgattcacatgattacacattactttcgtaataatatatttaatatataagttttattaaatttcgaatatataattactcatgattatagtaatgtatacacagtaaaaaataatcatgattatatgcttcaaagtgcttggtaccacgttttattaaagctctgaatttctactaacgtgataaataacaatgtgatttacttacacttgtatacgtggaatgtcctttccaggacattaacaaagtaaacttgtattagatatatcatctatacatctaacttaaccgatattgatagtataaaagatattataaacttactattatgtcttttctaatttgatgtcacttatttgatcttaggtcaattgatatcaatcatgagatggttaagttctagcttaattgtattatacaagttctttgacttgttcgttaccagcttatctgcaggactaacccatacttacatcttacgaattcattagtgcaattgagttagaccattaatctttagaatttataacatatatgaaccgtgttagggtttatgccctaaaacgcctgcaaagatattttttattattaaataagagttgaatattttgatatatgcatgaatgctaaattattatttaatattgaataatttatatataaatattagaaaattctttattcatatatgagcctgcgacttgtagctatacatagaattaagatcacttagccttgaataaaacagtcagcaagttaggatatctttaatcaatgttgttagtacagttcactatgcccattctttcgtgtaagtaatctcagtttgaaatattgatgtaggatgacatctaagtgaaggtgatgtatataatagtatttactgagattgttggaaaatcaattataaataatcaaaactgaagaaacaaacaattacaagagaaaaagtaagaaaaacacaaaaaaaatttacgtgtttggggcgttaactagccttagtccatggtcattgttattaagtaattttttagcttgaaaagcctttggaatacaacgaatgtaagttctcaagttatcctgagcaagtattgcaagagaactcaacccttaatccataggattcactggttatttgtagtagtttgagaattaaatttagtttttcttttccctatattggggagtttacaatgaataacacacttgggctgcctcgtagttcagtccacgagaggcagcacacgaaggagaggatctgttgactagacagattgaatttagttggatttggtcaacaccgtgagctatgattttgggcaattcactgtgaattaattgcttggtttctattttaggaaattttcccatttagcttgatatgatcctctgtcgagattggcaaatcattatttctttatttgtgtgcaggaataaaaaggaaaattggactagtctttcgggaacacgctgtcttacccttccagcctcacggtactagacttgcttgtggacatgagctgtcaatggcagaaggttctacaatcacagagctaaagtacattcctagaaggacctgtccaaatgggcttggcccactgtaacaccctaactatcnnnnnnnnnnnnnnnnnnnnnnnnnnnnnnnnnnnnnctcgttgctaatcaacgaggattatggaaa

SEQ ID NO: 121966 - DNA, 567 bp, Cannabis sativa
cttaactttatatgtgtttaattccattgttttagagaattcatgttttgggtgttcatcaacatacatgttagcaaatcttgatcctgataaaataatccccaacacatagacctatagagccaccacctgtcgctgataggacataccatgaccctgcttggagcaatttaaataatgcgggaaaccaatctccttcgtcaaattatcctcataagtccaacgattctaggccttgtgaccttgaaagggggaagggacctccagtcaactttgggggagggacctagaggctctaccgtgaaactagagggtatgagattaagagagtaaggacaaatgaaccactccacacttagaattatttccaagatgaaaggggtattttgtgtaggcacttctctcacgaccctgatggctagctgtatgagtacttccctcgagttcatggggaaaagttgaacctgagcaatcaattcaactctccttgtacttgtgaccctgtggaagactattttgaggggaagactcactatagtgccctagacgaccactctcgcagtaacc

SEQ ID NO: 121967 - DNA, 1428 bp, Cannabis sativa
aaaaaaacaaatcagtgtatatagttatggcagaggaaactagacaagacccaacaaacacggttcgagttgttcaaaccagtagtagtaatagtactgctactcctattatggatgaaaataatgaagggaggcctaaattaccaaattttttattatctgttcgtctgaaatacgttaagctaggataccattacctaatcacaaacgccatgtacatcttactcataccactcctagcaatatcctcagcacacgtgtcaactctcacgtaccaagacttgctccagctgtggaatcacctcaaattcaacctcgttttggtgaccctatgttcgagcctcatagtgtttttggccactttctatttcatgactcggcccagaaaggtctacttggtcaacttcgcttgttacaagcctgaggcggagagaacatgcactagggagattttcatggaaaggtcagagaggattggatcctttgctgccgagaacttggcttttcagaagaagattttggagaggtctggtttgggacagaagacttatatgcctgaagctctgttgagggtcccaccaaacccttctatggaggaggctaggaaggaagccgaagctgtgatgtttggagccattgatgagcttttggagaagactggtgttaaggctaaggatattgggattcttgttgtcaattgtagcttgttcaatcctactccttctttgtcagccatgattgtcaatcattacaagcttcgaggaaatattatgagctataatcttggtgggatggggtgtagtgctggccttatctccatcgaccttgccaaacagcttctccaggttagtatatatttatattcttttttcttttttcattttattttaatttcaatccatatatattacttctatatctatattattaagtttaattacacaacttttttaataccatagattatatataatataaacgaataattgataatttagattatgatcgaaattaataatataaattaattaacagtcaattagataaatatttattgaataaattattcttgttcggttctatatatatttatattaattaattatagaggttttactgtttgattttgtggtcataacatttattattgataattgtatttcaccatcgaaaataacatttgtttgtttgtcgagtatattaactatgtgtatatgtagatggtgatatatattaagttttggtagttgagatacacggatttgttgtcacttttcaacattcatcaaataagatatagaagctagttataatataaaaaagaattgctaaattagggatagtatttttctttatgtcatattatatggtatattaaatatcgaattttatataatttaaaaaaataaattttaaaaaatattatta

SEQ ID NO: 121968 - DNA, 727 bp, Cannabis sativa
tttccttactctcatcttttttccgagaattccactcccacatccccaatctccactgtccaccacattcctataccatctgctctatttccctctcatcagtcaccaatagaacagccaacaccaactcagtcaccaacttcaattccaccagatactgttatacctgctgcagatcccatattgcagcaacatgagccacctgctgccttaccaactggctctgctgctcccctttctcatacttcccatgtacctccaaccacatcctctcatcacatgactacctgttccaaatcaggtatttacaaacctaaaattcttgtagctgagttaaaagagtatgaatgttatctcaaagaacctacttctcttaaaatggccttaaataatcctttatggaacaaagctatgggagattaatactatgctcttaagaaaaacaatacatgggttctagtcccttatcatcatggtatgcatgtcatagataacaaatgggtgtacaagataaaactacaggcagatggaactgttgaaagactaaaggcttagctggtagccaaaggttttcaacaaactgttggagtggactactttgacacattcagccctgttgtcaaagcaagtaccattcgcataatgtttactctagcagtcacctatggctgggacatacaacaaattgacataaataatgcctttctaaatggtgacttagaacaag

SEQ ID NO: 121969 - DNA, 653 bp, Cannabis sativa
taaaataaattccaacatcaacttctcatgctcttcaacctaagtcttggaagcttgctcctaagactaaagtgtgtatattggtaggatattcagatgagactcaaggtgcctaattttattgtcatcaagaaaatacgatatttgtgtcaacaaatgctacttttcctaaacatgactatatgaaaagtcataagccacgtagtcaagtggttatcgaggaattcagaaatgagaattccaaaccaatgattttagcaccattagttgaacgactgatagcggttaccacaattcctgtataggacaccccggtacatcgtcgtagtgggagggttgtgagacatcttgtctactacgaacatgaagctcatgttcttttttctgacataggcaaggacgatccattgacataccaagaagcaatagataatcctaacatagacaagtggaataatgccatggattcagagatggactccatgcgcaccaacaaagtcttggtatatgaaactccacctgaggatattatttccattgggtgtaagtacattttcaaaaagaagaaaaatgctaaagggaaggtagagacctttaaaggtaggcttgtggtgaaaggctacacacatggagaaggcatcgactatgaagat

SEQ ID NO: 121970 - DNA, 942 bp, Cannabis sativa
ttcacttctctttgttcttctattccctcttttccatcgtctcatcttcattgatttcggaagcaatattttatgttttgctcagtcattcatattattttatattgattgaaatttcaatttaatgttaaaattataaaatcaaaatctccaattgtttttgacatcacctaacctctcttatttggcataaatacctaaatttctatagattttgaataaaatcaaaatctaatcatttattaaaaaacctaatcacttcaatatggtataaatgtatagatttattatattacaagtatgtggtacttgataaatcaatgagccacaaaactcagattatagaaggctttaccaaattaaatgagcaaaaaataaggcataaaactcaaattattggcaggttgagctggttgcccatttcgtttctatgaatatatattacactgttgtaatagttattttacttcctcataaagtgccattttttggaatcattgatgacgttagctaaagtttaatgttacgatgttcgatcgatgttttattgggtcttatgggagagattagtcagatcgttaaggtcttatgtagactatcgggatactagtggccataacatgtctaagatgtattgtgagaaaggtcgtatgggatcgcaaaaggtattggattataggaagctttaccaaatcaaattaaagagcaaaaaatgtaccagagcaatgaaatagtattgtgaagtgatgaattgggttaactgtaacttaccaggttactataagtcaccaagtaactattataggtgagctcatttttacaagaagctccaccaattgacaaagtgtaaccacgtaacacagaaggcacgtgcaatcacactaccatagccctcgtaaagcaataaaatatggcaaatctaagagcatgtttggtattgtt

SEQ ID NO: 121971 - DNA, 1561 bp, Cannabis sativa
tctctaagtctagttttctctttatggaaagaaattggagccttatatagagttagtagctaaaaaaacccagcacactaacaatcaactaactcctaacataacagaattttccttttatagattcagttataactgttattgaaaacagttaacaacagttttgagaaaaccaacgaaaagttgagtttttaatggattatcatccagaaatttactttcaaaaggatagataaattgtgattcataatatttaatatatatttttttccaccatattgagtatccttagcaagatcaataggataatcacttataaggatcttaataaattttttaaagaaggtaaaaaatttaaataattgaatatttaaatgttctcatcaccacaaaatttcatgcttaattttatgataggtaagaaaaataagaagtaattgttgaaaaatataatcataaaatttatgcctcaatacaaaaattaataatcaatatatgaataaaattcatgaattattattgtgcatacaactaaatgataaaaaactaaaaataaataaaatggtgaaaaaacagtttggaaaaggcctgttcacgcacccccacgcgcatggatttgttttgctttttaatggtttgtacggcatgtcattttttgaaaacgacatgtcttttgggcggaatgatgttaaccaatgggtcaaaatgacccgtcattttctgttgagggggctagccttttggggcgaacgacatgtggtttctgcctgacagaggcaaaagacatgttgtttgccttgtccctatcaccgaaataacccacttgtgggtccataggtctgtaatagacacgacctgtttctcgacccggtcatatttaacagccccgaccaccgatttcaacgcccattgatggggtttgttccattttcaatgctctatcattttctaatatccatttaaaacacaaaatcatagtcaaaatatcatgaacccgaaatgaatttttcaccatcgatgaactccaagaaaaatatggcatctctccatgaaaaaacataacaaccattcgagatacagaaaaaacttattcaaataaaaatattcaatttcatgccaccgattttaaacatattaattcgaaaaaaaaaatcagatttgaaaaaatgagttaagtgttgaaagattattaaggtctaaaattaataacttttgctctaaatatcaattgttaaaatacttatatagtatgagcattgtaatcactacaatcagaaagttatccaataatgctcataaaattccaagatccaagcatttatttagtacattattaaatgtagagcatacatcccattaacattcttcatgtgagccatgacactagggcctccaatatatgcacaagtttgtagagatattgagagatgaaattatgaagggtaaccctctatttctttatcaccacacacactttctctcttatcttactaaacatacattaattcttgaaatttttacatgaaaaatccattttgcacaatttattacctaaatacct

SEQ ID NO: 121972 - DNA, 675 bp, Cannabis sativa
ataccttgaaggcgagatgccatatgatcaaccaggaactaaggaaccaaaaattcctcatagaaataagggaaatctgggggcacaacctaaggtacgtgggtcatcgttaagggatcggtagcattctttccaagctcataggaaacgaagtcacacaaatctcattagggggaacgagatgaatcgaacccaagaaagaagagcaaggcgtgaagagacgagtgttaccacaaggcatgcgatatcacatggttgatcaatgcaaggaggagagaatacccatcgcaataatgattaagaaggcaagtttgatttttgccaacaacttggtcaaaagcaaggggattcaatctatttccgaatagacgagttggagaataagttcaggaggcatcaagtcagggacccatgaaaacaatcaggatgtgattctgttgaagaattcgagtcggaagcttcagggtcaaagaggaaagacgactctaagaggtcgtccaaagataagaaacaaaagaaacacgacaaatacgtacccatttatactaactatactgagattaatgaaactcaggagagtatctacctcgcgcatgaacagaaggtcgctttcaataaactaaagcccatgaaacacgcgagatgtaaaaggacccaactagacgatgtgaatac

SEQ ID NO: 121973 - DNA, 714 bp, Cannabis sativa
gggaccactgctctaaaaagttatatataaatatttatttaatttgggtgcaaaatatggaaaataggtatatgctacgaaaagattccaaatagttcgtctatgaccacgggtggttgcttgaatttcttccaaaataggaatgaaatgacgataatgggtatgtttgtaattgtgaaaaaggaaaaggggtttggtggagaagggtagaattgtcaaaaaggtgaaataattgtgttgtgttgaaagaaatgggaatgaggtggtgtgtgacacgtgagacgggtgggttgaggagccaatagggtgaggtgcatgcctggagaattggaatttcaagattgttttcattttctcaatgtcttttaaaactgtttttaggctgacacttgcttttaacaaaatattttcccactccaataaatgtggatatttacttttaacaaaatatttttacaaacttggtaataatattcaaaattaatagctctagtttttacaaacaaaaacaccatatatttcctcttaaaataataaatcttagctgtataaattaattggctgaaaaaaatgctattttttaattattcggttgaaaaatatgttttagttagctaattcaccacaacagctttttataaggtattattttacgaaaacataaaaacaacaaaaaaattacaaaaacacggtttcacaaaattttaaatattt

SEQ ID NO: 121974 - DNA, 920 bp, Cannabis sativa
tttttttagtgtagcgtaatggtattttacaatcatatattagcttaatagcttaaaggtcctgagttcgaacccatgacctctcctttttcccatccatccttcaccactaagctagcctttacaaggttttgctatataatataagttttataattttttttttgttgttattttaatttttttgaacaattttagtgtttttacaattctttttcataattatatttagggagtaaaagaaggtgtgaaaaatctcaggataaactaaaatgatttttggcatgtgaactaaatcttaggtggttgaccaagagttttccctttggttagtgttgacgcggtttttcgtcaaaggatttaagaatattgtaatcaaacaagatgaacacgagcaattgtaaattaaagtacactgctttgtgaaataaatttttgacaaagatgaatacagatttatagtggttcacccattttcagcagtaataggctagtccacttggagtgttattgatcccaatacttgaggagggttctccagagttatgttctccaagagttcaatccataagtgagttattagaatgatagagtgagagctcaagagaataattttgtgataatcaaaatttgggtcgtccctttacaagtgactccattccccttatataggttttcatctagaacacagttaaattttaaaatctcttaacctcagaagcacctttctgtaactatggacgggttaggtttaaaatacaaaatgataacaaaaattatattccaaaataaatatctagaataatgataaaagttgaatatatatcttcaaggtcatgttggtaagtcatgagaggcacttgcagctgagatgaggacatttcctgtagtaccctagaattaaggaatggattagcaaa

SEQ ID NO: 121975 - DNA, 678 bp, Cannabis sativa
gaaattctaatatataaccaaggttttgttaagatgtcaaagtcgaactaaccattctaatacctccaaaggtatttttatggtgctttgcctaatttagttgttatattctaaccaatttctatataataatcacataattgaaggcgtatttcttcttccatcacaataatcagctaccactgtttttggaattgcaagattccatgccccattttgagaaaaacattgcatcattaatgatcaatgtaaaaagaaagttccttgtatcatcttcctttagtatttttgtaagaagaatataaatttaaatagtaataatattaccttattaaacaaatagtatgtaattgatttcaaaataataaaaaaaatagtcataatattaaatatatatttatacaaatatattgtaaattttgtcctccattttctggtaaaaataagagtgcctaatcaaaataaattcatatgctattttaattcagagaaactacaaaaaaaaaaaaaaaaaataataataataatagaagaacttatatatcctgattttatttaacaggttattttagggaaaaaaaaacagaaaaatacaaaaaaggaaaaaaattacaaaaatactttgggccggcccattaaacatttatacagtccacatacaaatatttacaaaaatac

SEQ ID NO: 121976 - DNA, 938 bp, Cannabis sativa
caagatgtgttaaataactataacgtacatgaccatgagaaaaaaaaaattgtctaaaaaattatttcggatgctaaaacagataagagtacatcattaattagagggtgcattgtagaattttcgtataatgtatattctcaatttatgaggctaaaacatgagatagttttcaataaattaacttccttgtaactttctctttgtacgtcgtacgtacgtacgtgcatgtacataaattgcttcaatttcctttttttgttttttttttatatgttttcaaataccaatatttgatttattcaacaaagaaaataccaatatttgatctttcggaaagaaaaaaaaaaacaatatttgatctcattaaatttccaataattaatattttctcaaagaaataaaacaataatactaattaattttggttttattaaaaaagctaatttataatgaattttacgaaacaaattaatatttttctgtcattcccggaatattaggcttaatacaacagaattactaactattaatatcttctaaaaaatatatatggggacattataattaagaaatttacttttatgcttggaacaaataaaaatgagaaacaaaataatccttcaatttcaaactgagattgctattttgaacttctctaaaataattaaactcaatcaataggtcccactcacaaatcaatagggtgctttaacaataaacacaacacaagacaccaaatcagctatagtagaaaaatgttaaaaaacacccatagtccgtacagtacgtatcatctttatgagggctcttgcctgtgtttttttcttcttctatataaaaaaataaataaaaaaaaccttaattatgtagaagaaaataagtatctaccttttctaaataaatatatataattacatttatatattatattgttt

SEQ ID NO: 121977 - DNA, 2730 bp, Cannabis sativa
tcaaccacttactgttatctatctgattgcgtacttgtctcacttaatccagctcatttccactggaatatacttctcctggaacctttttcttttgtttgaatttcccttgttgcttttatggacatttgttttgttatcatggattcattgttgcagattctacctgagaaatacagctactatagaaggttcgatcaaaatacaagtaatgctacagactgtgtcatttgcatgacagccatcgatctcatgcaacgttcaaatgattgcatggtataataccaaaatattcgaatcttaactattattattattaagatgatgttctaatcagccaattcccttgcaggtaacaccttgtgatcatttcttccattctggttgtttacaaaggtggatggatgtaaagatggagtgcccaacttgtcggcgtccactaccgccggcctgaacctggttccttcttctatgtccatattgtaggatcaactgacataccgaactcactaattttggtaaaacgctggatggcatgcaagaaagactctttagtagctagcactcaatatgtcactgctcctatatttcttttttgaacttgggagggcttttttttctttttcttttcttggaataccactttctgattttacagaagtgatttttatagtctacttgtatcatgaattttgtacataattggtatataatttgttcaatcgaaaacatttttttttttgttagtgtaatcctttttcttttttttttcctcgtatgacttgtattttctttgcctaaacgggatattataattatactgagaagagaagtttaatcatattttttctaatcctcatttagatgccaagttctaaaatcttatcttcatgaggtcaattatatgtgtattttgtttcaggctggctatagatttcatactcggttgagaaaatctccgggtaaagagtgatatatatccacttccaaatggtcaaggtggtattacttagggctgtatataaatttttataaaccctctaatccgaataactcgtccaaattaaaccgagatcacccgataaaaaatgcaaattaaaaaattcaacgaaaatataacctgcctaatttttatattgggcgggttgaaaataataccaacccgcccaatcaacccgaataatccgaccaacccgattaagagaattttttttatatatatttatatatcatttaatttatatgactatgtaaaaaaatataaagttaagattaatatgtttttttatggtggttgatttgaactttgaattcaatctatatacatttatttcattattacaattaattaaaatataacaattgaatgtaaaaataaaaaaaaaactaaaaaaaatattagcggtcggtttggacccgaccaaactgaccaatttcattggacgggttactattttcttttttcttaattggaagggttgcacttagatttttgtaacccgctctttacattgggttaaacaaaatgtagcataaaccgaccaaactgaccgacgtacacccctagtaatactactacaccacccgtctttcctctctttcgttttttcaatttgcatgtattgcgtaattttagcttaaaagggaacgttttctttcgctttcatttttttttaatggaaataggatttcattaagaaaacaaatcgtttaataacataaacataaattcaataagaacagtactctcatcgaagaatcgtttttgaaaaaagaactacatgctctaaaaaaattatggatcactctattagcaggaggataaataaaccaaaaaaaaaaaagattgctcaaataattaaccaaatgtctattgtcattaacaattaaactaaaatgagagttcatcattaattgactacaaacggtctcaactgccactgagcaatcaatgtcaataaccactgtcgatcattctttgtccttgatccaactgagagtctcccggatgcctaaaattttagccaacttaggtttcacatcactagaacaacaaatggtacgggcttcaacaatactgcccagatgatcacgagctgccaaattgatgagttgcattgaacaatgcaacatcaacatttatcttcatttgattctcttaagctttgcccaaaccttggcacctgtaaagttatctttcatttagaaattcttccattcttcaagataaactttgctggggtaaccacatcattcgagcacattatttggaatttttatattgtcatcgatttgataccgtagatatgagtaaaattttaaatgttcactaataagtaatgtgaatcaatggtaaagtagtcattcttattatttcaaattttatccacctgatgtggcatggccacatagtcaagactaaggatacgtgggatacaacccatcaacaacgggacaaagttaccttacacgacatgtcaactgttaagggttctgaagcaataaagcaaaactgtcaagcaataagcaaaaggagttatgcaggctgtaaaggccatggccaaccatgtttggtcggccaaagggagcaggtctgactgaccaaagaaaggttataggccggccaggtcttgagcataggttggctggccaaagaagtgacttacagatcaaaagtggtctgttcgaccaagaaagcctgacctttgcaaggaaagctatacaaagaag

SEQ ID NO: 121978 - DNA, 2813 bp, Cannabis sativa
  modified_base (2315)..(2322): a, c, t, g, unknown or other
  modified_base (2467)..(2483): a, c, t, g, unknown or other
gctattcttggcctaaaaaaagtaatctggtaatctagtatccttatgcattaacgagataaaaatagagatgagtagagtaaatagagagacacacagaattcatagtagttcactccacatgtcgcaatggtagtggagctgcatttacttcgaatttttatttctcgcaagaattacaagagaaatgactaagtgtgaaacctctaatttctagagagagatactctcaccttataggtcttttctgaattgtgaaaaataaactagaaaagctctccttttatagagaataaggtcctattaaaataataataaaatattccaaaaattatggaaaatacatttaagctatttttgaccgttgatgatgatctaactgtgaaattgactctggaggtcaatcgtcaatttctggagcttgagtcgcctccacaagcccactttgggtaagttgtagcttaaatttgcaactctcttgagtacaaaatttggacttaatacctttagaattgtgattgaagtgagagacataacttgatatagcattgaaatatcttcaaaactcaagttaaattgcggcaatcgaatcaatattgagtgagttacagtcattttactgaaggttgctctaataccagcgcccaggttgacatataacatcaacctggacgctgggtgagcgggaaatcatgctagggatgtattttttgatgcctaagtgatattttgacatcactttgtcaatttctttgttctggtgaagtcgtttaccagttctcagagatgctgctattttacagaatcgtgagactcgaaactacttgatttgcaactaagtcactttgccgaaaaagtgaaaatatgaaattatgaatttgacttgtctatgtttatagctctcgtttactattggaaactagacaaattctcaagacagaatcaaaattagataagtagaaacaacacaccaggtcatacgttaacttgggcgttgggtgctctttctggtgcttctaagctgtcattttgatacttcttaggttcttaaaattcaggacgaagtctcctaccatttttttgaccatgccggagaggatgcttggagcataatttgcatttgagtgatcgaagccagcgcaccaggctgatagtcaattcgggcgctgagctcaatttttcgccccttgggattctcattttctccctaattttacttgtatctttattatttttgaagacggaaaaaatgctcaaaacactttttgaagaaattatttaaaaacagcccaggttggcaaaatttcaatcggggctgggcccaacaccaagtgtcaacctgggcgttgggtctagtttcaggccactaaatggttctgtttaattcccaaaaatacttgtaccttaatcattgaagaaaatggagaatattcttagaagaattcttaaaaaaactccttggaaatagcttagattgacaaaatgtcaacttgggcgctgggccagcaccaggtgtcaacctaggcgctgggccagcaccaggtgtcaacctaggcgctgggccagcaccaggtgtcaacctaggcgctgggccccccattctggccacaattttggactgtttctcccccaaaagcacttgtttcctcatttttgatggcaatgaagaaaagactcaagacaattcttcagtttaatgcttggaagtgccccaatttgacagtatgtcaaccttaattcatgtcttagtataaattttgacccatttgcactaagacggtccaaaaaattgaaactctagttgggttgtcaacttggatgttgggtgaaaccctaggtgcccaggttgattttcagggtgttgtttcgtgtattttcaggtttcgagtgaaaccttacgaagaaactagtttcttaattaaaaagaaaatcaatttcttgatgaaagatctttggtgagcaatttatttaaagattaaataggagtttgaaaattaattttacatatacatgtcatagcaattaccataaaataatttaaaaacaaaagaaatgccataatggtcaaacttaaaattttcatatttaaggaaaatatctaatttttaaatccatgttaagtgtaaatttttcttttcattttcaccacaaaacatattattatatatatgggtaaatatcattttggaccttgtgttttgtaaaagttattaattggaccctctgttttgttaaatgacaatatgggccctatattttccaaaatggtaaaaataagaccctgaactcaattttttaacaattttattttttannnnnnnnaactttaagataatttctaacaggaacagatatataaaatataattagttttgtcataacatctctagatgggattattattattaagttttattttgacaaaaaatcaattcagggtcgtttttgtacaattttagaaaatacnnnnnnnnnnnnnnnnnttaacaaaacagaaagtccaattgattacttttacaaaacacagggtttaaaatagtatttatccaatgtatatttatttactaatttacttttatttgtcccctcagtgataggtttcatgaaacttcaatataaaaatggtgtaatatatggaatcttctagaatttggataagggtatacttgtaaattaaataaaagatgctaaaagatcggttgtgttgactgttgagctaaaagatcgggtatacttgcaaattaatacaaatttaatatttgaattaaaaaaattatattatatatgttataaatattaataattatgtggat

SEQ ID NO: 121979 - DNA, 2536 bp, Cannabis sativa
  modified_base (37)..(39): a, c, t, g, unknown or other
  modified_base (1892)..(1897): a, c, t, g, unknown or other
gagatcaaaggtgtgggaacaatcttgttaaagaatnnngatgaagtcatgaagaccttgcagatctcaaaagaaatcttatctctattggtatgtttgataaattggggtatgttgtcaaagttgaggaatgtgtaatgaaaattgcacaaggtacataaattatgttgagaggaaggttgagtaatggattgtatttcttggatggaaagacaatagcaggttgagtagcacctgttatggactcaactaaacatagccaagcaaggctatggaacctcggattggggcatgtaagttagagaggacttaagaaaatgaacaggcaaggactattcaaagagaagtctatgatgaatgtgttttggggaaggcttgcatattgaagttcagcaaggcagaacacaccacaacaaaaaagttaacttatgtccattctgacttttgggggccatctaggattctaaccaaaggtgaagcatattactttatgagtacaattgatgattacagtaggaaagtctagttttatttgttgaaaagcaaaatgaggctctatgaacctttgatacatggaagaggttactagaaaatcagactgggaacaaaatcgagatactaagaactgacaatggtctaaagtaatgctcaaataagttcaagggattgttgtgccataatgagaatcaagagatatagaactgtgataaaaaaaccctcagcaaaatagtgttgctgagaggatgaatagaacattgattgagagggttaggtgcatgttactaggagctagtttggacataaccttttggggagaagctcttaaaacaacctgctacctaattaatagatcatcatctgtgtcaaataacttcatgaccccacaagagttatggacagggaaacccccaaacttagatcacttgaaagtgtttggatgtaatgcatttgtacatgttagacaagattgcaactagagcattgaaatgcatgtttctaggctaccctgaaggggttaagggataacgtgtgatgtttagagcttggatttaagaagtatttaattagtatagatgtggttttcaaggaagatgaaatggccatgaaaaccaagagcacttacacagacaatgaatttgttttaaatgagaatgtccagattgaggtagagcatgttgctattacagcaccaactaatgttgttccagatggaactgaggcaacagaaagggaagacaatgaagatcagcaggaactcagcatctatcaattagctagagataaagagaagatagagaaaaacacgatcgttttggttatgctaaattcattgcatatgcacttatgattacaaaagaggttgacagttcagaacccactagctttcaagaagctatgagaagtaaagatgttgcagcatggctgcaggccatccaagaagagatacagtctcttataggaagaatagaacctggattgttgtgaagaatccagagttctacaagctggtaggatgtaaatggcttttcaagcataaagaaggtttagggaatgagcctaccacattcaaggcaaggttagttgccaaggggttcactcaaaaataaggcatcgattactatgagattttttctccagtggtcaagcaatcttcaatcagagccatgatagcaaagacaacaagcatggacctagagattggacagatggatgtaaaaatagctttcttacatggggaattagaaaaggaaatctatatacaacaacttgaaggctttgacaatgggaatccagatgaggtatgtctactcaagaagtctctttatggcctcaagcaagcacctaggcaatgaaacttgaggtttgacacctatatgcagaatattggatannnnnnaagcaagtatgactcatgtgtgtattttaataatcaaacctatttgctactctatgttgatgatatattgatctttagcaaagcaaaatcagagattgagaagctgaaaaggaaacttagtgatgagtttgagatgaaatatctgggcaaagcaaagagaattcttgggatagacataaagagacctaagcctggcatgatagtactttctcaagctgcctacctacaaaaaatattaaatagattaggcatggtcaagtgcaaaccagttgcaacactacttgctcagcacttcaagttgtttgcatcacagtcaccaaaaatagatgtagaaagagccaagatgagcaatgttccctacgcaagttgtgttgggagtttaatgtactttatggtgtgttcaagatcgagttagctcatgcaatgagtgtggtcagttggtacattccagaccctggccctgaacattgggatgcactgaaatgaacaatgaggaacctaaaaggtactttagacattgggattgtgttcagtaaagagaacaagttcaaggaagaaattactggttttgtggactcagattttgcagcaaacctagacactagaaggagcctaacagggtttgtgttcactgctctt

SEQ ID NO: 121980 - DNA, 1093 bp, Cannabis sativa
  modified_base (27)..(27): a, c, t, g, unknown or other
actaatcagattgtaaagagttttatntagggcataaaacccaatagttcgtacgtttctgtctcgtagagggctattcagccaaccaagttataaacataacgaattatatttccagcgagttgttccatgctaagcatacttgtcgtttacgtgtttgagttcttcccagctcgacacgtgtcctcctttgatgtgcttactgaacttcgggtataactacaataaacaaatatcacataattattgatgccattgtacttattttctatttcacatagacctacgtgttacgctcatacgcctatttatgtctatgtggcatagacccacgtgctaccttcacacgtctatttacaataagtccttagaaaggtttatctcggttctaattactgagtctaacctaattatgccttgtattgtcaaaacgacatgaaaatcccaggaaaatgatgcttggtggctttggccctctagagagaaggaggagcttcttctaatgtgattttttagtgaaagtgaaatgtgaaaaatgaaaattgaaaaaggcctttcccctgaaaagtacttatatagtacattcagaccctttcttcacttacttcacctacatcagtgaagacaactaaagtagtcatttttctactgcaaataagatcacacagtcaaggcaaagtgtttcaaaaggctaaaaatgcagcaacttttagtcaacaaaggctacaactgtcccgaccgcaccaacatagatggtaaaggccctatctgtatagaggtccgcacagggacttggggggcaaatgttatcccaattgttgtcctcctgacgtggcatgcttatatggacaaaattagtgcaacgtggcagtacaactcaccaataagaaggccaagccatcacctaagcaaacagagaccccgacactcaaatgggaatcaagtggcagactagctccctcagaggtgctggctggccacctctggccggcccttgttagaatatgttttaccaggatctacattggttgcagtggaattaaatgactccttccgctcatatctctaacccttgtatcctttctatcacaga

SEQ ID NO: 121981 - DNA, 865 bp, Cannabis sativa
attattattattattatcataatttaataaattaagctttaaaaaattatataacatgtatgtatgaatgtattactattaatttaccaggagtgtcaatgacattgatgagttggccatctgtgcgtagagtgtggtgcaattcacaagtggctgtaacaccagaggaacttgttttcgagttgaaggcctttctaccaagaatggtattgcctgtggcacttttgccattgcctgttttccccactaatacaatagtaagagccttattttcattgcatatggaggcattttctcgatcactatattcacaagcatatccacccatcctacacaatcagattatatatagagagaaatttatgaacagaggtaaagatatatgatacttgccaaagcaagtaagagaggagaggagaagtcagagtgggagagagatgatatttcagtttgcattttataatatatatacagtagaatctctatttaagaatactctattcaagaataatttctaatttgttataaaaaaataaagtcccaatttgggccagttataaataagaataacctcattgtaattagttatacattttttaagtccagtttatttatgtaaaattaataattttatttcaaattatagtgcaggtataaatattatatgtactcgaaaataattctaatataatatagattaagaattgtttattggtaattttattacattgatattttttttatattttgatttttttttaaaatctaactctatttagttataacctctcaattagaatattatttttttagtacaagtatattattagatactgtatatatcgtttatcgtttatcgtttatc

SEQ ID NO: 121982 - DNA, 4183 bp, Cannabis sativa
agtcgacagactcagtaagaaaagcataatcataaatataaacatatattggactgtaaccaggcacccatacacctaatcacgatctgataactgggttaggaacgtccttaacaaggtatgactaactgtgaatccagtctatactctctactctagtcatattgatgtggtagcagttcattcataatatctagaggcctagaacatggcatctttgtgcaactctatgtacacttcactgataccctgatatgctaatttgatggccactaatttacctaacatatatttatttgtacctcgatgaaactctatgtgcacctcactgatatccggatatgttattctgatggaaacaatatgtacgctaaacatgtatacatatatgtaatcattatactgatcttaccttgattgcgaatgcaagaatgttggtaaccctgagtggaaactactgctcgatgatttacaagaccctaagtcacaacatatgtaaaactgataagtgatacgctaaatcactttttggagacttgaaaacaaaactaagagttttcctacttataaataacatggcgataccctaaatattgctaaaacataagaatctagggtgcctaaaactgccacaatcgataaactagatcccaactggaaaatcagtttctaagcatgcttccaaggggaaccagtcgactggttccacagtgcaaaactgaactggtcgatctgtttaatgcagaaaccaccaaaatcttcacacacaccactcaattctaccctaaatcaaaccaaatcttccaaaccacctaaacaagtcataacaaacctatttcaagcaataaccatagttataatcctttgaattcgatttcaccatgaaaggtcaaagtttgagtttaaaaactcaaaccttggttcaacacactcacaggcaacaaaatcaagcacaaactaatcatactaacctaaaatcaactcagaaaatgaatcccaagcaacatcgttatcgaaactaagaaaagtttattgtttaatgtaatgcatccagacaaggtctgggatgtgttcagattcaagctgacagagttatagcctatgcccataagttcaaagagtatgaccatcgttatccgacactatttagagcttgctgctattgtatttgctcgaaaaatatggcaacattacttgtatggaaaaaagtgtaagatctacatagaccacaagagtctcaagtatttcttcactaaaaagatttgaatatgaggcagagaaggtggttggaattagtcaaagattatgactataagactctatactatctcgagaaagccaatgtaatggtggatgctttgaacaaattaggtcccgggcaagtctttaatactgcgataataacaccttagttgccctcaaatatggttaagggtcaaattgagtttttggttgggaaattacttaacctgacacttcagtaagatttatttgaaagaatcagaaatgcacaattggaagacactgaactagttaatgttttggatgagatattggcaggtctgctgaagaacttcttaatctcgaataatggaattttactttacaaggcttgagtttgtgtaccgagtggtgatgagctcagaaaagagatacttgatgaggtccatactacaccttattcatcaccctcaggtaccacaaaaatatactaagacctaaaaccctattattggtggtgtggaatgaagaaagatgtagtggaatacgtgtctaaatgcttaacatgtcagtaaataaaggcagaatatcaaaaactagcagggttactacaaccactagcacttcctaaatataagtgggaggctatgacgatggactttgtggttggtttgcccagaacaacagggatgtatgactgagtatgggtcatagtggaccatttcacaaagtcaacacattttctaccagtaaaaacaacttatacagtggattagtgtgcagaactatatgtgaaagaaatagttcgtctccatggagctccaaaatccattatcttggatagggatccaaagtttacatcaaagttctgggtaagtcttcaaagagctatgggtacgaagctgaagttcactacaacttttcatcctcagactgaggggcagtcagagagaaaaattcaagtaatagaagacttattgtgagcctgtgtcatggactttgagtgttcacggagaaaatacatgcctttgatagaatttccctacagtaacaactatcaaagtataatagggatagctccctatgcaatgttgtacggcaggaagtgttgatccccaattcataaggatgaaactggggaaaggaagtatttgggtcttgagttagttcaaagaatcaatgaggtaatagacaagatcaaggctcagatgctagcttcgcaaagtaggcagaaagttattctgatccaaagtgtagagatgttacatttcaggcaggagaacatgttttcctgtgagtttcaccaatgaatggtataaggcgctttggaaagaggggaaagttaagccgtaggtttatatggccatttgagatactcgagaaagttaggcaagtagcgtatctactagccttaccactagcattgttagttgttcacaatgtatttcatatttcaatgttgaggaaatatgtgtcagactcgactcatatcttgagatacaaagtcctagaactatagttagatttatcctacgaggaacaaccagttcaaatcctcgataggaaggagaaagttcttcgaaataagatcataactttggtcaaggtactctggaagaacagtaaggtagaggaagccacttgggagatagagtctagtatgagggcccaatatctaaagttatttaggtgagttttggcgaaggaaatctatttaatggggggataattgtaatgaccgcatgattagtttatggattagtaaatgcaattagcattaatgacttacattttataattatacatgattttatatttaaattttataattatacatgattttatatttaatatgagccccacttttagaaacggacattagaggtataatttttcaattccagagattttattaaacgtaaagagtattatgcatgctagatatgaaatacgtaatatttggttttaggtgatgttagaattaggctttattctagttaaatgtttgagtttgttttgagtagaatttggttgattattgttggttttgttggtttgagaagaggttgagcaagtttgagtttgaaaactcaaacttggctcaacaatgacacttttagtttttgtgcatttttcttggtgttattgcttagaaattatttttcaaggttattacaggtgttctggaaggtttgattgaaattgggggaaaattggttgagtttcaggattgttggggttttctgctacaaactggttaattggttctgctggaactgtagaactgattaaccgtttcacacttggcaggaccccaaaaattcggttaaccagtttggacaatttttagagccttagttttggtgtttccttgatatttagcgtattgtcgtgctatttatcgatagggaaacttttatttttgagtttaggtccctgaaaaggattttagcaagttgtttacctatttacgtgaatgttacatagggcatccatttagcgcgtgattttctgttcaggtcaatcaacacacttaaatttgaaaacaaggtaagattagcatagaacatatttatatatgaatatgtgtatgtgtaatatatgcatgctaattatgtgattcgtatggtaccaacactagtacggtagtggtattgagtgcattggtacagtgtatgatgttcaatgagtacaatatgatttaccaacactagtatggttaagtgcataatttatgtggtacaacacttagtggtacttgaagtagtgactcttttaaccctagtgatgatttcattgtttatcgagccaacatgagcgtagtgagacaaaatcttatcttaaggccatgcttaggtggaaagagaaacttagagtgttatgggaatctgtttgcgatcgatgatgagtctagggatttagaccagttcccttggatatcagtggttagtggttttccgga

SEQ ID NO: 121983 - DNA, 745 bp, Cannabis sativa
gaataaggaaatataagtggagagactactattgaggaataacaaagtatcgattttgtaattgttgaaaaaaaaaaaacttacaaatttcatcgccaatatgaaaagtgtgggagttagaccaatctgagtaaaacgaagtgttaggaggtattttccaaccgaaactatctccagcctcgtagcgttcggctgtggcactctttaccaatatcgccataagcatcaagctgcaccctatcatgcccatcttgctactcatttttcccatcaaaatatatctggctatatgtatacgtatatgtgtgtgtgtataattgagctagagtgtgttcttaaggcggttgatatatgtaaacttatctttgtgaatttctgatcgttacttgttttggattagaaaaaatgagcatatatttatatagattgtagagctatttcatagtctctgatattatctttgattactaagttaattaagatacgtcaagactcatgactgagtgatgatctgtatcaattttgccacatgatgagcacaccgatatagacgcaaagtcagctatgcgaacctgtcccttctaagactgtctcacatattagctataaaataaataaaatattaattaacaaattaacaaagtttgattattgtaaatttgtctaaaaagtcagcaaattgtacagtaagggctcgtttgttacacaggactggattggattagacaggctaatttgtccaatc

SEQ ID NO: 121984 - DNA, 4101 bp, Cannabis sativa
  modified_base (4068)..(4074): a, c, t, g, unknown or other
taaagttgtttctgatcagccatgagtatgggagctggacggtgcatgtacatgttcgggcaccactagaccaagcgggttggggtctatcagtgatgtaatttttgtgactctattttgccgcctaggtcagctagtgaaaacgaacttgtaataatattttgaaaatatttttgggatcccgacacatgaaactttaagtttataaagtttaaatttattacaagtttcttttcttccatttgtaaataaagtttaatttccgcgctaattttattagtaattcgtcttaggggattagggtttcttaagtgtcttgggtagcatgcctaatagttagggcgttacacagtcattctttgaccgactcttgtagtcgatgtctcttgactaatgtggctgattgttgactaatctcaaaaataaattttgtcgatttttgggttaacacttaccccctagtctacaagaattcttttaagtattcttgtagactgaataagttgagggatctaccttgccgaggcgtgggaccctcttaatttttttgagatagtgctccctttgtatgggtggcttcccttggttgcactttacttcgcaccaatatgtcgagcaacaattttacttagccttggctgaacgactctgagggtaactctttggcccaataactttcataactggtgttggctaagtgactttggggaccattctttggccgaaccctttgtaattggcattggccgagcgaattggagtcactctctagccaagccatctttgtaactggcgttggccgagcgattccagggtcactctttggccaagccatctttgtaaccggtgttggctgagtgaccctaggtcactctctggctaagccatcttcgtaaccagcgttggctgagcaactctaggggtcattctttggccaagccatctttgtaaccgacattggttgagcaactctgggggtcactctctggctaagccatttttcgcagtggtagacaagcatatacttgggggatttttggctctttgagcggtctccctcttattgtaaatccatccttttgcttgtatgggagggggatttatagcacttgatcgtgctaccctcttgattgaaaaatgtttgcttactcctgagaggcatccctctcatttcagcgttatgccatgagtgtctttcaagacctcttgcggctaagtaacttttgatgggagaagtaggagcatttctctcatcgaccaagggtagctagtccttctcaaattgaaaaaatatccctttttctcttttttttggtgcccccaagaacgtcatccaccttgactcggagacccccatgagtgccttctttcatttattgtagcacactaaaagcgaacttactatcgctatgtacttcttcttgtgtaggggaacttttcttaaggggatatcttcgatatttatttttatgggttgatagcgtaggctttacttggatgtacgagcattggggttattggctagtagaccctataggagtccgacaagcttcccgaagtatattctcttgtgtctgtttccaagaatctgttgccttcctaaatgcgaatatacctttttgctctctcgtagaagtcttcaatgtcatcaaattcccttttcaacatattcccccataatccactcccagggcgtattccagcagctatggcgaacttatgttcttcgttggacattcttcctactttggcacttcgacattaaagcattggatgtaccttcttaagccttctttctccccttgctttacatcagtgatactcattacaggcataatgtaaacacttgccgcttgacgctgttgaaggaattcctctaaaaattgttaccataatgtcattgttccaggtccacacctcttgaaccacttgtatgcgaccccttcaagtgtaatcacaaggcattggcatcttgccttgcaggataccctcttcatcttcatcagctcactaaaagctcctagaaggattttgggtcagtcgtaccatcatatggcgtcatgcaaggctccttgaaattgggtggaagtggttccatttgaatttccctcaagaaaggggactcttcgtcgagttcatcatcctttgaatcttcctttgatgtcgtagccatccttcgacgtagatcttgtatctcttattctagctctctcattccctttttcactctttctcgggagttggtgaacagaacatggattttcctagcagttcgcatggagacttcgggtagtactcctctcatcccatcatcatgcagctctccatcatggttgaggggagataccttgtgctcgctttgcttttgagagggggtgctagtgcaatgtccccttgcgtgagattctttggctcaagccccttcgtatggctatatgatgtttataaattgcgatcttacccaagcagatagattcatgttgctctgggtaacctcttgggttctcattttgcgataggccccttcctccctcaccctttaaggtgctacccgttgatggcatggcgctcttcccaccattgtgcggagtttagattgtacactcttaccggtgacctttgtacaaaaagtgtgaagtttgagttttgccttcaagaatggcgctcagtacttcttgcatattggccagcgtagtttctagcctttggctcttccggtagagattttttagttcatcttcatagtggcgagtttgggattttgggctcatagagttagcccatttctcctttctgggacaatgtcgcgaggtaatgggatctcgcagtgttggtggtaggggttgattgggtgacgacaagacctccttccttcgtgtcacgcctttacctttggtcgtgacagaggtggtaactttgttgcgctgctgtccactagggtcttttcacggtgacaatctccttgtcttgcttgaggttcctgcccgctcacgccctctcctcctacttgaggctggacaacgttctcattttcttctcttacttgaggcttgttgccatcagcgcctccttttctgatgtcgggtggagggagttcttgcttcgaaatgaccaactggttgttgtcaaggaggataaccatgtctttaaggcagtgagagcatctaggcattttgtatcgattctgtgtaaataaatctcttagcttaatcatttcgttcccacaaacggtgccaaactgttgacggtgagaactcgtcaactaagttagtggtcgaaaaattcaaggttacccagaaatgtgataaaagataagataaacatgaaggtgaaaagaagtcttaatattcctttccatattgaattcaatatctcagttacaccaaatgactttccatcccccctctcacatctgagatggggggtatttataggctctaatggccagctgtacaaagtggtcccatgaggaaaagacgttgctttcccactgtatgctggacgtgttggaggtggcctagcacccggtacccttatctagtgtcagatattctccaattgcaggttgtaggaggatggtctccgggtacatgcgcgtggtcccgagttgcaggctgtagaaggatggtctctgggtacatgtgtgtggtccccaattgcaagagatggaggtggcatggcatccggtacccttgtctagtgtcagatggtccctaaatgcaggttgcaggaggatggtctctgggtacatgcgcgtggtctccagcagcatgcacgcgaggtggtccccgagtatatggtgttagagattggttgtggcatacactcggtcgggtcttcaggccttgtaggtctgttgtcatcgttccttgtacctccttgctctcagtcttcaaaaggcatggtggtacgctcttcccttgcatgccttgtccttcgagctctcgtccaacgtcatccttgtctacatgcctttgcttatttccttatacgcacatcctgttggaattattttaccaggatcaagatttactaacaagtatttttgattaacaacctaatatgaannnnnnnacaatgaaaataaacacatataaactt

SEQ ID NO: 121985 - DNA, 3179 bp, Cannabis sativa
acatcatttgaccctaaaaacccacccaaaaagaagagaaagaaaaagaagattagtagaaaaatttggtctcaaatgtttgaagttgggcaaagtgattttcgccaactctttaatgaaggctcctcatggacgactagattcaaggtgtgatggatctttcttagtggtgaaagtataccccggtggggtggtggaactacgtgatgcactttcaagaagaaaattcttggtaaaaggccaaggagtgaagtttgggagtggtgaggtcaaccgagcaaagacctccattactttgaaagaagctttaggcaacccgagaacggaagaacaagattatatttagttatatatattatataataagtttggggtgtgccaccctttgtaaaaaaaaaaaaaaaagagaagagtgtgattaaaattaagtttggagtgtgccaccccttgaataaaaaaagaaaaagaagaaaaaaaaattatcatatatatatatgaatatatctttatgtttctattgttattaatgtattttttaaatggtggtggtaattttgttgcaggtacaagacataaactatagaaaagggagtgagttcaatggtgtaaagcaggatttctttttgaagcaataagtcccagttgttacagtaaagtgtaccaatattttgaagcagagactctggtggtgaagagtctgaatcttaagaaagttttctttttttcttagtttaattgttattgctggttatgtttgcttgtttaattagtttacttttattgttgtctttagttgtgtgagtaataaacattgtgtggttagatatgtgttagtcatgttacttggtcatgtttgttctgttttgtgttagcttgtaaccgagaagtatatttcatttattttcagcttggtttagcataccgctcaatgacgaagaaaaaaaaattatccatttccctccatttgtgtatgtcttgattttcgtgtgttaaaattgtcaagttaagtactattttgtccaaatgctagtctaggagtaattctttcaaatagatgtgtacttgtgctatcccactatgctttggatttatagaatgactaacatcttgagagagtttaagcttctagaattggttggtgtaccccttgaggtgaaatcctagctagttttacaacttggaaatgatctagatgatttttggacgattgaacctttcaagcaaactcgagaatatttacttatcaatagtcaccctatttgagttaatagcttttttttttcataacacccatcaaagtttatatatccacacacacacaaattttatccttcacaacccacacctaattacttaaattatcaaggacaaatcaaacattaatggggttagggaagtgaggataacactttgcaaaatatggtgaaacaagtttacattggagatgataatggaatgtgagttcggggtggtgagagtttcgattcacataacaataaagtccctcttttgctatatgtatagatatgtcaaaaaaaaaaaaaagaaaaaagaaaatataaaatacatatacatatatgtacaataatagtagtaaataaaatagagagagaaaaaggtaagtttaacaataagttggagtctaccactcctaatcaaagaaaaatgttgttgcgttttctctctttatctagttggtttgaaaaaaaaaatattatatacatatagcaagagagttggaactggattgagtgatcattgtgggttgagaatgaaattttcggtgagcatttgagagaaaaaaaaatccttgataaattgaggtaattaggtcatgagcctaagaaatgttatcttttaccaaacacgaacctaagcctcacattacaagcctagtaaagtccttttgatctaggatgtaaagctaagctacattagtggagagggttgcactagttcaacttatggaagcaaactttttaaatttgaggatcaagggtagttgttacagaaattcaaggtgttggtgggaagcatttgcacactctatcgatgaattattcttggtaagtattaaggacatagatagcatgcaaaactcgattgaaacacacaagtttaaggcatattcactaccgtcactacacttccatcccatctaactctaagagcattttcttcactaaaccaagtttgaatgagcaatatcttctctgttgcaagtattttattgttgctgtcattttttgtttttgtttttgttgttttgttttttctgttcttcattactcgaggacgagcaatactctaagtttggagtgggataactctatggtatagagttatttttagtgcctttaaactgtaatcattgtgaaaagagtagtgaaagtgtgtttgttatttaactttaattagtttctagcttcattttctaaatagtaagttagcttggaagtcttgtaaaaattattaattttagttgtgtttatttaattaaatgttgtttgttggttgttgaaaaagaagaattaaattcctaggatgcaaggccaaagtgggaacaaaagctgaaactgggctaaattgctgaagcaatgctacaacgaattcagcattctgggtagtaatgaggaaagagttggaaaaatgaattttagttgtccacatcagcatgagcgtgtcagttactcaaaattaagccagctgactattgtggaggaagaagactaaacctagtgggccaaggttggaaagaattggacttctatttttagggtattttgtaccctatttacccaacaaccaaaaagaagactaagtacaagcttcttcttcaagatgatggcagctgccattttttagaaagaattaattgcaaaagcaaagtacagaacaagaaggaaagagaggggggaccaaagtgcaaagagagaaggacacaaacttttgtgtttgattttcgtttactttcccttatgatttttctttcttcttttcttttcttgtttcttttatttagatattaaaagcttgttgaattgtaagcaaaggacagcagccatggagaaacagttagtttgaattttattttcttatttgaatatgagctagactttttgaggcttgaatgattataaactcctatgttgggtatgattaatttttaagcttatttt

SEQ ID NO: 121986 - DNA, 1389 bp, Cannabis sativa
catatttgtaagtttttttaaaaatatgtcatatttagggtaattaagtttttatgtcatatatataaaaacatatgttcatttttccatatttttgtaaatagcccattacaaaatatttagaaaatagtacgtatatctactaagattagtagttctcgtatgcaactattaaatattatttaatatatgttattctttaaattgaatattttaatatttgcaattttaaaaatgtttaataatttagaaatagaagtatttcaaatttaaaaatatttaagtgtattacatttgcgcaacctaatgagttcattttctaaaaaaaaattaacctaatgagtttccaatacatataaaccacttgaggctacctcaagtggccataagagagtgtctattggaagtcatgggtttgagtctcaagttatgtattgtaatatataaacgcttaaataaaaaaaaatacatataattaaacatataaaggttacttatttcagctattttttgttacctatttctatggagaaatttgacatccgtggcttaaattgggtttagccactcttaatattccaccctacaaaaagttttcaaaatacacttttgttttactttaacgtccaaaatacccctcccatttcaagagatataccatgtaaaatcaagcttaaatcaattagtgtcatattagagtaagacaactcacacttttattataaattggagagaatatactgtaaacttggaggatgtttatgttttacttctcttgccgatttgtggtacagcttcaatggtatcccctttatccaatgatgaacaatctatgttgtcatctttaaccgtagccatagaggatttaaagaaaagatatatgaaaaaaaaaaaaaaaagcagtatgacttgcttgattgggtaagatattttcatcaagaaagtagtcaagatttggtagaatgggcatcatgtatttctttatagcaatggtggggtcagacatgatagccgaccccgcacaccgtcataaacaatacgcttttttcccattaggcaatgtgactttctaaaccttcttttctcttttgggcttggcaattgaaggattatttgttgcttcatattcttcccattggtgtaagcacaccacacgtggtcttgtgaccattttcatattattttctgaaagctcgtcaaagaacattgcttcagccatgtgagcttcctctctagcaaacgatgctttggtagttgtgatatgaacatcttttcctcgaaagtgtgtcttgacacattgatgcaatgtcgatggcacataatgacactacaagaaatgtcactaaaatgtgctggcaaaagttggtattacgctggtaaaatagaatt

SEQ ID NO: 121987 - DNA, 1851 bp, Cannabis sativa
tttaccttataaatgcaattcggcaacaaattgcgacaaaaatatggccacctatagcacacacacaatataatattaataaaataaaaaaatcccaaaaaaaaattacaaaaactaaataataccaatatacattaataaaatgaatagaaattatatttataccttaatggatgttgagattcaacgttttctccgctaaaatcggtggccggagttataccaccacctttttttatagggatattggcggctaaaccacttgaactttacggtttgtaacagttaaccacaaaaactaaaattttggcggcataactatctaaaccccggttccgttttgctctgtacccctccatccaaaaatcacagttaagtgccacggtgaactgtccacgtgtacacatgtgtacacgtggaaaaattttagtggtccacataattttaattattaaatattataaaaaaaataatttaaaaattgaaaaaaaaaacaatttataaaaattaaaaaaaaaaatctttttttttctctttttctttttctttttcttttctttctccttctctttttctttcttctcgaaagacttgaacccccaacctcctgtaacttcttcttcttcatccaccttcaaccaaaaccaccaccacactagaactaccctaaaattaaacaaaaaaaaatcatttaatgtagttattattcattcaaaaaaaaacaaaggaaacaaagaaaataactttagaagaaaggttttaggtttatagcttgtataaaacccggcaaccacaatccacctcatattttgcagaaaacttccattgtaaaataacccactcttccccatttacagagaaaaagaaaattaaaaattgatccattttcttgaaaaccaaacagcagaagccagtagaacccaaaactactttatacaaaaagcacaatccatactttttcatcaaaccccattactgaaaacaaactctataacagaaacaagccaattgaagcaaaacaataagactcacccaaaaattccttacagtccttatcgacccaaaaaaatcaatgttatacttcttggtcatattgggataaagaatacccatgtcggattcttcttaggagtttcaagtttctcttccttatcgaacatctcgtaatgtaagtctctgcaaccccttctttcctcaggggagttccgaatccctatctcaagtgccttaccaaacccttcatgtaaagctcgacatagattgggttggcatctaatttccccgcgtcgctgcttgagctcggcgacccagtctccgttaccaccaacgggatgttctcgtgcccagacatagccatggcaaaaatcacggcatcgaccataacgtcgaatagatttcggtacctaactctggtggtgaggtcgtctctgttgtgatatattatggcaatatttttttttttgtgtgtgtgtaattttaggttagctctagtgtggtggtggtttgggttgaaggtggaggaagaagaagaagttacaagaggttgggggttcaagtctttcaagaagaaagagaaggagaaagaaaagaaaagaaaagaaaagaaaagaaaaagaaaaagagaaagagaaaaaaaatatattttttttatttttataaattgttttttttttaatttttaaattattttttataatatttaataattaaaattatgtggactactaaaattttaccacatgtacagatgtgtacacgtggactgtccaccgtggcacttaactgtaatttttggacggaggggtacagagcaaaacggaaccgggatttagatagttatgccaccaaaat

SEQ ID NO: 121988 - DNA, 2457 bp, Cannabis sativa
  modified_base (2348)..(2353): a, c, t, g, unknown or other
atgttatttctgatcgttattaataagtaaatctaattatattgaaatagactttatttagggcacagaacccaacactttgatcgtgtgcctttaatctttgaaagggttaaacatggaaaacaacccgcgtttgatacctttgaataggttggacttctagatccatcttcatgagatgtcgtctaactttatgttggaaagtttaatttgggacgttggataaattatcatataaattatttttatataaaagtgtacattatacttatttaagatgtcacaccaatttttgtgaaattctaaatagcttacaatgttaaaaactagcttcataacaacttattttacgagtgtgtaaaataaacttcaaaataacctctttcatatttttaccattataaattaattagaaattttttaaaattgtcaaaattcttaataattacaatatacattcatagattttttttttttattgttacatatatatgtgtttaaatatgaaaataaattgggttgaagtttattttataattgagtgaaacttattatttaaaagtttagggagtttttatggtgcacttcttcaaaaagagcattgctatggggcatacaggtctctatcacctctatgacatagcgttttagcgattctctataatttttattagattaaaataagtaggattcaatattaaattacacgaatagcgatattacacctcataatggtgctaggcaccatgagtgtcctttagcatttctcctcagaaaatggtgcatcgatgcaacccatattgttgtaacatctaggaaattttaaaatttaaatttttttcatgatcgtttacgttgtaattatttaaaatatcctgtaaatttttaaaaatttagaataatttacgatataaaaaataatgttcaaacaatctatttcacacgtaaaaaaacaaaaaaagcatgcatgcaataaactttttgaaccttatgttcaacgtattaatttttttaaatttttccaaaactttataaaatatcttaaaaaaaataaaatgtacatgactataaaaaaaattaatctaaaaatacttctaaatgccaaaataaataagagtgatcgtaaaattttgtaaaaatttaaaacaaattttaaataattaatttttaagctctatataaataaatttagataataattatttgagatactaataattgacgtactgctactaattggattaaaaaaaaacatgtttagaaatgtacataaaatttgatctatgtaacaataataatcataccaaataaaaataaaaaaaaataatcatatcaataaaataaataaacaaagcaataaaatacaaatttattatagaacataaagagatagtattacaagttaaaatagataccctttttttgtttttaagatacatatttggcagttgaaaatacatctactcaaaaaaagaaaaaaaaaaaaaaaccaattgacacatttatccccaaaaagtgacttaatttcaaataaacaaaaataaaaaattaaatattatttatcgcataataaaaattgtacattccattataaaagtgcctatactaacctatatctacattatttttttccttgtcctatgtgagggatgtaaaacctcaaattcaagtaaggttttacataaggccccatacttatatagacttacttaaaataatttaatttttaaaaattgtttgtaatttttgaaaataaaaagatatagaaatgtaaaatagaaaaaataatcttaaaaaaaaaaattaatctataaatatataaataataataaaaataattaatatttatttataaataaatttaatttaagtagatattatttaaaaagattattacttctaaaaataaataatatgttatatattattttatttttataaaaaaattcttattggataaaacactaatcaattgccaatgaataatagaaacataataaaaatgagagatcaaaatgatataataaaaatattcataacctacatgaataatatttaaaatagtttttaagctatgtaagcctttaagatttaatttatttgtagaagaaacaatattcatatttttatatgtgtagtttatttttcagcttatttatttaattttttaaacagaatttacagttttcttttaaacaaattgtaaaacctcacaaaatttttaaaatagaatggaaaaatttaggatttcacttaaactttgtgttaaaaaaaatattatttaagatattaatcaatcacctacatatcaaaaaatattgtgacaaaataaaaaatattatttatannnnnnatgtacaacacctaaaagagtatttaaataatgctacactttttttgtttggtgaataagaatatttttactattaaatggttgtgattaatttgaaaattaaa

SEQ ID NO: 121989 - DNA, 1496 bp, Cannabis sativa
taaaacttttgagatgattttatataggacattgcataagcttatcggcctgaaatcactgacagatgttggttcctttattttgggaataagagttactattgggaataaggatttaagcaaatagagaaacacaaatcaatgcataaagatactcaattgtaaatacaaaatttaaaataatagaaaatacaaattgaattgtaaagaaagaaagagaaggcaagtcattcatataaaaaatgagagaattaatgatagaataaatagatgtatttagagtaattttagagcgctacgtcaccgtcttatattttagatttatatatatattttctataaatatatcatttatatatttttttattatgagattttttgtataaatgttcttcagtttctaatgtattttttttaactacaacgtttaaagaaattatattatatatatatatattttatataaagttctccatataactagatgttattcaatttttttttcacaagttttttaatatttaattatgtacaacttttaaaaatacttctcaaatgataaattaatatattataaataaaatgatatataatttatcaaaaagaaattttaaaaaaataaagaaataaattaaataagatttattctataaataaaaatcaatattttaaaaaaatttataatttaattatcaccgaatagaatataggaaaattacttcatatattattttttaacttttttttttttaaatttacggtttggatttctctagtggtttcagtttctatgtgagttgctatacgaatttttgttgcgatttaagttgctccattagttgctataaagtttctatgtgaaatttcgtaaaaatacaaaaaaattattttgaagtgtaaaaataaaaaaatccctaaaatataaccgcatgtgaagcgcagtttgtttgctagttaaagaataattaacctatgttgattttgtggatttattttgagttttttacggttaatacctccaaactactaaactgcttgcaaatttaaggtgtgatctattttttacacttaattgccaatatagactgcttatgtgtacactttgtacatgtgtcaaatttatattggtacacctaatatattattattttaaaagtatataaattatttcaaaatttataatattttttaattttatgattttatttaattttaaaataaattttgaaaataatttttaaataatactattaggtgtaccaatataaacgtgtacaaaagtgtacacatcaacagtctataataacaattaactaaatgacatcttaatttgctactagttcagtaatttaaaaaattttagagctgaaatttaagtttagagaattatatgcaattaaaaattagaaaggttttattgcaaaaacaaaaaaaaaaggggaaaaaaacagaaaaatacaaaaaagaaaaaaaaattacaaaaatactttgggccg

SEQ ID NO: 121990 - DNA, 1036 bp, Cannabis sativa
aaattatgcatgaaaatagtatttttgtaaaataaggcaaaatatcggggcgttacaggacccaaacccaaatctagactcgggacccgaacacagaatcggttgctgaaccagacctggactcgggacccaaacccagagccagaccagggactcggacctggacccggacccagaccttgaccaaccctaacccgaacctagacccagaatcgaacccagacccgaactcgaatcctgactcgatcctggatttgaatctgcgacccggagtcagacttggactctggacccgacccgtagtcgatttttgagtcgagtgtattgaaaatacattataactttacacaatctattagtacaagttaatactaaacatagtattattttaaataatactaatacattacaattcaacacaatacaatacaatacaagacgacgtaccaaacgaggcttaataatattatttaatataataccatgtttggtgttgacttgtataaatagattgtgtaaagttataatttattttcaataaactagaccctaaaactaactacgggttgggtcaggtacgggttcaggtctgggaccgggtttagggtcgtgtccgaggtacgggtcccaagtttagtctcgaatcctggtcccaagttcgagtctggatctcgggtcctaggtcttgggtttaggttcgagtttgggtcccaggtcccaagttcgagttcgggtttgagtctcgggtcggggttagggtcggggttgggattagtgtcgggggccgggggtcggggttggggttaggatcagtgtcggggtcggggtctcgggtccaggtcgagttcgggttcgtgtttgggtcccaagttctgggtctaggttcctagattcgggttagagattgggtcgacttgtgtctaatttttctaaccctatcccgtaaaattcatgtctgattcatgttcgtgtgcgatgagaattatggggttccatctcaaaactaattggtgatgagtggagtagcccatattct

SEQ ID NO: 121991 - DNA, 882 bp, Cannabis sativa
  modified_base (184)..(185): a, c, t, g, unknown or other
tgatgccagggcttaatctctccttctccttacatgtttcatatttggtctcttctcattttcttttctatgtaatttcaaaattaggtgagttcttattaatatagctttgtcaattaattaactagctagatgtcgaaaacaagaaagaaatctcggcatctatatctatatataaatatanntatatatatatattgttttttttagtagtggtagtagtgtgtgttgtacagaattaaccaaacaatgaaattggttaaaccaacccaatcaaacttttaatttcgatttcggccaacaaaataattgtatggcctttcaagcttcttattggtgatcgtctctattcaagatacatgttcgtatgtttttttgttttttaaaattaattcttagaactgaaaattagcacaaggcataataatatttctacagagcgaagaattattccgagtctcaattgatttacatgaaacagttaatttgtctttgattaaatgggtggtatattctttgtttaatgcatgatatctagtacatattaaattttcattatgtattcatgtatatattcctgccttgatcagtaggttttgtaacttttgaattaccatttgaaaaacgattctagtaaggtcattaaaactctcaatgcagtgagctctagaatggagattgataacaattatatatactagtcaatctaaaagaacttccttcttttttgttgattgtttgttttctaatattttaaggacttgaaattttgtagctaatagcatttacccactttggatgtatcctctaactttttttttgtaatgacagcaagatctaacatcatcttatataaatgcttttattccaaaaaaaaaaaaa

SEQ ID NO: 121992 - DNA, 801 bp, Cannabis sativa
  modified_base (695)..(730): a, c, t, g, unknown or other
gggactactgactgtcacacaaaaattacttatcctttttacaacaaaaagctaaactgacttgggcaagagatggtgatgagaattctgcactatttcacatcaacatccgagaaagaagaagacacaattaggtcctctcaattgtcaatgtagaagggaaaagagttgatgagccaaaagatattatatatgccttcattcaatattatcttggtctcttgggtatttgtatgcatgaaagaaagaaagtgcagaaaaatatactcaatgaaggaaattttgtaacagaggatcaagtagagtttgtaatagtagattttactagagaggaggtaaagaaaagtgttctcagctattccaggtgtcaaagcaccagggccagatgggtttggtagttccttttatcaggaaaattgggagataattagagaagaagtagttgatgccataatttccttcctcaagacaggccagttattgaaggaaattaataacactgtcctcactcttgtgcccaaaacaaaatgtctcaatacagtgaaggattacagaccaatagcgtgttacaatgtgatctacaatgcagccactaaattaatctgctcgagactcaaacttctattacccaacttggtagctcaaaactaaggaggatttgttcaaggacatttctgttggattttgtgccctannnnnnnnnnnnnnnnnnnnnnnnnnnnnnnnnnnntaataaagatcagaaatcattttattgtatggttcacatgatttatttcatgattatgtttaatgtataaa

SEQ ID NO: 121993 - DNA, 752 bp, Cannabis sativa
tttgaaaagatttctgtgtgacagtatttttgtaaaaattaacctaaattccagtatttttgtaagtttccctatctatttgtgccacttgggcttgtagttcgatcataatgagcctaaaaaaaattgagaaaattacaccgaacgtaaaatttataaaaaaatatgaaaaaaaaaatatatttatatttcttatgaggttttgttgttgtttacatttttatcggtttaattttctccacatatttgtaatatgtttgttttatacaatattctactcttttctattctcttcctcaaagcccaaccccacaaaactcaagtccatatcatgaaatcctaacattctctcccaccaatctcatatcatcccctcttttctctgtactttctccctctaaatctagaccgaggctagttgttgatctatcctcgacgccatgaacaacgactttgtggtgaataatgaaagtcggtagaagatgcaagctttgagggtttaacctagccctaatgtctagtgggtttattgtacatttattttgattagttacaacatatatttgtaataaaagatgatatttatagacataatagtaagttttgtgtaatggttaagctagattacgttaaaggtcaaatgatccaattccacgtccgccactggttatgtctatatcattatgataaaaatgttgggaatacaattatatttcttttttttgatttaagcatttatatattacatcagc

SEQ ID NO: 121994 - DNA, 554 bp, Cannabis sativa
tgtataaaaataatatttttttatatatatatccgtcggtcgcgaagcgcgggatgtttactagtttagatctatttcacaagtacttttcacccttcttctttttcttttcttattgttttctttttagagttttttattttcttttttctactattttgtaaattaattctaatttataaatttagagaaaaataaaaatttctgtatattttaaatatttttttttatattttttattattattattatatggtagcttaatatatgtgttcaatgtcatataattaatatggtaatttataactgattagtattttcttaaggtgttcaatactgtgtacacaataattttttttatgaataaccataatcttttgtacaattttttttgcttatttatttattattagtaatagaacattattattatttgacaccttcaaatggccatatggtaacattatacgaacatgatgttagacttttatttgggcttacattaaattttattggttttattaaaacttgggttgattggatagttctttgct

SEQ ID NO: 121995 - DNA, 1761 bp, Cannabis sativa
  modified_base (42)..(45): a, c, t, g, unknown or other
tttagggtgttaatcaacatacttctgagtagatctaagatnnnngtaaaataatatccaacagttttggctttgccatttgagcaagaaaagtttgtaatgtattgtgatgcttctagacagggtttgggttgtgtgttgatgcaagcaaataaagttatagcgtatgcttcgcggcaatgaaaagattatgagcagcgctatccaactcatgatctggaacttgcagcagtggtgtttgccttgaaaatttggcgacactacttatacggagagcgatgtgaaatctacaccgaccacaagagtctcaagtactttttcactcagaaagatctgaacatgagactaaggaggtggttggagttggtgaaagattatgattgtggaatcttgtatctccccgggaaggcgaatgttgtggcagatgccctgagtcagaaaggacctgatcaggctttcaatatggtagtgatttctcctaagttagccttggaaatgaccagaggaaatattgagttcgtgatcgggaaattgcataatctgacattgcagtcatacttgttggaatggattaaaatggcacaactagaagatcctgaactacttaaagttcaagaagatgtcttagcaggcaaagctagggacttttcaatttctaacagtgggatgttgttgtttaaggctcgggtgtgtgttcttaatagcattgagcttaagaaagaaatttttgatgaagctcatactactccctactcattgcatctaggaacaaccaagatgtatcaagatctgaaacctatctggtggtatgggatgaaaagggatgtagtagattatgtgaccaagtgtttaacttgccaacaaattaaagcagagcatcagccaccaacagcgttactacaaccaatatcctttcaagagtggaagtgggaagatattgcgatggattttgtggttggtttactcaggactacaggaaggtacgacttagtatgggtcatagtggatcgcttcacaaagtcaacacatttttttcctgtaaaggtaacatatacggtagatcaatatgctgacttgtatgtgaaaatgctacaactagaggaaaatcaacacatttttttcctgtaaaagcattttgaatacaagagggcctttaaatcaacccaaacattatgttcaaaaatgctacaactagaggaaaatcgagcatgcttagcaacaacatgaggaactcgattagctgatcgtttaataaaacttattttgataataggtagagaagacaataaatgacaacaatcctgaatgatcaagccgaaaatggatgacattctttgcctacttcagattgcttggatagtgagaaggctaacagtctcaagctctacattatgtcagttggtactcttaatccaactaagagcttccttgatttccagtgcttccatgactttaggggagtaggaagctgctttgtagcatgtctttgcttcaataagtttgcccatactatctcttgcaataattccgaaaccatatgaattctcatgatgaaaaagtgcagcgtccacattaatcttgatgtgatttagtccaaagctcggccccatcatcactattataaagagatagtgatgataaagcaagtgtatcctgagcttttcgccaatgatcaagagtggtggaggctgaagctaaaactgttggaattaattttactaggatgtagatttactagcaagtatgtttgattaacatcct

SEQ ID NO: 121996 - DNA, 2938 bp, Cannabis sativa
gtgttctatgttatatacaaatagatcttgggttaattgttaatttatctaacacatcatgatcaagatgaggtaaattattcattttcttacaaatgtgtttgttgtatatacaccatacgaacacttgatgatttgaggacgagtctaaattagaatcatcaaaatgagcagctttttggctttgtagagttgaacagaaatgcaaatttcgaccattcttggccttcagattgtattcgcattttaagtccaacacatcttcatcacctcttaaaatggtgggatcatcaaactcaacaacaatgcataaaccaaatcctaagaagttgcgaagatcttctgaagagggaaaaggtaagtttagttcaagtgatgatcccatagtttgatgggtaaaccattgagtaattgtatctcctgaaaaacaaaaacttggtccactcaaatcctacaatatatgaaaaaaaaaagtcaattatgtaaatattaatggtgaaaaaactatactattgaatttattctatatatcaaggaatttaagtaagagagatatacctttttttctctaagactatacgttacactgaaaatgttatgcatgaaatattgggtagccaaaatgtgacgtatggcgtagaatagaaagcactgacaacaagtgaaatgaacaccatcataatcaaaattcacacttgctgtagaagtacaactacttctgcacatatacggttgatcatgtgttagtagtagttgaccagaagtggtttcacttgaatcttctaatgggaaccagggaaaaccattatataacagaatttggagttttggataatcatcaatccagatatcgcgaatgtcgcacatattgaagatggtggttggaatagacttgagatttttacaaaaagggaggtaaaaattttcaagcaaaacaagattctctattcatgatgatatctcttcaatcccagttccatataaactaaggttctttagtttctccataggctccaagatttctggaaagcttttcaattgtgaacaaccttgaagactaagttcccgaagagactttaacttacaaatggaagttggaatagacttgagatttttacaccatctcaagtctaggcattcaagcacaactagattctctattgatgatggcatctcttcaattccagttccatttaaaataagatccatcaaattctccataggctctaagatttctggaaagcttttcaattgtgagcaatctttaagatcaagtacttgaagagacttcaacttagaaatggtagctgcagggagtttgtcaaaggatacacatccacccatatataagaattccaatgattctaactcacaaatagcattcggatcaagttcccttaaatgttcacactcacttagatcaagtacaagaagatttttgagagagaaaatggatgggtgcaattccttgattgctgttttacttagacatataaattttatattaccagaaatcagtgaaagagttgtgagattggagcacccattaagatcaagcaagttagtagataactccctcaccaggttggatatcctttcataccttgaagaaacagcttcgtcaatcccaattgcaacatatccattttccattataaattgaaccatcgaagaattatatttatgcatcacttcagattctttttctggatcatctaaaatgttgtgaaatcttaacgggggaagattaactaaacttgtacaaccatctagacgaagcatgtaaagatttgcttgagagagatttgagagacaagtaagtttcttcgatccagaaagaatgacatattttaagatgttaacatcctgcatatatatatatatatataagataaaatgtagttaattatactatgaaacaatgtatcaaatagatatataattatctatttgatagtattaattaaaacaatgtatcaaatttataacatttaatgaaataaagcatatatatagttcacatgcctgattttctttccacagtttcttaagtttgcatttcaagtgtgcctttatcagaaacagttaccaaacacctgtcaataagaacttcaatggcaatgttaaaatcaccacaatcatccaatatgtctctcaccaaatattttggataacctcgaaagaaacacgctatatcaagaaatatactctgttgtttagagtctagcccatcaaaacttatttttagtttacttgtaacgttttgatcaggatctacaattatcttgtttagcaaactttcccataaatctttgttttttgaaaataaataataataataataattaattaagacattaaaaaagttgaccaacaaaaacttgtttaacaacaaaaacttggccaagttgattgagatttagattccaaataaaaaaaaaacgaaattaaaaataaaaaattcagatcgatcaaatttaaaaattgaaatttttcaaaatttgtaaactcgcaaaagaatcatatttttcttcatttaacttttaattcaacactttgtccttatgattttcagtttataaggagaaaaaaaataagaacaattattgataattttagtattttttttttggttcagctttagttgtttcaaaaaaaaaatattttcttttatgtctatggagtcgattctttattttaatatttaatctgaatatttagtgttaattatatgattaattaatgaattagtaatgtcaatccacaagaggtgaagttgacaagacgataacttgttgcttagctgcatttaatgattgttaatattaaattattttttgaataagacaaatttttttaatcaattccagttataatacgatacacttaggatcacattattatcatggaattgcccaattagaagaagatattaaat

SEQ ID NO: 121997 - DNA, 4125 bp, Cannabis sativa
  modified_base (3949)..(3949): a, c, t, g, unknown or other
caatcccacatcgcctggggaaggtcaagtgtgatgattctgaaattgtataagtacaagactacacagttaaagaggacttaaatagattgattggcactacctatattaacaaggtgcatttttttaatagcccataacaaaagaactccacaattaagcgtgcttgacatggggtaattttagaatgggtgatctcctaggaaatttttctaaaaagtgtgcgtgtaaggacaaaactcgcttgaaatactcttgttggtcggtagggccaatcatcagtctaagaagtagccagagtggtataagagtcataaatttgtggaggaaaacccaatggaggcttaaagcggggatcttacttaaaatatagctagaaattgactttaaattgtctacacaactactaaaatctgaatctgaatagccaataaatcaaagattatcgacatgcttatacacaagcataaaattctttattctttgaaaatatctcatgacttttttggctgcaacccaatgatcatgaccagtattagataaatatctcctaagaacattaactacaaaagcaatgtaaagtctagtgaaaacctgagcatacatcaaactccctactacacttgcatatgaaatattttccatttcttctctttctaagtcgttcttaggacattgttgcttagtaaatttttctcctttcaaaataggaacaaaaccagccttacacaaattcatgttgaaccttttgagcacacgatcaatgtaaaccttttgagataagccaagaacttttcaattcctgtcacgatgaatctcaatccccaaaacaaaagatgtctctgcaaaatccttcatatgaaagttggtagatagaataattttggtctcatttagtattgacaaatcactgttggcaagtaaaatatcatccatataaataacaagaaatatataatgaatcccaatgatcttaattgtttgttatgaaatcaaacattgtcagaatttcatcaaactttaagtatcattggatcatttcaatttgcaaaccaaatttttatttctatttttttgaatccttcaagttgagacatataaaccttctctctcaattctccatttaaaaaagtagtgttaacccgaaaactttccctagtgatgtggacctcgatgtttgacatgtggcatgaaggatggcgtcacagagttgagtagacctgagtcataacaaccgacttgggaggggaccctagccctgcgcccaggttgacttcaggatctccaagatggaagtttgaacttcaataacttgaatccaatccactatctttcagtatttttgtatcatgaagacatggataaatctaatccaagaaccaatagctgaaattacaagaacctgcaatccggaagccaacctgatcacctagagttttcacctgaggcccgagttgacaacctcaactagggtttcaactagacataccacgaacatatttgaggcatcagttagaattttagcaagttgatttttgagcacttagggccctgggaccccgagcatccaacgcccaagttgacaatctggcaatttgggtgccttccaagtgtccgatcagagttccaaattttgcatcttcttcgtcttcatcaaaaattgagaaataggtccttttggagaaaaacataattctaggatgcaaatataagggcccagcacccaggttaacacctggggctagccttgtgcgcaggctgacattttgtcaacctgggccatttaaaatggaatttttcaagaattatttcaagcatcttctcctttctcaaaaaatattgagatccaactattttcgggcaccaaacagaatttttgaagggccaaaaggaggactcagcgcccaggttgacatattgtcaacttgggctatttccgatcaagttcagcaaaaagtgttgcagtcattttttccataaaaaataatgaagattcaagcaagctggaggggagaaccacaatctcgagtccttagaaatagggcccaacgcgaaggttggcctagggctgggctcagcgcccaggttgacaatcaacctgggacattgccttcaattgctcaaaggtcatatttgatgcgattattgaatttgaaatagtcaaaatggggtaagagaccttgtcctcaagttcaaacaccatggaagtatcaaaaataaaatctggggagcttgggagtaagtaccaagcacctaggttgacaaaaggcctggtgcgctgggttcttcttattcaaatttgatgttgtttcgatcgtccgtctagttttttacaatgacaaagatctatgaagtcagagaaatcaaatccataacttttcatttctcatttctagctcaccctgaaatgaagagttttgagtgtctcttttctgcaaaaacaacaacatctctaagaaccgatgaccagctttgccaaaacacataaatagactaagtgatgtcaaagtatcacttaggcatcctaaagtacatcccttggacatttttacacttacccagcatcctagttgacatcatatgtcaatatgggcattgggatgtcaatctgggcgctgggatgtcaacttgggcgctggatgtcaatttggacgatgggtcatgagctgttttttgtaaaatagccataactcactgaatttttatctaattgaggtgattcaacttgtacttcgaagctaattcaatgctctatcaattcatgtctcacactccagacgtaattctaaagctatcaccgtcaaaattcacccccaagggagctataaaaataagctccgagttacctataacaggaccgtcgggctccaaaatatggtcatcaccaccaagagctaattttcaccattagatcatcatcaacaatcaaaatatcttatttgaattttctccttatttttttgggcctccttcacctattaaaagagagctcccttagctcacttttcacattcagaaaattacccacatggttagagcttctctctctagaatttggagcttctaacacttagtttattgttgtaattaccatctcgtgagaaataaaaacttgaagtagatttagccccattactatcgcgatataagggatgaacgactataaatttattgggtctctcttataaatacttaactacttattcattctcgccaatctagcgagcgggtgtgacttaaaagtttagtctagattttgagtcaacattttagtgctcttgttgagagccacaactcagaaagttactaaacaagatggttgtaacacgttctacaagtgttgataaacaaactccagcaactggccgaacaactaggggcaggccagctgacagagttggaactgggaccacttctgtgccccaggcgccaggagcaggccttggaactggctccataactcttcctctaaggtcaccaccaactgctctcgagactggcaccaacgactaaatcccaccttaagagccacacgtggagatagaaaaccctgaggagatcgatcctcatgtagctcagctcagctaaactgtggttgacttgcaacaatagctgcgagactctctcgataagaaacgtgaatagtttcaacactggctcgtcgaaaacaacaagaacattgaaagccaatgctttgagtaggaacaacggagaactaacctatctcaacggattagagaagcttatcgctctaatcacgtaactacttcccataggggtttttctgagttggtgagagagacaccctgtcgaccaactggctgttgggttttgttccctaaataaaactctatttcaatgtaatcttctacattcatttatcaataaagaaacaaatttattccattacttgtttaatgtattacttggttcacatgtttatttcatnatcatttgtttgatttataaattcatctaaattcttgtcacattgatattcttgtttattgtgaagtcaacatagtttagaaaatcttacattgattgcagtggaatataataactccttccgctcagatctctaacccttgctcctttttgttgcagagtattatcaagatctaa

SEQ ID NO: 121998 - DNA, 1139 bp, Cannabis sativa
agatcttgtttggtgtcttgtgtcaaaagtcttcctgacaatgaaggtcaggcggtgtgttccatttggtgatagcggcggtgcaatggaagatcatttgatgggaggctatgtagtccagtgtttgagaagaaaattattgggaatgcaaacaaagtcctacatttggcttgaaagaggaagggttatgagtatataaggatagacatatatatatatatatatatcactattggtatgaaactttttgggaagattccctagacccaaaataaacaatatcatacttagaatagaaatagttggtgtccaatattaaaaaagttatgaattttaaagtttcatccaaagctaaaagtgtcatactaaagtgagtttactctagcctttcatcgtatggtaattgcaaattaagatatgatttttttttcttgcaaggaaaattaaaaaataattaataatgactaaaagtgctcaaaattcaaataatggttttggtgaggccacatagcccaaaatttacacccttcaacatcataattgtatgacactttctttaggtcccaccccaatctaggtggaccaaattcaaactcctcacttgtgttgctccataactttaaaaagaatttcacaatttttgacttgttttacctaaatttcttgttttttattttttattttttttcatcgacaagttgttcaactctattatcatttttggtgtgttaaaaaatatctaagatcgagatgtacatactcaaatcaattttaaaggaatttctcagtttaaatcttgttcaaaatgtcaattagattagaaaaaatctatttttgaaagcaaatatagaattctccttcaaaaaaaaaaacaaatatagaatttttattaatttgtcaaatgagtcaaataataaaattgtattaaacttcctttcccaccaattatcatttacaatttcacaatttttcttttacaataatttatgttgttgaaagatattggtaacaacaaaaaaaagtgtgtgcacttacttaaaaatacaaataatcaaacaaataactcataatatttagcctttaataatgaatttatgtgaatacaactaaaaaatcattaaaaatgattattattgatg

SEQ ID NO: 121999 - DNA, 512 bp, Cannabis sativa
tataatacaatacaatacgaccttccaaacgagcccatgaggatttaataaaccattacaaacataactataacacttatattgttcataattaaaaaataaaataaaataaaagaggagagaataaaactagattaagaaatggcattcgttctcctccaagaagtctctattctgatctctacccttcctaatcgtgatttagaagtttgagtagggttttctctaattccatcgtgaaaagacctattttgctcttgtaaaaattatcatttaagcttagaggagtgctaattacatttttttaagttaattttcatgtttgaaatcacatgtcgaattttttttttatagcgttattcgttatagttacagtcagggtcggtcctaggcataagcgagctaggcccatgcctagagcccacacttttcgggggcccaaaataaaaaaaataaaagattttattagccttttatttaaataaaattttaagtgtattataaacaataaa

SEQ ID NO: 122000 - DNA, 3061 bp, Cannabis sativa
  modified_base (3022)..(3035): a, c, t, g, unknown or other
ggcaattttgtcccatgtggctcactctgagaatttagtggcccatggtttggcaaagcatgctctgcggttagacgatgagctatcctagttcgaggaggatccagcgctggttgtagatgtctgggtcgtaaattcatgagtgattataatcacttcgttaaaaaaaaaaaaaaatcatctggcaaagagcaacaaaaaggtgggaggcttcccctgccgaaataggaaaaaaaataaaaaaataacctcaagtatgaagtttataatagaatcaccatgtaaattacttgctctcagtcaattcctccattagtatcccttaaataaggctccttaatcaccacgtgtataacaaattgataattaaattggggggctgtttttttccaaaaaaattaatattgaatttaggtttttctagatagccatggtcatataatttgagctcccttttcgtattacaaactcaagttaattttttttttaatagaacttaagttaatttttaataccaagagaattgaataaaacatataccataaaattataccatgtatataataatttcattttgggtaagaagaaaaataccttcttgagattagtggttacgatgtaggggtgagatacacttcactgcaaacaaagctcaggtatttattttttatatagtttattttgacctttgataacaaacaaaagcaatcgttctgtatttttagcttttctttctaaagaggatagttttaaaaatgtagttgaagctaagggtgtttatacatttaattcaattcgtattattttgctcatagtacatctgatccgcactaagtacagatttcatattttaaattcaatctaatctgcatagtaactcaaatctaatctaatctacaaaaatacggattagatcggttatcttgaattagttttttattaaaaaaatatttttttttccgtataactaacaataaaataaaataaattattgttattttatgtctccaataataaattaaaataaataaaataaataaatttaaagcaagaaggaaaaaattgtatgtatatagatgtcaaatttgatattaaattatatgttcattataaataataatagaatatatatttaatttattatattctgaaatatatttgtattagatttttaaattattgttttttatattaaaatattagttgtatatataatttttgaatatatatatggattgaattgaattaattacttttacatgtcaatcaacatttaatccgcacaagtgcggatatccacactttgcgaatagaattgaattggatcgtggggattagactagattggttattttatgagcacccctacttgcactcctcattaaggttggacacttttgtttggcaaaaataaaggtgtgggaaatctgtcagacaagcgtgtgattatgggtgttcataaaatagtcaatccaatctgcacaatctgatctaattcaatctgcaaagtacagatatctgctcttatgcggattaaatgttgattgatatgcaaaagtaattgatccaatctcatccaatctacatatatttatataaattttaaaaaaaaaattatatgtatacaattaacattttaatgtaaaaaaataacaatttaaaaatctaatacatataatacaaatatatttcaaaacttaattgatcaaatggataatctattcttacataaaaaaaaattcgatacattttaaaacaaaattaaatatttttttacatataatttttttcttcttcttttgaatttgttatttattttaatttgtcgttggagatataaaatagcaataatttattttattttgttgtttgttacgtaaaaaaaatatgttttcataaatattaaataataaaatataaaaaattaatcaatccaaaataatagatttaatccgcacttactgcgaattggatgcactataaacaaaatagtacggattggattggaagaacacccttacatgtattgtgagaaacctgcattttttagcttttaattcaaaaaaatgttgattttaaaattatacttacaaactgagaaatatcgtctataccacaatgttcaaaggaacatcaagtcgttaatcacgtgataaagtgaatggaatactatttgaaaactaattattaatgaaagaagtaatccattcatcttatatatattttttacacattagcaatgtgagactaacgatttattagcttataccaactataaagtcccattttacttgaattttataaaaaatatgttcaacttatattagaattagctggccaatatttgttattgccggcccactatttttggcccactttacttcatggactgccttctcctttgccctatatatacatctcaatgtaataacctaaaaacacttttggcatttctgccgtttatacaatgcagtaaaataaaagagtttttctcatttattatggtatcagacgataacaacctttcctagcccttgttcatcatcttctatggctccaagaacaaggaactctaccattgtcaccgcctctgtcagcgaaccgtcgcctcctcctactgtcatctccgatcaagacatctcctccattgacgccaccacctccgatgtcgtagctctgcccgcatctcctcctgttgttccacctttgtcggaaacgatcggagctcatccttctatgttcaatcctcccacttctggtgtgttcgcctccggttacactgccgatctccccacttgtggaacgattggacaaacttctacagctccgatcggttccagctctgttccgacatcatctttcatggcttctcaaccacacattccgcttctgccatcttccgctcctatcttgaccccaatggtccaacagccgacttccctcccttccggcaccaccacgactccagccaccaccttcagtcctccacccgtccagaactttgttggaaatattttaccannnnnnnnnnnnnntaccatgtatgtttcattaacatcct

SEQ ID NO: 122001 - DNA, 1621 bp, Cannabis sativa
cacacacacctctcttttcaaaactcactatttttctctacacccatacctctctctctctctcacacacaaaatacatatttataaagttacaaaacttgggcataaagatagcttggggaccaagacattccaaattttttttaagaagactcatcaaaacttggtcaccaagactttcctttttcccacaattaataattaccaaaaaaaaaattgcaactttacatatatagataaagaaataaataatttgagtcaaactctgatagaaataaataaaaaagttcgaatctataacatctacatgaactttttctgtgtatttatttttaaacaaaatttatgataattaatttaaaattaagtaaagaaaaattaaataacacacttattttataacaacccatcatgaaatatggaatacataataaaagagatgtgcaagaagtattgtttggtggcccagctatccatcttgtattgagaattttattttggctaatgccaattatcaatgaatttgttatctctcgatccatttgagtgatttgctcttgagtagtgttccctaaggttatttttctcaaaatagcttatatatatgagttcaaattgcattatggttgatataaagttgaggttaaggttggtgattgagataaaattggagtatgtcaacctccaaggttaggggtctagaattgggtttaagtccgtgatacagggccaaggctgggtctgggtctgatatcaaggtcggtcctaaggggccgtgaggcaggtgttagaatttatgtcctgaaataagcctgtaaaaacattactgtttataaatattagttgaacattttgatatatgcttgaatgttgaattattaatatataatattgaattatttatatataaatatcagaaaattctttattcatatatgagattatgacttgtattgtacggagaattgagatcacttagccatgaataaaatagttagcaacatattaaagttataaaatctttaatcaacggttgctagtacggttcactgattcccgttattcggtgcaagcaatcttgatttagattactgattttatatgacatctaagtaaaagtattgtatacaatagagattatatatggcatggaccaatatgtaattaagttgtctttattaaacatgtcgtttactataaagacctaattcacatcacaatgatgatcaatagtagatcgacctaaatcctgagtaatcatgaactcaagtttatgttattagtttttttgattcactcattaaacactactacaaatataacatttatctttgtttttttattaataaattataaatccgaagataaaactattttaagacacgtttcatcacgttttgtttttaaataaggagacaaatgagctttcaatttctcttcttcgttattcgcttatcagacactcagttggtggtaaatttacagcatggattgtttaggtcgatgatattgtggttacaggtaatttcatggaagaaatttctcatctcaagcagcttctctccagtgaatttgagattaaagatctagaccaattaattaagatattttctgggaatgg

SEQ ID NO: 122002 - DNA, 2062 bp, Cannabis sativa
cgaaaactccaaactcaagaacactagcaaaatagtaggaattatatattgaatgtatgagatagtttcaattgatgggagcccttaggctcttttgatgcaaagagtgactactcaatacattggttggataccctttctaattcccttacacaactatatatagtaaatcgcctctcaaactagcctcccacacaaagactcatatacccttattatttactgtatgttagcataccatactaatcctagggcctaacacaacctttccaatctgatagaaaaggatcctatgattttgagccgatcttatctggaccgcaatcccaggtttgtctatgaaagcagatctaattatattagtgtatataattgatttcttttgtgtaataccaatcgataaggcctcactcgtatatgctacaagatctcatagcattctcttgattttcgatttttttgattaggatcaagacaaggcagcgggttttgtctccatttttgtgaaaaatagaatttgttgttgactttgcttaatgtatttagatgttatcaatttttttcgagtatcaataatcgtctgattaatccaatcattgattcgaccgttgtgagttcccgaaatttagaataaaatattcatcaaggggtaaatctgtattttaatgatcttgcagtgccaaattcacaaatgttgctgaagttgcacttaaatcagtggtgaatgaattgatcaaagagataggaattcaatgtggagaagacaatctatcaaccgggatgccactcgctaggttattggcgcgtgtcactcacgtgggtccgattctactcgatgaaccgagcaaaaacaagttcattgaagccattaaaaatgaaccagaagtggaaatgttattcactgccctctactcaaatgcagatgtattagattagcaaagtgagcttgtgattttttcttttcttttaatttcaatttacaatgtgtatttttataagaaagtcatctatgtaaagaatagaatgtgattcaccttagtttggtattttcaaaaaattattccaaattataagtgacaaaatagagtcataggactatatagcattgtaatttatctttgtaccttttatcttcatttttttttctttctttttctcttgcaaacatttgtattgatgtttgatgaggtaataatttatttaggacttacatcttgaagatcttgccatagcttatggtaagtttttgttgttgtaattttttagtttaaagatattgatatgtctattcatttttacccaaatttgactatgctcaagctcaaatgggtgaaatgcttatgatttttttttttgttagaattactaatgtttttgctttctttcttttcatctaatggttaatgattttcattagctgcattaagaatggttaaaaggtttttataaaatattaaaaaattatagtctaatatttatttgcaccaatatcagtctaacatgttgtggtagtgttaaatactatcggtactttctaacatttctttttatttcgttaacacttaaataatcatttcaataatcaattgataacaaatacactacacttaagacgaacttgaattgataataatattattttcataactttttctattatttggatgaaattttgaatcaactagtaataatattttaattacacctttacattatacaattaaaatcttggcacaaaatttaaatctttcaacctaatccatgtggaaattaatagattcttatgtactaataaacacaaaaaaatttgcattcctgtgataagattaagttattttgtcaaaacaaataaagaaaaactctcaaaagttttcatgctcaagtttaaataaacccaacttgttatatattattagaatttatttgttgaaatattaaagttgtcagcttagaattttttctgtgtcatattattataagggatattggcggctaaaccacttaaactttacgttttgtaacacttaaccacaaaaatcgaattttcggcggctaaactacc

SEQ ID NO: 122003 - DNA, 1245 bp, Cannabis sativa
  modified_base (244)..(245): a, c, t, g, unknown or other
  modified_base (1051)..(1054): a, c, t, g, unknown or other
attatattttgagaatacaataatttggtttggttattacctctaaaacttatttgtaaacatcttaataactaattagctattttaaattatatattatgctctcttattatttaaaatatatttaggtaatcttaaagtttattttccaaagagatcatataatataataagttattatttttatttaccaattattttatatatatttttattactttaaaacttatgtgtttatttttannttatattaaattaatttgttattttaaatactcgaactactttttcaatttgtttttgtaaaaatatttatgttactttcaagtctatttaatatagagtaaactattatcaaatataatgatatatgccaataaaccttttaattttttgtatattggagcaacaattcatttttttttatggagaagaaattataaagggatttttacattaatatacatagttttcaaattatttacattaataaccttacataaacaatcagcacaaactaacgttccacgtcagcaaaatactgtaccggagaaattttttccttttctttttttgaaaaatcaaacttttgcctatcatcacttattagtagttgaaagtcaaactttaaaaaaatatgtgcagtccttgcacgttcttttttttttcttttcaacaaaatcaggtatattcatttttcttttcctttaaagaaaaatattaattctatatcttaataggttttttttaaaaaaaattctaattatactgttaattattttcgctaagaaaataccatcgtaatttattctttaagatgatcattttaataaatgagaagcatatataaaaaaaatgaaagcatcattttaatttcttttatatttagctaaccaagtagtatttttttttatttggcttaatatagaaaaaagtaacttttttttttaccagatatggaaagagtaactaaatggctttaaacaaaatatattataccaaatagttctaaaagttattaataagtattttattattttagatctaaaannnncaatataatattttaaataagtctatttcatagattaactttaataaattattaaaagatacgaaacttactacgtagttcataaaaatttttataaacatattaatataacaattagtttcttattaagccgataagatatcaatgagttactttttataaaaatatctacttttacttttttttttttt

SEQ ID NO: 122004 - DNA, 2445 bp, Cannabis sativa
ttcctgaaagttaacgcatcatagtcaaaaattggcttgaagcttcaaacttattttttgatcacaaacggagcatgttgagcatccaaaacttagaatctttcaagccattatatcttagaacttcaaattccatgacaaactcatcatatatatattatttaacacatctcttctcattttcaattcatattataaattttaccatttaaacctgaaataagtagaaaataagtgtgattctgcacaaaatgaatgtagttaattgaaacacacctctaagatacttcataaaatgaacctaaaactagcctatgatctatgtcataccgggtgtaggtgcccccaagtaactgagcagacttgcatccagggtataacacattaatttgtctcggccctgtatatgggtgaacctatttgtacccatgttagacaaattagtgatttgaaaatcactaagtgaaattacttagtagttaacataatttgaacgattttaaatcatgttattcatttgttggtcttgtatgtgtggttacttaagtgtaacttacatttgttaagtatagagaatgctttaaagtggtcaccggacttgggcatttcaatcttttgaaacttctgagtaggggtttctcccaaaagctataatttaagaatgataacttaaattggaatgtaattatgtgatcattggacttttgcattataatttttcaaaacttctgagcggagattttgtccagaaactaccatttaagaatggtgttttgtttaatcaaaggtgatttaatgtggtgactagaccatagcattaagacttttttgcacttctaaactggaatttcatcttgaagccaccacatagaaatggtattttaaataggaatgcaattacgttatcatcatacctttgcattcactggtagtaccgtgacttggcttgatttctcttctatttaggttgatcgagagactctgccagaaggttatgattcataacttggtcaaaattgaaccttcaatggacgaaggttcatttaataattttttgaaagcacttttatgatgttgttcggggttcctctatttagaaggagtacatcatccagatatgttttctgtttgtcacttaaatggactcaagtactaaattagtagttttggcctatggtcttggtcgggccttgaactagactttgctttgagtatccttgacttggaaatgccatgtgtctcccagctggaaatcgggtcaatttgacctacagattggcaacagtagaggagggtacgtgacttaggtcggccttactctgccagacattctccacctgcttgactgctttcttgagctttataaatccatctgtccattctaagagttcccccattgaacctaaagtggtcattttaatgtccttctaaagtgctcttaaaggctctattctgcctaggatcgtagctagtcatcctccctttattaagttttttaccttcatggcttccatcatgaacctctcaatgtagtccttcaaaggttctcctagtcattgcttcaccttgaccaagtcttctagatgtgaaagcaattgtttggaggatgaaaactaggcgtagaatgtagtggtaaaggcttcccaagaatcaaatcttctcagaggtaacttgaaataccattgttgtgtggtatttgctagagtagttggaaaattttggcattggccatctcccttgatgccttagagatcgatctgtatctcaaaatacttgatgtgagacaatggatcatattttccattgtacatcttccaagtcgatattttgaacttggtcgggaggtcaagagaattgattcacacagtaaatagcaaacccctagtccaatcaagctccaactcggtgatttttagaatggacaggcttttactaggctcttaagctgatctaattggacttatatcccatgataaacttgtcatgcatgttgactggcatgtgtcacctgttgaccccctgagcctcaaaagctacgagattatctctatttttctgaacaaagtattttgcattgatcgactgattattacatggggctgaaatgtctgtccaaatcacttctctttcgggttgtcattcaaaaggtttcttttaggtctaggtcgaaagtttttctggtctttcctctcgaggtaattaccaggaaaaacttgctcatccgctggggagatagtggtatgatcactgggattggaaccagattgtccatcctgcccgggtggccatacatatctggttgtatgttcttcctacccgtactctggtctattcggctggacttcctgtatttgcccctagtctgctgggtaaatctcctaatcaggtcagcagctagggctgagcaaaaaatccaataaactgaccaaaccgagtacaccgacc

SEQ ID NO: 122005 - DNA, 1006 bp, Cannabis sativa
tttaatatatataaatgtaattggatttgatcgatttttaattgaattttgagattgacatccaataactgatccaatccagtcaaaatctaatttttaacatccaatccaattgtaattgaatatacaactttttataattggattagatcggttcggttcaattggattggatgacacccacccctaagaaatgattgctcatatatcctctaatactaatcaggtagagaggacaaatttattttaaagaatacgtgttttacgtgccttattttttcttttaattactagttttgaattttattgttttgtatttaaatttttatttttcaattaataatatattattatgtttgttaattttctccattctttttatatttaaatctaacaacctatactcttgacaaaaataaattaaatatcccaacccaaataatttggctattgtgaagtatgcttaaagtgcgagaagacgaaatgtgagcctcaagatttacacaaacataagaaaatagtctttataatagaaaagtgataacttgattgtattacatggagatgattacaatatgagaatttttaaatggcagcaccctcttcagtgtaatcctactaccgaccctgagttaaaatgggcctaaggcaacaaaaaaaaattagacccttactataaaaataaatgacgcaagttaaaatatacctattttttttataagttaaccaaaaatagctttattttaaattcaattgaaatgtgcccacttttataactctattaccgattataccctcacagctacacaagttaaaattgagtggagacgggagagtcaaaagtatcgttaaatgatagggacataattagtagagttattgaaaagaaaaaggtagaaatgaaaaatatagaaagagggggtaaaaattaaacacaataacttaaacgagtatgtatattttttaaaagatattttttttattttggcccctaaaatgagtgggc

SEQ ID NO: 122006 - DNA, 737 bp, Cannabis sativa
tggaggcttgaagcggggacgttacatataaataagtattaatgtatcaaaaatgaaaattatagtgttaattaaccctaaaaaattataattattatgtagattaattcgaagaacaactgaagggtggtgtctcatatatagagttaacttttctatacatatatacgaattatttataattaattgatatctctatatcaatgacatatattaatatgcatatatagtgtttgttgatatgtataggaatgttttgatcaatattaattaaaagtgtaatagtacaatatatattatctatatacatatatatggtgtattgatccttaaaaatattttaattaatttgtatcgtgaatattaaatagtatatctaactgtaaatgatatatattattagattacgtacaacaccgtgacatgtatcctatggatcatatatatatacaatacattaaatattatagtgaaatacacgttccttttatcatataattaatatttaaatatttagagatcataaaagaggggtgcattccaatatcaataatatgatttaattattctagtttatttcgaatttaattataagtcatatatgcatcatgaccacatgatcatgcatttatatatatatatatatatatatctattctatgtaaagtgtacctatataacataatttttggtttatgagaaatttatgagtgaccttttatttatattaaaaataa

SEQ ID NO: 122007 - DNA, 1293 bp, Cannabis sativa
  modified_base (55)..(55): a, c, t, g, unknown or other
attagtaatcccgattaagggattagggtttcataagtattttgggtagcgtgcntaattatttagggcgttacatgcaccctcctttgtatgagtgcctgaccaggcacaaaatccctgtcttggactagttgcctggtgacttggagagggaaagaagcattcgacatctcccaggtagccgagcttctccaaattcttcatcttgtcttgggttactatggacggaagagacacccaccgagctcctacgacactttgtcttctttgaggaacatcctcagtgtattcctcagttccatagtcttcaccctctaccaagacttcaccagcctcgaacacaagctcccctttctcattgaaacccccaaagggcaatctccgagcaaccccctcttcctcggcttcagatggactgtcaagacacacttcgtcctgatcttccacctcagtaccgcctagggtgcagggattagggttgcagttggttgtactggtgcctgattgtaacctgggttatatttattattaagattatgcttttcttactgggtttgtcgactcacagatattgttgcatgtgtaggtgaaggtaaggctaaggttgagcagctgtgagagcgagcagatgaaggttatacatgtcgaggtggttagacctgaagcgtatgatgcttgggacagatagttgtattttgtatagtcgcttggcgagaacttttgtattaagtattttgattcagctgaaaatattttaaacttgaaatttgggatatatataaaaattaatctattttaatattattagtaattaagtaaagttttaattattcacgatttttaataaactcattgattcgcaacgaactgcacagttaatataaaatcacgataacaagcctagtctagtagggtgttacaatgcactctttactagggattcgaaaatagtgaagaagaagagggagaaggaattcgaaatagctatagaagaaggctctcaatttttaattatttaataaagaatgaaaactaggttatcttaggttattgagaatgagagtcatcttatgccttttgtagtatttcatgtaggattaagatttaaattatatgtattaaaaaagataaaataatagcaaaataaagcttaagtggccgaccatagttagtggacttcactagctataattttgtcattttattcaacaatttattttttctttcactaatgccatattttcaaatttcaatcctataaatataaaaaggctaattagtaattgttccccc

SEQ ID NO: 122008 - DNA, 1006 bp, Cannabis sativa
caccaaaccgaacccaaacacccccattcggaccatctccgttcaaccagcaacccagcttccattcgcctgagtcatcgccccgttgactcgccaaactcgaaccagcgatccaccttcaactcgcaccaccatttcgcccgaatcgcttgagcaaaatccgttcactccagaccatactcacgaacccgcaccaactccattcccctcatctcagtccaccaaacaccacattaaactcgaaccaaccatttccgtcccacttcagctcaagccgaagtcactcaagccaccacgaatcacgtgctgaaactccacgcaccaaaattcaagctgccatcattaccaatactatccatttttgctagaaatcgagaaagccagccagactctccatttcaccattccaatcacacataaattcaagaagcaaggttagtctctgtgactgcagtgaaccgtacttaggaattgaacatggtgaatttgtgaatttacacaattggtttaaagaaacagagagatatttagtttgagttgattgtgggattgttagtgtatgagttggatgatttgagaagaatacatagtgggaatgtacaatagatgccaagtagtgtgtggttttgatttgtgcgggtgatgaaatttggatttcagtggtacttgagaatagttggtatgattgcaacttttggtgtggctgtgagctttttctggtgtaaatttataatcattgttgttgttgtttgagtagtttcaaattgaaaagaaacagggagctttcgttgtggctgccgagggtgaaagaatttggtgtaaatgctttgaattttagttcgtgtggtttggaaagagtggtgatttttgagcaagattggtgtgtggacattgtagtgtagtataagaataattattgtgttgagtggcagaggttaaaaagaaaagaagagggggaattcgctgtggttgtttagtgtgcaagtgaaaaagaagagaaagtgct

SEQ ID NO: 122009 - DNA, 1074 bp, Cannabis sativa
  modified_base (996)..(1030): a, c, t, g, unknown or other
tctctctctctctctctctcgtcgtcaccaccactactgcaaccgaagctcgccaccactgagaccgacgatattaatttagtacatataataataataatatttatttatttatgtatatacttattaagtaaaaaattaaatgtgttttatagttgttatagtctaattaatgtgtaaaaatttaatttgttttgaaaaaatttcatgtgttttaaagtatttgttattgtaaaaaatatttcggaaaaagttttagaataaaaaaaatttaggtttgtataaaagttttatttatttaatttgttattgtaaaaattaattagttgttttaatttagtttagataaaatattttatgtgatttagtttaagttaataatatattaatgttatatgtaaagaaagtttagtatatgtgtagtaatttataatttttttgtatatgtttatttattatttattttatgttaatttttttttttgaaaaaatgttaatgtttaaattttttaggagttaattgattttctcggtggtccaacaaagtcctttatcggtggtttttcaagcgatctcctcattctcggtatattattgtttaattggataaggttatctaatatgttaaagaatttaaaaaaattgattagtctcaatcatacatgttaattaacaattgatgcatattttaaatttaacctttaggtatcaggtcatttgggttgactgaagagtgcacaagtagctagctttattagataaatatataattactaaaacttgaaatttttttatttaatggagtttcaatatcttaaattattgcgattaagtttaatctcatatttatatggaataattacataagataccatttttttataaaatattgatatttttacgttcaaagaatgttttttttacatttatacggttttccaaaaaataacatggaaacaaaataaaatcaacaaaaaaacaacataaaagtaacannnnnnnnnnnnnnnnnnnnnnnnnnnnnnnnnnnaaaaattaacaacaaatgaacaaatttcaacataaaaagaccgt

SEQ ID NO: 122010 - DNA, 2185 bp, Cannabis sativa
aaaaaaaaaaaaaaaactaatacagcatacaattgtgaataccttctatttgtttacttcattctctctctctcttggtacaatctttttatggttaagtatatattcccaaaggataattcaatctttcgtgttaattatttgatatttctaaaactttttaaaaattaatacattaaattatttgaaatttaatatttaattaaattaataaaaatattaaaatataaaaaaatactaaacagcttttaatttcttatctatcattcaattcaatatatataatgaacattgtgaaagtttttccaactaatagagaagtcattcatactgctacaggaatatatatctatatatacttttaaaattaacaagaactaaataaaacaattattaattatggaccactacttgtcttgggcaattaagcaagacaaagaccgcgagtccctatctattcaagtcaatatattattgcaacagagcaatatttatgatataatatataccagtactacactgcgagaatcacatggttgctttgtatatatatctgactgtatctacatgtatacaatatacatgtatttaatcacaatataatatgtttagaggtactagacaatacaagtagataacacatataaaacacaagcatttcaatgaagtttccaatctttcaaaagtgttccatgagaagaccaagacttttcgataagaagatcacaataaataagaaaatggataagaagaaaaaacgttggtgtgtatacatttattattcgaattaatgacaccaaaatagactcatagtatgaatatatgattaaagaagaagaaaagaaacctgggtgaaagtgtgaagcaataattaattacttcctacttttcaagagaagttgataattagtagagttttctgaatagaaattaatcaacgctagacagaccttctggaaagctcctctgaagacgagtgtgacctagggctcgccgtgtaatgtcgttgttgctgctattgtcgtcgtcgtcgttcatcggcgttacagtctgtcctccattcctccagtcaagtgacggttcctcctctcacccccagacaccgtttgctgccatcagacggaatcccacaattaattttgtcatctccttcacaggtaaacctctaatctgccattactcctgtgttgatgtcccatctggttttaattttgctctgcatcccctttccattttctcaaaccttacttataaaggaaacccctctttcggattagcattaatgaagcccatacatcctgaaccaccctgggcaatgattaactctataatcgtagaggacattatcccagttctaggagccactgtcatccctgcaggtataatcgatacttcccctgacatggagaagttatttgttgctgatattcccttgccagaacacatactcgaccaatcctgcctctatataccatttctttttttgtttcattctgcatcctgtcatcctcagcatactttccttatttatctctgcatctatattagtctttcctttcttgtttattcccaaatccccacccctgttcccacaatggacgatctgtccaataccttcaatgccacccttaacctcacggctcttgaaacacaaatccattccttcactgaaacacctgaccatctagaggatgatgggcgtgaagagccttctgctttcttagccgtcaagcttttgactactcgccatttcaattccgaagctttcaagaaccgcctcaagcagatgtgggctgaaagattttccatcaatgttcttgaaaaagaacccaacttctacactgtcgaatttggctgtttcggggatagacgcagagttctcattggccaaccttggcattttgactataagctcatagtcatgaccccattggaagccggctctgtggtcactgctgaagctctcactaccactccattttggattcaagtctcaggtatcccattcttgaaacggtcccgtgctcttgcacaaagactcggtgaagtcctggggcgatttatcgaagttgatactgcatccctcaaagagacttggggtccttatctccgagttcgtatagaaatggacgtaactcagccactcccgcgtggaacgggcttccattttcatggtatggctgcc

SEQ ID NO: 122011 - DNA, 515 bp, Cannabis sativa
ttctacgattgatttttagtatgtatgtttaaaattctgaatactgtgaaaatagctcggttgggaatatttatatgttttcataatcatagggaaattaaatttgtttatattttttttaatcactgtttgcagagatggcaaggagttctctccaattattgggtttttcaaatatgttgatccctcggaggtttttcttgttacttctttcaatgtttacctgccactgggtttcttactaacgtttatgtattagttggttcctataatttgatggtaagattacatttgttgtatttgatcactcctacagataattgttcgaaaatgggatcaacaagaggaaaggctgataaaagtattagaagaagaggttctaaattgtgttcttttccttttactaatttctgttataggtgcagatataacatgttggtattaaaatttactttgatgccttaagatggagtcatgttggttattggcagcatcaaggtgctaggatggagtca

SEQ ID NO: 122012 - DNA, 3295 bp, Cannabis sativa
tataatgggttttatttagggcataaaatcccaacatgttgacaccatcaacggaggagtgggacgaacacccattactcctctcaatttattccctaaaaccgccattcatgccagagaaacgtctacatcggcgaccactatggggcagttcctgcctttcagacatgccgggtatttgaaggtatcatccaattgaccacaacccaatatactgccttataagaccaaatgcaggctttttcgactgagatcaatggaagggtcaggacctgatgtcctccacgagtactgaccacacactcagagaaccctcaggtaatgaatactaggcgacgaactaaccgcactcgcagggaacgtagcaactgacaagagggacttgacttgaatcagccaacacagagggaccaagtcgcacgaaactccaaccgggaagtgctacaagaggaggacccaaagcgacgcaaccctcgcagtagggctcaactccataatgaggtagacgatgttgaatctcgttcttcatcctcacaaagtcgtacttctagtgtctataccaggtctggctctgtggaaacaccgccaggaggaaggtattaggttcacggaggagatcttcgtgaaaacctcaacacagtttctagggcgcggtcccagacgccctgaaactataaagagcctcgtgatccctaattgggcgatcaaggcataaacaacgacaataacctagcaaatgttgtcaacctgcctaacgcactagttgtgactaccgaggtagtaatcccagcgaatatagctgcgattgctagtgcacctacaacgactcagaacaaatttatcatgctagggggtgttgatcagagcattttactgcaagcaataaaaataattgagtagcagagaaagcctatttacaagcttcgtgggacttctcccttcaccacagaagtgcgaaaagcttgattgcctaagggatttagactatctgagttgctgaaatataaaggtactactaatcccatagattatttagaaaaagtttaatacaattatggaagtagaccaggtaccgcagttagcaagcatccttgcgacaaccttggaggacaatgctcaagattggtttagccagttgcctgaggcgtccatatcgacttgggaaaccttcgtggatttgctcctgacccatttccaagccacaatgacacataaaccgccttacacaacttttactaacatcaagcaggaggtcggtgagtcattgtaggattattttaaacattttaatgctgaagtaactaaagtcgagaaggcccccgagtcttcgttagtttgtatgttgattataggtgtcttgccaagaaccgacttttggaaagagttacaggcttgaagagcagaatcgctggtggaattctttgcgatggctgagacacataagagaattgaaaactctctggctgagctagaaaaagggaaggataagcgcgagtcacctgtaccacggtcatgatctcgaagtcctaaagtaaagaactctagaggaagaagcccgagaagacgaagccctcagaggcagcgaagtctgaagttggccaagtccccctcaaagaaagaaacatccccaaagagaaaatgaggaccacccttcgtcaactatatggaactggcagtccctcacgatcatatctacgcgattgaggaaaagaatgtagtttttagaaaacctccctcgatcagaggtaaccccgacaaaagggatccaaaaaagttctataaatattacaaggacatcggccataccactttggaatgctggttcttgtaggacgagattgaggaactaatcagagaaggaaaattcgataaatataagaaacatggtgaaaatcatccccaagcggatgataatgatgaaaatcatctcatgtagatgctctagcccgattggcctcgataagagaagctgaattagtcgatgtaattcctatagatgtattaattcacccaacaataaaatgagaagagatgatggaagttgatacagtcaacaaagtcacatagatgaccccaataattaactacttgaaaacaggaatgcttcctaaagataaaactgaagccaaaaaactacgatatcgagccactcggtatgtcatttatgatgacaagctctatcgcagaagctttagtcagccgttactcaactgtatcgatgggactgagtgcgattatatactccaagaggtacatggtagaatctgcggtaatgatgctggtggcaactcccttgctttaaagatcatgaggtagggatattacaggccaacgttgcgagcagatgcagctagctttgccaaaagatgcgacaagtgtcagcgaatagctacttatgtacacaagccaccgagccaattaaatttcatcactagtccctggccctttgcgtatggggcgtagatttaattgaagaattgccaaaaggaaaaggaggggtaaaatacgctgtagtccttgtcgcttacttcacaaaatgggctgaagccaagcctcttgcgactataacaactgccaaattgcacgagtttatctagagcgccatcatctgcaggtttggtatcccttataagttaatttctaacaatggtaaacaatttgactgtaaggagatgcgccaactatgggatgaattggggattaaaaaagcttttacagcagtcgcatatccacagagtaatgggcaaatagaagcaattaacaaaatagttgagcataccatcaaaggtaaacttgaagaacgaaaagggacatggccagaagaacttccccaagttctgtggtcgtataatacaactcctcgatccacgactggtgaaacccccttctcgctctcttatgggtgcgaagccatggtgccagtcgaggttggagaaagatctctaaggagagatgtttttaacatcagcagttctatagaaaatcagttgttatagctcgatcttctagaagagaagcgctatcaggctcatttgaaaaatccagcctatctacaacgaacaacttgttatttcaactcaaggtcaaagaacgaagtcttgcagtaggtgatttaattctgtgaaaggtcatgccaaacacacgaaactcagaacatggagtttttggtgataattgggagggaccgtacctaatcgctgaaaaagttggtagtgcgacttaccgattatcagacctcgatggaactgttgggattttatgtcctaaataaaacccatttcaatctaatctgatt

SEQ ID NO: 122013 - DNA, 1596 bp, Cannabis sativa
gttacaagtagattgtaccaaatacatttttttttaaataaaatatacataatgaataaaaaattaaaaaaaatatatacaaataaaatacgtttatgaaaaaaaaaattatttttactctttgaatttttatttgtttacaaaatgtctcttcactaaaaataataaactgtttttttgttgttatttttaagtttatttatagttgttataatattatttttatgattatttttaattattttataatttatttataattgtcataatatcaacattttattattttctactgagtaaaatatatttttagaattttcaaattttataaacctatttttataattaaaaattttaaaccataaaattataaataaaacataaaaaaaaaatagaatatttaaaaattctccaattttttttttttattttcacaaaagaagaagccgaataaaatttaatgtgcaactgtaaacattccttacgaccaacatgcatgaataagtgttctattctttttttttttttggtttaactttgtgatatgacacctgtgaatattatgcatgggaaactaaatttgcttttttgggtaaaaattaaaaaatggtaggacccaataactgacagccacgtgggctccactggaagctatagttggatgtgattggaggaggtggtggggttaggcctttctgaattagattacaatgtcacgtaaagcataaaagggtatttaataattgtttcaggtctcttttcaaaaccaacaaattttaaataattatctttctcaggccttaaaataataaaaaaacaaatttaattatcttaggttggactgggttgcactcctctgtagcgtgggtgcacagtcttttaaatactcaaaccttaaaatatacaataattaattaaataatcaaacttgtaacttggctcattgagatgctaacacatgtgtaataatttatttttttaaaaaacacgtgtaataataatgcttcgtgttcttattatttattttaagacttttttcaataatattcatgattactaaattatttataaaaataattttacataaaaaattacttaatactaaggatccataccgtgtatctatattcaaacttcttaaaaatgaaagaattacgtgcactatttgcactttgtttaaatttacattttttaaattgaatgtctttattttctaaaaaaaaatatattcatgtctttcgatctcttaatagtttgtttttttattttaaaaaaaataatagtttccaatttcaccattagctattttagctcaaaaagaataccactggaacctattttttaagatgactattttaatacggggaaacatatatttttttgtcattaaaaaaatgaaataaaaacaaccttttaatttctaatttttatttagttaacgagtctattttttttttttttggcttaatatctaaagaataactaaatgacttaagcaaaacttattatatcaaccaatttcaaaggatttcatatatattttggtcactttttttgtttagtgacttctaaaaggggaattaccccatatattat

SEQ ID NO: 122014 - DNA, 905 bp, Cannabis sativa
tgttcatttttaacacttcctacatgttttatgctttaaaaaatttacaattacagttctttaaagtttctagcttcttgtaaatggagatacctgcttattttcctaaccgagtgactcggtacataatcctccatcaatacaagacgttaaagtagtttagtgaaaacacaaatcggcactcaataaacactgaatttcacatacaaatattacaaaaatttcagttggcagtgaattttggaagaacagttattaaagacacaatatgtacttgatccacctaataaagtaagggcaatcctgccctaacaagcagttttgtagattgagttagttttaataactttcttaatatagtattagaggtggtccaattttgtaatgttgagtgcccctaatatcgatttgtttgcagctgtttggcatagttcatgttgtgcgggatggagtatattaaaatatactcgatccacctaataggtgagggtgattctttcctaacaagcggatccaaattctctatctcatccagttacaactaatcgattcaagagaattggatattaaattataattagattggatgtaaattttaaatatccaattagatatcggttattgaatgagatatttgatccaataaaataattccaattatcatcaagttgtcatttaattatatttaaatgtcttaaaattagtttatttattttattttaaaaatattaattaattgtattatgcacccatgagattacataaaactaaatataaaatttcacaaatcacatatttatagcatttataaatatattttaaaaacatataaatatttattaattttatatatttatatgcttctaaaatatattttttaattttatatatatgtcttattacta

SEQ ID NO: 122015 - DNA, 1686 bp, Cannabis sativa
  modified_base (40)..(49): a, c, t, g, unknown or other
ttagaaagttcatatttagggagttaatcaacatacttgnnnnnnnnnntaagatactggtaaaataatttccaacactccttaggattttttatctccatgtgtggctttctaggtgggatctggtcgttggtgccagtcttgggagctattggtgatggctgtagtggccaatgattacactaggcccaaatgcctcttacggcccaaatcgaaattataacccttcaaaccaagtcagtaaatgtaacccactcatccaaaatacattgggctatggataaaatacaaggcccaaacgagcccagcaactataagaccaatttgatacaaaggataggaacgagtctataactgaagctgaagaatcgatcctttctcttggaaaacgggaagaccacttcccatattcgttcttcagaataggggaattcaaccatcaggggctctataaaaggagaacccaggagtcctaaaggattatctcatcctcactcactgaacacttattcaagcatttacgaaatacattactattattattaccagtccttctccatcgctgtacagtggaaatatatgttttctatcttctttatttacattcagatactctttatttgaattgtttactgacttgatcgtcggagtcccttcggctggcaccattccggtgtcccaaggtctcaactgtcctttttactttgttctataggttgtcggtgcccgcgatccttccattctgatcattgtagattttaccctctacaatggccttaaaggataagttgaggagcaggttccaaggccttctcctggagcctagggcgcagaagtagtcccaattccaactccgtcaattggcgttcccctaattgcttggctagttgccggagtctatttgtcaatacttatagaacgtgctacgaccatcttaattagtgtctttcttgagccatggctctcaatgaaagcactaaaatgttgactctagactagacttctaagccacaactgctcactagattggtgagaataagaaaagtagttaagtaatttagagagacacaacaaatttatagcaattcacccctatatcgcgatagtaatagggctatgtctacttttagtttttaaatctcatgagatggtaattacagcaatagactaagtatcaaaaactccaaattctagagagagaaggtctaaagagagaagctttgaccttctgggttgttttcataatgtgaaaaatgagctaagggggctctcctttataggtgaaggaggcccacaaaaataggaaaaaaatacaaataagtttttttttccactattgatgatgatctaacggtaaaaattatctcctagtggtgatggccaatttttggtgcccagtgggtcctattgtggattacgcggagtttatttttggaactccttggggtaattttgacgttgatagctttagaattacgtttcagatttgagacacaacttgatagatcatataaatagctttaaaatgcaagttgaatcgcatcaatcagattaaaaattgagtgagttatggccgttttactaaaggcagtttaggtaccaacgtccatgttgacatatgacgtcaacctggacgttgggtaagtgtagaaacatccaagagattgttgggaatattttaccagg

SEQ ID NO: 122016 - DNA, 2032 bp, Cannabis sativa
ttagccattaatttgaatgttaagatcttcgtgtccacgtgtccctgtgtggttggtccacgtattttgggcaaaaccaggggcaacaatcttctatagatggtctacatcaattggggacaaaattatcattttacctttcaatatattttatcctttaaacacttagcaacttgtaaatgatatttcagtaaactaatataattactgaatgagtactccaccatgtaatctcgtttagccaaacttaaatgaaactatcgtttcacttctaaataatcataggagttataaatgtccatatgtatggttaacactcccactcaattgaactactgagttcccaatatgtaagtatgagctagtgtgacggataagctggtaacgaacaaatcaaataactctaataatacaattagcttaaagcttaatcatcttaggattgagatcaattgatgatctatgatcaactaagtgatattgaattagaaaagatataacgataagtttatgatattttttccactatcaatatcgatccagtccgatgtaaacttatacatctgattcttgtttagtttcacttagccaaatataagtaaatcttatcattaattatcatattagtgtaaatccaatacattgatgaatcatgagactcaaatagtttgaagcatataaccgcagttatttttcactgttgtaacaatactataattgtgaatatctatatgttcaaaatttaacaaaatttatatattaaataattaatcataaaataaacatgtgaaccatgtaataaataatagtcaaatgttgagataaacacatcttaactatatttataagtttataaatttgatgatgttgttagcttttaaaatatttacaaaaatataaagtaatattttagtggtaaatcttatacatttgtcgatatttagtgtaattctatgtataccaatattatttttactgatatgttatctaatcagcaatcataaaaatatatacgctaaacaagtatatatgtatatcattatacttaccacgatttcaaattctcaaatgtaccggttaatctgagtaaaaatttgcatattacatatttataaaataagtttagcataaattaataattttcatcatattgatacagttaatttataaaataatttccctacatgttatatcattatatataatttatataataatagaacatgtaatattgactttgatactgtatttatataaaatcaatcgttttcaacttaaaatgaaactaatctttaccttaagctttcacttttcaatgatttactgtcccgctactaccagagcttgaaaattattaggtgttgggttgaaaattttaaaaaataaactaagggggaggaggattttgtcacaccgaaagagaggattttgtttcttgtgtttatgttttaaaaacataatatataagcttaattgataagtgaaaaacttatcatttatatttatatataataataataaaaaataatattatatatattaataataatattaatattataaataaaaattttattaataataattattttactattttcaataatcctaagatatttggtcaattttgagtaccctaaaataccctgatatttcgtgtaagtgtcgttattttgtgacagattatttgagtacattgtctagtcatgtctggtgtttcagtctgttatatctgcacttgctaactgttaagtctgttatcattaggtgttagttagtgccaggtggactgttttgttggatataaatagtcggtttcattctgtaaacagtttatccattaaatcgtaatagtttgttaaatcagttttgatcgtgggagttagagtcgtatcttgctattcttgttgttgtatttacaggtctaattgtgtagcttgaagatggtcatcaatggcggaaagatcagagcctgaagttgctgagttctaactgaagggagttcagtgtcaacttcgtcatcagatctgaa

SEQ ID NO: 122017 - DNA, 1410 bp, Cannabis sativa
tacttaattaaaaaaattaaaaaaatatctctttttatactatatcaaaaaatatgttcatataaaagtatttaagtaaaactgaacttttacttatctttttttttgctaaattttttttttaattttttttttcaaccgatagaacaatctcagcccatatgatgtaatagtgagagatttttctaattagatagaaaaattaaacataaaaactcttttttttttttttatccattcatgggtaatactcattaagagtacacccatatatatagcttaatttgatatgatacaatacaatacgacctaatacgatgtatcaaacgaacctcaaaaattttgaaataaagaaaaaaaaaataagagtttgaaaactacaactagagttatgtggtgtgttggtaggaaaaccttcaaaaaaattcttatataattaattttttaattaattattcttcaataaatattgtatttaaaatatctttaaaatcctataattaattttaaaaaaaataattaatttattcttaaataaacctttatttaagacaacataattatcattaaagttttatcttaaaataataacatttattatttatttgagtcaagataatttttgtcttaatttggttataagtttgagtttaaattttaaacctaaaatcaattatatttatttgattcaaaaataaatttttaaaaataaatatcccataaaatttattattttgacttaattattaaaaataataaaattattttattatttatttttaaataattaggatagttattattgtgaatttggaattcaaataaataactatgatatttattaagaatttaaattcaaataaatatcccaaaataataattaattatttattatgagaatttatagtgtatatatcacatatacactatatatatacattatatatactatatataccgaatatatatctatagataaagttgggttcgggattagggtcgtccaccatagcctcaccgtgggttggcaactctggggagccaccatggccatggtggctatggtctgccacgagggggagcagccatgatagctgtgggtcacgaaggacctgcgatgacccagtcgggtctaaaatgcatggaggacgtctcacgtccatgcatgcaacgtcccgatcaacaaattagggacctcaaggtccactgtccgtcgtctggtggtctgtccaccgtaccgttgacgatcaacagcaaggagggcgcggaacccaaagcccaaatgggctgctatcatcaagggctggaaaaattctcattacaagagagaataggaggattacaatcaaaatactcaaaatacaaataaaagtatttcatcaagattacaagaaatctagaaaagaagaa

SEQ ID NO: 122018 - DNA, 685 bp, Cannabis sativa
caagcacaaatttatcaattgacaagtcttgaactcttcacttttaataagagatttgctccctagattctatattcctattgtttcatttctttgtctagtttgaagtttagtgaatgaaaattatttctatttgttttttggttgtgcctcttgaggaaagttgttagtttaattttgaatggcttggcttttcggcttggcctttgggggctggaaggcttggttaggcactaaaagaacaagaataagagttgccattattgattctactgcagctgctacaatttatcatatctggttgaattaaaataaatgtatttatgatattttttcttcaactgccttgtatgtccaacaggaaatcaagagaattctttagtataaaatttacaacgtaaatcatagctattatagtatacaaaagaaaagatttgtttgtattttgtttaagggtctctaagtgttgggtgttggggttgatgtttaagctcccttgtttttcggtttgtttggttgtaaatgacttaatttttgcgttccttaaacaaaacaaggctgtttactgtgttgctcacgactctcatttctattcaaattgtatttttaatgagagttttactcccgatatattttatcgggaaatcttataatgcactcccttaagaggatgtaccaatacatc

SEQ ID NO: 122019 - DNA, 1395 bp, Cannabis sativa
ataaatcacttcaaatttcttatattgataactaatcagattgtaaatagttttatttagggcacaaaacccaaacggtggttcgtcttcacagtttgcttctccgccacctgagaccttaaccgtaggtgctactccgacaattctgctgccaacttcgcgttcccctgtacagtctttttcatcgtcgatcactacgattactcttctgtcggggttcgcacctattccctcggtcccctctgtttttaaaacaccgcctcctatggctccaacggttttcccttcttgtccacctagttttaatgtctttgacactcctcgggtaaatcttggttgaccttccattgatgaacgcaatccgtatcaccttggaactggagacaacccaaatttcctcattgttccctttcaattgactggccaagacaatttccagtcctggaagcgcgctgccacgatcaatgtggctgccaagaacaaaactccgtttatcgaaggtactcttcctcgtcctcctattaatcatccataccgatctactttggatcaatgcaatagtacggttagggcttgcatattgcagtctgtttcacgagaaattgcagccagtattatgtttaaagattcggcccttgctatgtggaataaccttcataatcggttcaactaaagtaactgtcctcggatctttcatctcaagacttcattgactcgcatcaagcaaggtgctaactccattaccacctattttactcagctacaatctttatgggacgagcttaatgagtttcaaccctttacgccatgttcttgtggctgtacttgtggtgcaatgcaacaaattcaagatcactattcccgtgatcaaattttgcagtttcttacgggtctctatgactcttatgctggtgctcgtgatcaaatcttgatgtttgagccactccctccgctgtccagggttttttccatgatagttcagcaagaacgtcaacattctcttgctcctctgaacgctatggctgctgccgcttcttccagccgccctcctccatctcaaaacaatagcggtaatccttctcggagcaagaaacctaggcctacttgttctcactgcctcaaacctggacatttggttgagaaaggttactttgtccgtggttttccccctggttatggtgacaaacgcaagcaagactccaccaagtccaaccaaacttcggctactattatcacgggacaagacaccacttctcagctgcaactcagccaacaattgatccaacgtttgagtcagtaactccagcagccatctacttctagtgatgccgctccaagtgcctctaatgtgtttggtaaccctaatttttactctattttttggattgttgatag

SEQ ID NO: 122020 - DNA, 648 bp, Cannabis sativa
accatattcaaaacccattgtcctctatctgataagctcctcaaataaagacaaaaattttctttaatagagtttaattctcaagtcaaagaccaaataatataccatttcgacttctgagtaactttgtgctttgatgtatcgaaaattgtatcttgtattcttgctatacataaacaatgacagatacaatcaatttcttagaacttaaattttactgattatacatattccatatcaagaatttaattagtactacaatattttggttttaaaaatgccaaaaaagaatgaagaccaagtgtgcacaaggattctatatcagaatcttaagaaaaaaaaaaggttccaatcacataaaactcatagatgaagatctcttaatattcatttgtatcattcttggggttgttaaatccccaggaaaaaatatttacaagaaatataggcattgcctgcctaaaaaattgttaacattaaatttggttagtggctgttatcatctattggtgtttaaattcatatgactaggagcttaagcgagaaattagatcgatgaaggaatcttcagagcacggaatcgtaagagctcccattggatgatcgaatccgaacttctcttcagcttgacttagaaagtcttggaat

SEQ ID NO: 122021 - DNA, 1148 bp, Cannabis sativa
atgaaaacaactatacgtggaccagtaaaataataattaatatattttaatcttttatatatatatatatatatatttggcaactactatgagttatgtattgttgtatcttaaaatcttttagcaccttataaatagtttctaaattattcatgacatcataaattaatttttttagtcaaattttattacatgtagtaaataaaataataatataataatttagtcttttgttacattagcatcgtgtatataatttaaaattgaaaacaaaaattatgtattttttaaaaaattattaaattaaaaattaattaataattaataaaattacataaaattaaattaaaaaaataaattatttttttaattaattatacacgtaacattaacatattattgatgagacaattgattaaacagtcatagtcatgttatcattttatttattatgtataataaaatttaataaaataattaatttataatctcgtgaataattcaaaaattatttttaatagattaaaaaatttaaaaaacataataatagataagttataagtgaaagcaagaatcgtaagtatcataaatattttcgttgaaatgcgtaaataatagtaatttgaaatttgaaattgaattagagaagaggtgagtgagcaataaaataataggtaagaggagaagtgtagctttatacataatcctagtttcagtagtaggctgatagacatcagtgtctgtaagggtagtgtcaccttaattaatcactcagaaacaggtttattgggatgccaacaacaacacccactcctccctcctttgacttttcttctttatttattttttccttaagtaaataaatgtacccactttcacaaataataaaaaaaaacatatataatatatgggatttctacacacttgtagtttttcccaggggaattatttaaagaaaatgaagtgtatatagctttagtttgagttatgtgggaattattcttttattttacttaaaactaagtaatataatcactctttgcgtgattaatttaaacttttttagtattataataaaaaataattatttattaatataataaataatttcataaaaatataattcttaaataaaataaaattaaaaa

SEQ ID NO: 122022 - DNA, 2004 bp, Cannabis sativa
ttttagtttattatagaaaaaattccaagaaataaactaataatatgttcatttatcaaaaatttgggaggaaacaaggcctcccacaacatatatttggctctctttttcagtctaattgtgatgaagggcatgtttggtatacagttaatggattatttgttaacattggactatatagctagaatggattgaattatattagtactatattatatttggtgtaataatggactaaataaaatatgaatattttttttctaataaacatataattttataatttctgttaataaaaataatgttaaataattttgaatacgagatatttaattaaaaaacacattattttatgtatataataattgtggaaattaaataatactaaaaaaatatgttatacatcatttattattttaaaattaaaaaggcttatatctttttataatttttttttaaaataatttgtcttttaaaaatttaaataaataatatatattatatttataaaattagtttatatataaaaagaaaagagaaacactatcataacacatgtttttgttgggatagtatgattaataagccattgaataaatttatagaatccattatacatgaacctaaatttgtgccaaacgtattattggacaaatgtatcccatctcatcctttgtcccatgctctaaactgactcttaaaatatataatttttttattttaatttttataacagtatttatcgaatagaaattctttaaaaaaaaaaagaaaccaaaaaagtgactaaattattcgtgtaaataatttttttttgcatgcatatttatatttttgacacattaattaacttaatttatatttaaatattaactacttttgttgacttttaattaaagattaaattttttaataaataaaaaattaattaacttgttaaatatagattagtttaacatattattgacactatttttgaaccgacttgatttatgtaatttaaattaaatgactatttacactctattatgactaccataaatacggtattaaataagcaatattatgaaaataaatagtagaaataataattcaagaccatactctatcttaaagattatacatgtcccacgttggaattataatcgtagctcttctctaacctatataaaatagtgtgttgctatccaagtctccaaagtctcccatcgattatatgacacaaatctgatccccaatccaaagcccaacgataacttcaataactattcttttgttttaatatacaacatcaatacctattcttaaatgaattgaatggacatatttataaataagcattgctatttgatattagtagtatatctagcattacttaaaagtacgtaatgatggaaattttacccatctagatgagtatccatgggtatccacctcgaatgaggcggaaattatctgccttaatagataaaagagtgggaataggatgcaattttatatactggaagcgggtttgcggcggatttgagggtgatactactcactccaaattcgatcaaaaaatataatcttcttttaattattacctatgaaagttgttggctatacttataaattgactattaatttatgtaataactactttttaatagttgtaatgtttatttatattttattttttattttgaattatattacattatttttttcttattattattgtttaaatttttaatgggtacctaataggtccccatagggatttccctaccacaaactcatcggaattaagcggggcgggggcgaggatggaaatcgggggcataaatgaaaagcggaaacggaattgaaaggtgcattatctgtttattatccacttaatttctagctatctacttataggtgacaccataaaattaattaataatatttcttaaaaattatttaattgatttaatttctaagcaccactagtaggggtgggcatccgatccaatccaacct

SEQ ID NO: 122023 - DNA, 2094 bp, Cannabis sativa
ttaaaaatccatgataaaggaacggtatggttgagtattttggaaaacgattattgggatttgtcttcaccgtcaataaatgggtgtaaaagttaatatatttgtaatgaatatatatttactgtattgaattgaaatgtgttgagatctggttttagttttgtaaatctagttccagcggtgagatacggtttaagatttgtaattttttaagggtataggtgactgttttaaacaatcacctatactgctcagtaattgcgacagttttgcactgtcgagaaaaaaaattcccaacattttctaccatcgcctattctacccaattttcttaacagtcgaataggcatcagtcttagagaccaagggaaatactttgcccaactatttaaaatcgttgggaaaatctagttttctagtagtgttgggtgttgagtgctaaacaaccttcagtaaaatggtcataactcccttaatattgatttgattgacgcgattcaaagttgtaaagatctttcaaatcatgtctcatacccatatcattctaaacattttaagtccacatttcgttcccaagacaagtgtagttttttttcatggattaatcaaaaacggttcaacagacgagatttgagctccgaaaattgacgatcaacatcgagagtcattttcaccattagatcatcatcaatagccaagaccaacttaaaaatattttttcatattttttgtaatattttttttttattattttaacaggatctcctttcccatagaaaaggagagcttcactagctcatttttcatattaaaaaaagagcccataaggtgagagtatctctctttagaaatataaagcttttgccttagtcaattttcttgtattctttagaatttgatatatcttttcattttacattagtatttttattgtagaaatctcgctaatctcttaaaaatccatgataaaggaacgatatggttgagtattttagaaaacgattattgggatttgtcttcaccgtcaataaatgggttaaaagttaatatatttgcaatgaatatatatatttactgtattgaattgaaatgtgccgagatctggttttagttgtgtaaatctagttcaagcgatgagatatggtttaagatctgtaatttttttaagggtgtaggtgactgttttaaacaatcactaatactgctcagtaattgcgacaattttgtactgtcgagaaaaaaatttcccaacatttctattgtcgcctattctaccaaattttcttaacagtcgaataggcatcggtctcagagaccaagggaaatactttacccaactatttaaaacagttgggaaaatttagttttctagtagtgttaggcgttgagtgctaaacaacctctaataaaatggtcataactcccttcatattgatttgattgacgcgattcaaagtcttaaagatctttcaaatcatgtctcatacccatatcacaattctgaagatttcaagtctaaaatttattcccaagacaagtgcaattttttccacagattaaccagaaacgattcaacagacgagatttgagcttcgaaaattgacgatcaacatcgagagtcatttttaccattagatcatcatcaatagccaagatcaacctaaaaatattttttcatattttttgtaatattttattatcattttaataagatctccttccctataaaatgagagtttcactaactcatttttcatattaaaaaaggagctcataaggtgagagtatctctctttagaaatataaagcttttgccttagtcaattttcttgtatcctcatgagcaataaaaactcaaagtagacatactccattaccgtcgcgacataagaagtgaactactttaaatcttgtgtgtctctcttatttactttatttaacttctatttcttttcgtcaatctagcgaccaagtgttgatcagttttttgcgtcaataccctcttcaagaataactatttatcaaagaaataatattttatggttaaaaaaaaaaaaatcctcaaaacaaacaaagtaatattttatattataa

SEQ ID NO: 122024 - DNA, 649 bp, Cannabis sativa
  modified_base (612)..(618): a, c, t, g, unknown or other
ggtaacaattgatgcagcggactgaatgattggaattctggaggaactgaaaagaaagttggacagcaaagggatgcctttaaaagattttccggaaacagcattgtaagttattttatggaatgtttcgctaactctaatggagctttcctgaagatttcaaccttgaagaacaacaaagtcaggaaggtcattattctagaagaagagctaaaggatggtctgatctttatgaatgtctccttggtgttcttaaaaggaagccagaaaactttcaagacagattaaaacaacaaaaaaaagtgaagacaggagaaggtaggaagaactcacaatcatgggctaatatcgtcaaaaatttgaggcatcaagtcactaaaccttttggtgggaaggacaatattccaaaagaaagctttcctccaatagtgaggaaacccaacaaactgggatattgggacttttcaccaaaagggaatgggagcttcagaccaagaaacaaatttcctaaaaagagactagagcaggaaaacttccatgagtattctcaagcggaaaagagtgacaaggaatggaatagggcagtgatgatgtaaagaccgcttagtttannnnnnnaattagcagttaattatgtttgattatgaaa

SEQ ID NO: 122025 - DNA, 648 bp, Cannabis sativa
tataattattattttgtgtcacaggaacatttccaaccaatatgatcccacaataatcgaagcattgatgtgtccattttttgggtgtctattctagaattttctaaaattatataatggaaaaaaaaatagaaacaaaaataataactattaaggtctaaatttggatatttttatataagagaaaagaaatctctatctatttaacaatatttttttttcttctaagtatatttataaaagtatcttttaatgtcactttttagattaatctataatttaataattttattttataaatatttattatattagttgagttgataaaatctatatatttatataaaatatggaagcccaaataagtttaagtaacattctattttatttttaaaaatattgtgagagtttcacatatatattgttctaaaaaaaacttcatatgttttgaaccgtatcatattattattgttgtctttttgatttatttttcgtgataatcatatgacataaaaaaataaaaaaatagttatagtatgtattgttcctcatagattttcaatataagaattatcaaaaatataagacaaattaaaaataaataatatttaatttatgaaacagttaagttaagtgatgatttaatat

SEQ ID NO: 122026 - DNA, 1056 bp, Cannabis sativa
taaggtttctcatactttatatgagtttatttataatcgttttagaagttaatatttaggatgttaaagaacatacttgttagtaaagctaagatcctggtaaaatatttccaacagttcatgcagtagagtaacactttgtccataccctctcccaagaaacttaaatccatttaaggattcgccatccaagctcggtaaatggaacgtttggcaacaccattgcaccgttctttggcatcagcctcagcaccattgagcttcacagtggctgcgttaagttcttcttggagtttctggcatgactcggacttgtcctttgtttccttttgggccaccttgagttcagtcttgtgagccctcttcgcctcctcgacctccttgttcagacgagtgttctccttttgagcatcattccattctttggcaatggtctcgagttgcccaatggttttttgaagcacaacttctaatttattgtaatgactgcatttcataatatggattagtaaaggcaattagcattaattattgatttttttaaagttatttgtgaatttatttaattgtgggtcccattatcaaaagtgggcattagagttataatctttcaattccggagtttttattaagctctaggattattatttgaattatatgtgaattatgttatttttataatttttgttcgtcgacaacagaaaatgcgatggatgaatattttaatcacacgagtatgtctagaaacttatttcttagtggaatatatattgaagaaaatagaataccaagtttaagcgggtttatggtttttgaccattttacccctaagtttaagttagcctaagtttaagctatgagggcatcttggtcattttgtcaaggagacttaggtggctattttagaagctggcagctggtttttaattatttattcagcatgtgttttagttattgaaggaaaataaggaatcaaagagaaaaaaaccaaaatgagggaaaattcattctctctctctctctcagatcggaagagcgtcgtgtagggaaagagtg

SEQ ID NO: 122027 - DNA, 2045 bp, Cannabis sativa
ggccgaccaacttcttaattactcgaaccatttacaacttccacattttatgtttgccaagatattatttaactattatgctgctatctgagtagtagacaattagtaattagtaattatttattctaatcttgctgattagttttgatgaagtcttccgtacgtaccatatgtactaatcttgtacattatgaagaacatttcttccattttatgtatatgtaaattcagcaacttggatagctacttcgattggtgttttttaatgatatggatatggttatactaatcaaccggttcaaacaggtgacatcaagttttgtatcttaatatacttaatgttcttttttcttttttcatgctttagctcatcaattatggcaatataataataaaaaaagaaaattagaccttagaacttttacataaatactatatattacttcaatttgcaaattttttaataaattatatgctatatataatgcccacatctactgtgtacattatatttatagtgaattttgtcccgttatgaaatggttccgtggtcattttatagttataatcactgatggattaacaatttttattttgtgggcttatttatcttaaaaaatatttatacttatattataattattattactaaattttaaatttatttaattttgtaaaaacttttctactatattttatattttaatttaatctataattatcaaattaaaaaatttacatttaattttttaaaaagcaatatttttattagtaccccacattaatatgactgagttcgtctctagttacaataattgatgaagatattgagttaatctaattattgaaagctgaagtatatcaaagtacatacattcaacctagctcaattaaagttaattaaacaaaacttatattaaggacaaattaaatttattatgcattttttatcttattgaaagcgataattttaattagttcaataaaatattttaaatatatatcaatattttgttaattttagctatataaatatataaatattaattaatattatttattttaagtcttcttcaaacattaattaatattatctttctaaaaggtgttactacccggactatatgtaatattcataatttagctggtcaaatgtcactcttaaacctttgtaagaaaacaaggtttataaattatccagctttaatttatattacaaaatagatatttagaatttcaataataactcctataattatattaaaaatattagtaattaaattaggatcactcattaaaataaatgaacaataatatcttcataattatgtggtcactaaatagataaatttaaaggatattgactgcaaaactacttatactttatattgtttttcttaaaattaactacctaaatcgattttttagtagcaaaactacccaaactttctttctgttagctatttacctcttccatccaaaaggctatgttaagtgccacgacatgccacagtgtatacgtggaaaatttttagtagtccacgtaatattaattattaaatcctagccatcccaaccacctcctcccatctctttgctctttggtgcagacggaaggccagatacattctcctctgatttaagcatattgtaataactatcactcttttgtaaccatctaaaacactaaaggtcaattctttagaatcttgaatctctacaatggcattctacttacaagctccggttaaacctataaccttccctctttccaaacctttatctaagcgaaaaccccttttcgtttgcaacttatctttaccttcaatgtacccactcaccagcatcaacccctttgttagtttaaaaacaatataattgtcatagctcaatatcaaaagttacattagattggtatgttgaaatgttatcaaataattattattttaatagtggccacaactattttcatgttgttcaacccacgagtttttttcaaacaaaattatattgatatataatatatattttaaaattaatgtagc

SEQ ID NO: 122028 - DNA, 1517 bp, Cannabis sativa
aaaccataaacatgaaaaccatatgttaacataaatcatttctaatctcttattgataacaaatcagattggattgtaatgggttttatttagggcataaaatcccaacagttacctactcaaaccagattatgccttgaacacatgatcgttaatcttaatatatatagcatggcatagcacttacatattaacaattactagggtaataatcctagagcattaaactgctcactttagggtggtaaccctaatttcagtttctaattactcgcaaatataactaagtgccaccgcacataactctacgtgctaactactgtcgtacctaatgtcccgcaaatgtagagattccaaatcctcgagtattcctaagcaagcgtcggtagtcctagtcacacattcccgtgatttcacaaataagtttaattcaaaaattcacttacaataatcacataattagtattacatttacagattaattaacatataaagctcgaaaggagctttccaacgatacgaagaacgtcaaaaagggagtcccaagttaaaagttatggccgaaacaaaatcgagaaaaataggcattcccactaccaaacctagtcgcgacgaccaataatcctgtcgcggagacttggtttagaacacccaaaaatcccatttttaatgcctaaaaatgaccaaacacaaatctaatttcacctaagtcatacacaaataaaaaccatgctaaaccaatgtattttcaggcatcagaaccataaaatataagcccatacataacagcttgttccaaaaatcaatataaattctccatttcacaagcttgaacaaccaacttcaaagcttcaaagaattaatcccagaattcaaggccaaacccacaaattaaccaacatcaacaaccataaaatctcacacaaatagtctagatgcaataacatgtaatcctataagctcaactacacaaaatcatcatattttacttcacaattaacaacatgcatcaaaactcataagaacttgaagaacaccatcaagcattaacaaaaagtatttaaattcaaaaattaaaaagaactaattcaaaataactaccttaaatcctcaaaactcccaaataatcaagatcacaccacaaattcctagcttttcttcaaagttaggtgaaattggaaaagatgaggaagagagagagaaagggttggttgtggggttcaaatccagaaattgtgattttccaattaacaataatctaatgtttcccatttgttgaaaatagaataggtggtcaaacgaccaaactgccccaaggcataaataatgtcataaacaattattaagggagagtttggtacgaggtgttcaaaataatttgattatatggaatattatggaggagaatatgattataggaaaatgtgcaaactgtgtttagttttgtagggtaatatgtaatcatattcctgttaattaaattaaactgtttggttgagtacaggaatcttatatat

SEQ ID NO: 122029 - DNA, 531 bp, Cannabis sativa
aaaaaaaaaaaggaatttaaaaaattgctttgagatctttagaaaaaaaattgctttgagatttttcgtttaaaaaaatactataaatatatagttagaaaaaattttaaaaatatataaaaggacataatcataattatgaaatttgttttaaaaatttgtaacaatatatatatttttttgaatggataacaatataattttgtttgcaattgaagctttaaatttgtaaccatatccattttataaataaaatttagagactatataaaaaattatattacaaatagttatacaattttgatttttataaaattttgtagttttaaaaatttatagtgctatgcttaatttttcataaaaaaaaaaaaaacaaaaaatgtaaagaaaagaacaaaatcattgtaatcttacttttttctcactaattccttttttcttgtataattaatattatttttctttcactataactgtaatacccggaattaagaaatggattagtaaaaccctaactagataattatgtat

SEQ ID NO: 122030 - DNA, 940 bp, Cannabis sativa
tttcaatggatgcgatgtctctcttattacccaacctatgtaactccttcttgcaacgactaattctcaacttaaaattacccgtcacttccttaccccaattacttaacttttctgcacaactagctagtttatgagaaaaatcattaccactgcccctttcccagcaatctctcacaatctcaaaacacaaaagttccttaagccaagccttttcaaatttgaatttgcgatttgatgggaaggtacgaatcggttccggttccagaaaaataggacaatgatcggaagatgaaatttctaagtttaacagagaagcaccttgaaataagttttcccattgagagttgatcagcacccgatccaacctaacctcaatccagtttctcgaccccctgcctttctcccatgtaaatggatgacccaatagctccaagtcagtaagattacagtcgtttaaagcttgttgaaaaccattgataaggctttgcagataaggtcttcctcctcatttgtcttcttgtctaacaatgttgttcagatcacctatgacacaccaaggaagggtaggatcagaagccagagtacgaagcaagtcccatgaattgtgtctattcccccgaattggttcaccataaaaaccagttaatttccacatccctctctcagacgattcgaccaaaaaatcaatgtgactattagagaaacccaagattcttccatcatcctgatgtttccacaataaagccagtccacccgaattaccttgggcctcaactcaaaacaccccttcaaacttcaacatgcggcccacactttatattctttttttattacattttgtttcacagagaaaaatgaaattgggattcttttgagaaacaatctctttaaggaattgaaaagtccgttggttcccaagcccacggcaattccagct

SEQ ID NO: 122031 - DNA, 824 bp, Cannabis sativa
gtgtataaaatctaaaacattaagcatttaatacctaaatatatatttaggtattaaatctcacaatctcaatcttaatagtttaaatatataattttaataaatctaaacagtacatagaccatatttaatacatattaaatctctgggcagatggagtatacggtgattactgttttctctattgtgagcgggtaattcttcctgtcaatagcagggccccttgtttcaatgagtttgatattgttgttaatgatattaattataattctttcagtagcatatccttgtcattttgtaatagatcaaagaattatgttgctcattttttagcaaaacgagtgttagatttagatgaggctcgggtatggtggacggacttgtccactgatttagctgtttaaatttacctatattttgtattttgatcttttggcttgataccttttaatggaaaaaaaaaataataaataacttatataattactaaccaataaattgattcttcctttgttaaaataaatgatacatctttaattatttctttgttccctctttttatggaaaggacgagcgtcttggccggtgctgatttcctgctctgttttttaaattataagtttgactaatcttgagtttggagaatgaaatcaatctctttatttcttttttaaaaagaataatagtcatagaagatgcaatggcaatctacattatcttatctacattagtaattgggtcaaaattaacgtaacatccacatttaaggctttgattttgctgtcctactagtttattatactttatccatacaaaatgaataa

SEQ ID NO: 122032 - DNA, 1270 bp, Cannabis sativa
ggagaaagccttccatgaattgaatcttcctggtatcaacttgaagtaccattactgggcagcttctaaaagtgtggcaggaaaaactctgcaaaatacattacctcgtcgattctaggtccatttgcatttcaaaatatttaaaatgtgataagggatcttccttcctagtatacatcttccaggtcggcatcttgaacttgtggggcaactctagaacatggatctctggagaaaaaggagatccacatgctcagtccaactcgaggtcattgttcttctgaccggccagaccttggaacatgctttttagttcatccaagtgtgcttgcacagatggattaacttgttcagcctcatgattgacaagggtcacgtcaagatctctttgagctggattttgggcacgagccccgggctgagtggttggtggaacacattgtttgtctaagcctctccttcattttagatcatctctgagatcatgagctattcccagtctattttaggtttatgtgtgtgaaagatcaatgggggttctgtgcttcttcaaccatccttcccggaagagaaggtctacttgaagtctattacacacccagtgatgtttcaaccttttttctttcaaagcaaagtcattgcttgaaatttagtgcaactttatcatttcctcgtagaagccaaagtgtgccacataaaattcatcatggctctcgcatgcatgtggtttctcgtgcgtgaaagagcactgggggttcgatacatcttcattcgtccttcctagaagagaagtactgcttggagtatgtcacacgccaagtgatgtttcaccctttagtcttttgaagggaagtcattgcttgaatttcagtgcaactttagccttccgtcgcggatgcaaaggtctatcacataaattcaaaatggctctcgcatgcacattatttcttgtgtgtgaaagataactgaggattcgatacgtcttcaatcctccttcatggaagagaaggactgcttggattctgtcacacgcacattgatgttgcaccatctggtctattaaagtgaagtcatcactttgattttaatgcaacctcagtcttccctccaggagccaaagtctaccacaaaattcaacatggctcttgtgtgcacaaagtttatcgtgcatgaaaggtccctggtggttcgatatatcttcaaccctccttcccgaaagagatggactgcttgaagtctgtcacacgaccagtgatgtttcaccctttgg

SEQ ID NO: 122033 - DNA, 831 bp, Cannabis sativa
tcagatttacacttaatgaagaagcccgtgattcataaaagttcaaaacatattgaacataaaactttatttcattcgagatgttattggcagcaaagaagtgaacactaaagacaagtcaacaaatatgtttgttgaatattggtgatttttgttaattttctttggggcttagcacgaataatgtattaaaaaggtggatttgtaaaagtaaatttcttcaaatattagtgctattattttcaaagaatcattgttgttataatatttaaagagcctctaggcccaacaaagcgaagatgttaacatgtttcgatgagcattgtcgtcctctgcctccaccgtcttgcacctttgacctgggctgtgtatcctgtgcgagaagagggagagacaacgcatagtttcttgctcttttcttctctttctttctgtttactgctctttgtttctttgtgacaatgctttcattcaggatgagtagaaatctattatcaccatttactagatctgcgatgagtagatcggaatctcaggtttctgaggttggatgcttcaatccggatgtatgcgacgtttagaatccggcggccataatacaactatgtgttggtcacctatgcctatcattcaactcctccacgggttttaccaagatccaggttcttcaatttcaaacttaaagcttttatcccattcattattaatagggttgctttgatttgaagaatgtaatttcttttttcaatttctttttgcaattctttgatattgttaagtttctcttctgtatccatttttttgagtgtttttgcaatcgtttttaatttt

SEQ ID NO: 122034 - DNA, 1179 bp, Cannabis sativa
aaacataagaatagaaataagaataatatatttttctcgggcatgcttgatagtatgctatgtctaactcgacgatgcttaaaaatcatgttttttatgaaaaaaaaattacattttcgctcaatagagttcgaaaatgctcaaatgcaattcttacaagtgctatattttgcttaggtatccatttgaggtgattttttttttttgagttggctctcgttctttctttggcttaagcgctcataattttatttttggacaccttctcaaaagatctcatactaatggaataggtaaaacacttatatttaaggcaactcttatctattcttctaatgtgaaatttgagttgatactccaacataaacatactctattttttgtcgtagttttgaactatacatttcttaaatgtatgtgtgcacatatcaaacgtgtagattctcaaaaaaatactcacctaaattacacaattttatagaaattatgtaactcattcacaaatttatcaaattcaaaaaaaaaaaaaaagatttgtgtgtgttctgttgtgaaacaacaatcctcgatcaagaacaaatataagaaactaataaagttatcaaaaaaatcaatgactagagaaatcaatagttgaaacagattaagaaaaataacatctgaatagtgtagattaatctatgaaataatgagttttataatgaatactattgaagcaaattaaaaactttattgatgaactttgataaccaatacagagataattcaagaactcgagcttccttgactagtgtaattagtttacagatcaatctcacatgagggatgccatgtcaagaattggtaatctctttaacatcctccaccgtcaatctgtttcttgctcaaagtctcttttctctcaattctctctattacaaataattgaaagtcttaacttcaaattgtaaagtgttgggctatttataagaggttggttaggacagagactaacagagttagttagtttagttgctgatatggtaaagtttatatttgatagtgccttaattataacatgttctatctcacatcattcatgtattagtgatttggggaatacataatacttaacaaaaatattactatcaatctcttattacaactttcgtgtttgaaaatatatattagaatattttt

SEQ ID NO: 122035 - DNA, 1701 bp, Cannabis sativa
gccgcgacccaagacccgaccttgttctcggtcccagactcggacacaaacacaaacatggactcagacttgggacccgaatcgaaacaagaccgtgacccaagattaggatctgaatcgttacccaaaacccaggactcgaggcttggacctaacccgtagtcggtgtttggatttgggaatcgtactaggacccgaacatagttccagaccaagactcggacctagggctagaaattggaaccgaaaccagaaccgagaacatggaacgggactgagacctggaactggacacggacccggaccgagacttggacctcgacccgaacttgaacctagacttaggacccacaacctagaacctgagacccattactcaagacccaaacaagaacctgtacaagtactagaacctggacccaaacccaaacccggacccaacttagacacaacacctgaacccgaacgatgatcgggactaggacccaaacacgttttgggactgagacccaaactcagactaggtctaggacctggaccaagaccaagctgagacttggggccagcattgagacccaaatcaagacgaggccaaaacttaggaccaagatgcagacccgaacacggatcgagacccacactcagaccgagacctaggaccgtgacctgaatcggggaactagacctagactcgaaccaaagaccagggacccaagactcaaacccggacctgagacccaaaccaagacctagaacttgaacaagtaccggaccaggatctagatctagacctaggactcggggcttggacccaatccgtagtcagtttaaatatgatactcagacccagacccgtacccagacccaaactaggtgctagacccggaccaggatccatactcaaacccagaccaagactcgaaccgagacccaaacccaaacccgaatctaaactcgaacctggacataggacctgaactcatacccaaacccagtcccaggacccgtacctagattgaggatcaacaccttgagccaaacaaaaacttgggacttagaacaagggtcggttcttaggaaccgaacgggtctaggttcgagtttggtctgagtcttggtccaagtcctggtctatgttcgggtcctaaatctatacacctactacgggttaggtccaagcctcaggtcctgtgtcccaactccaaatctacatctagatcctggtctggggtcccaattaagttttcgttcaggtcgtgggtcttgtttgggttctaggtcaaagtctagggtcaagtctcaatttctaagtccacgtttgggtccccgatcttggtccaggtcctgggtcccaatttgggtgtgggtttgggttctagtccaggtcccagtctaggtctgggtttgagtctatgtctaggtttgaatttgggtttgggtacaattttgggttcgggtcaggtccaaatctaggtctaggttattgtctgggtcttggttcaggttagggtttaggtttggatccaggtctgggttcgggttcgggttcaagttcgtgtcccactctaggtctgcgtcgcagactagatctaggtgttagactaagtctgggtcctagtccaagtctgagtctcggttaaggtttgggtcccagtttggattccgttttgagtctacgtctaggttttggttagggtcctc

SEQ ID NO: 122036 - DNA, 786 bp, Cannabis sativa
tttcaaatttttatattaatattttcatgttttgcatgccataaatcagtggtgttataaatagcagaatgacaagtgaaaacatgagtcagggtataaaaattatcatgtgaaatagcagaatgaaaaccttctaaaatacattgactaaccctcgaaattatccgaaaactaaatcaaaaaatacctaaaccaaacacagtaaatgaagatgcattcgaaagcaaaaataagattacaaactctggaaaaaggaatagcaaaaataaaaaagtaaacaacttactattttggcaaaagtttctgggtattgaagaacttgtcgagtgagaatttgatgactggagtaatgagttctaagattccctgagattgaagacgaagtctgatgaaacacgcagaaaataagtcaaggataatgagggtatgcaaggtgatggaaaaacggagatggttttttcaaaatagtttgaaggtttgaaaggcagaaatggaaaataaatgtcttctcatgagtttcatactttaagagtggtcaccattagatgagaagagataagatctaacgggtaggaacataaaagaattagaaaagatggacatttaatgctaatgatgtacctcgaaatcatgaaccgccaaagcacaaagcatgtaatttttcaaattgggattaagaaaaaaatacccttgtaatcatttaaaaagctctttttaattaaaaaagaacttttgaagggcaattgttatacccgaagtttagctacacttcagaaagtgacacgt

SEQ ID NO: 122037 - DNA, 683 bp, Cannabis sativa
tcatccgtagtgaagtagattctgcgaatacatgtactgcgatcagatgggtggtaaattttgtattgttaatgttattttgttattattgtattgttatatttgtttattaattattttttcatgtttaaaatttttgaaaatgtccgattacaaccgttatgctgtccaaatttcgctaaataagaacaaattttaataaaattcataaaattcattaaaatatatatatatatgtagtaattaatttaactaattatttactacacatattcaaacaaataatttaataaaattttgttttttaagaaatttctaaatggatagaaattagatgagtgcgaataaattatcaacgaagtatagtgaatgtgttgaccatttcttggacttttgtcagaagtatgccaaaaattctaaattggttctttgtccttattttaaatgtagtagcatggaacgtatgaacattactagaataatggaacatttatttagaaacagaatagacaagagttaaagtaagcactcaagtatatcaatgtaattcttaattgtaataaaaaataaaagatgtcacactaatcacaatatatatatatactagtagtagagggcacgtgcgttgcacgtgcttataaataattagtgaaaaaagtgcacaaaatataagtgcaatatta

SEQ ID NO: 122038 - DNA, 1334 bp, Cannabis sativa
aaaaaaaacatttttactttttaagatatttttataaaaaaaaaattgaatctaccctaaaataaatcccaatttcaccaaatctcattttcttctcctcattttcccgagaaaacccaaacagccaacaacctccactccgatgaatttaattaatcgaaaaaggagaaattcaaacgattgccttggctttaatgtttcgagtttagccactccgatgtccgctatctcaaggtgaaggagtcggactcgtctagtcgtcaccgtcattcagtttggtgtcttccccttctggtactctctctctctctatatatatatatatatagatatgtgtgtgtgtgtgtgtgtgttgggaaattgaataaaactaagcaaaatgttagagtttttagctgactaagtatttttcacatgattatttggtgctttcgacatcattatcacaataaacccagtgagcttgctcaaaaatgctgtacactggctaactcagtgtccaaggccggcgcaactcaaccccattttgatcctcttccctggctcactacccaaatgcttgggccactctttcttgctcccatttggtagatatagataagccccgccaaatttctcaccattgttctgtttctctaaagcccaggtgacattttttattcccatctatacttttgatgccattctaagaattatgtttgattaattattgtttcttgcttatttttaacactgggggtttatggttgctgtaacttttattgttttttttatgcatttgggataattagttgggtcgtagctttatggagttttaggggtttaatcttcgtgtttggaaaattttttggatcgcagttcggtgcttagttgggtagtgcactgtatcagatgcaatatatgcaccatcaatgaaaaccaatgcttggatcaaagggctgatttttcacaagtttctaaagccatttataatagtttatatgtgaatatatttgatgaggactctaaattagtcccttagcaattaggctctatgagaagttctgttactgttagttcacattctgatttgatatttaaaatttctaaaccatggattaagtgaaagcttgagtttttttcactctcttgatgttttttggttctgctttgttaaaataaataaaatactaaagagttccattcaaaaaaatactaaagagtgaaaacaaatattttagacttagtttgcccatatagtgtagtgtataactattacaaattctcatatttttctgtttacaagtgagaatttatcaaactgtgttaactgagtttcatggtttcatgggatt

SEQ ID NO: 122039 - DNA, 2294 bp, Cannabis sativa
  modified_base (69)..(70): a, c, t, g, unknown or other
caagtaatgaaattaaatttgtttatttattgataattgaatagaaaagattacattgaaatagagttnnatttagggcacaaagcccaacacgatcccccctttgtatggaaataaaaggatatttataagctaagggagggtatagacatgcccacctgcctagggtttctgtaaaaagccaactaatggggtaaaatacatgcaaaaatagagctgactactgggccccttagaaaaaattgtgctcgtgcattgcaagatatagacaatagggaatcattgtacgtagtggacacgtgtcaccaaaaggtttaacctttaaaagtatatgtctggaataattgtctgacaaaaaggtgtgtgaggtgcgcgcactcccatgttctggcacaggggacaagatctaattttgtgtcagaaagagcataaccgtctctggctgatctgggttgcttccaaggtagatttttgcgatactctagggcggttagcatctgcgataagcccttcaagtacccatctaagtattgcttgggcaggctttgagctcaaaccactctgggtcctagagtggaaatatgtctcccgtgtctaggaagctaagataaggcgaggtagacttccgcttatctctcagtcttgacttgttcccagtttgatgaagcttcttcgtgactgagtttcaatgagatatttgaattagtgagattatgaaattctctcttcctttttgtaccacgtgtcacctgttcaggaacacggataataattttgtagttgtttttaagtttttttttagtttatttgtgtgttgtgtttaagttttatagtttgtatgaggatacatatacttaaagtgattatcatttccgttaaagttaacaatagaaagattcttttctgagcacactttttctcatattttttaacactctttttctctcttacaaaaaaagcactattcctatatctttctctctcttacatgattagtaaaagtagtattctttcagatgttttgtagtttagtcaaaattgatttataaatgatttgcatatttcaacgaggttgatatcttgttatttttctgttgatttgtagttgtctttttgttattttataattatttttatgtgttttttattgtacaattattgtttagtgtatgttcattttttatggtgtatattcttagtttattctggacaattttttcgttgtatatatgtgcatttgttttgttatttttaagtggttttcagaatattttttttttgttaaacagttatttttaattctttttttattcatgtatttttttagtgtatatatttagtttattcttgacaattgtttttcttcttgtatgtgtattgatttgtagatgtagatatatatattaagtttatttttttgacacatttttttaaaatagtgataaattttttcatttttttaattgacacaatgtgcagtaatagatattgataaattaattatataccacccattatattatatatctcattttgaaattataagattttattatttctattattaatgtaactatttatttaatttctaaaaaataaatggtctttttaactgtcactaactcaaaaaggaatagagaaaaaaaaaaattgaaagtatgaagttgtatcaacaaattttatgaaaaaaaaaaataatatagtagtacaaaaagataaataaaattgccaaactaagtaaaaaaaatcgtaatacaaaaacatgttgaggagttgatattgtattgcatattgcaattactttgtattatcgttttgttgttttatagttgttttcatgtttttttattaaattgttctagagttgttttttagctatcttagttgtttttgagttgttttttttttattctaaacacagtatttttgtaattttaaaactttaagacagtatttttaaaaacttgatatagtaaaaatgtaaaaataaaataaaaatatgagtaaaaatataaaaataacaaaaaaaaaatatttttgtccgactccctaaatcttttgaaaagtggagagattatatttttgaatttggaagcacgtctccctccaactctcctctccctctcttcctcctaccgaaaaatgaattgcacctccttcttctactccctctacacctttctcatccctaacaaacaatgttaggtgacgtttggttggaggtaatgaaatggaatagaatggaaataattttcattccattccgttggttggttgcatttaaaactattgga

SEQ ID NO: 122040 - DNA, 1093 bp, Cannabis sativa
ttttaaaaatatatattcaattatcataatgtaaaataatataagtttaaaattttaatatatacaatacaaatatattataaaatataataaatcaaatatataaaatataatttaaaataaaatttaatattactttctaaatacaatttttttttattcttttgaatttgttatttattattttatttattttgttaaagacataaaacaataataatattttattttgttgttatttatgtaattttttctttaataaatgttaaataatttaatactgaatagttactaatctaaattaactattgaatttgagtcattatgtatattgaattaaatctaaaatataaaatcaaataaaatagtacgaattagattgtatgaatgaaaacatgaataattttagaggtgtgtaagggacataggtaaaagttaagcagtgagtgttatattagggaaacttacaaaaatactgaaatttgatttaatttttacaaaaatggtcacacgaaaaagttttcaaaaataccgtgtttttataaaacacaagtagaacacaaaacaaaacaactcaaaacaacagtagaacaactaaaaaacactaatgaaaacttaacacagtatactacagtatgaaacatataaaaaaaacacagtaaaaaagtaaaaaataccgtttgacagtatttttgtaaaaaaatagcgaaagttagtataccatataaattgtcaattccacttcacgtgttgacaattattttttcttaatttttccttatcaatttggttagtaaatatcacttttccacacaatttgggattaagtaaacaaataaatgagggtgctctatgccaaaacaaaaacacgaactcaagcttaccttttgcactcataaaatgctatgataattttgaaacgaaaaatagcattttgttttcaattaaagtccggaggcatcataatttttctttttattttatgatacattagtatcacacagtgcaattaatcattaatattattattttgaaagggaaattttatttttaatgtttaaaaaaataccctctaataaaatttagactccta

SEQ ID NO: 122041 - DNA, 2154 bp, Cannabis sativa
aattagggcacaaaacccaacagacgacagtcatgagagtttgcaatgacgcaaagtgtttgtgtttcctgctgacattaggaggatccgctgaggagttgtttaaaaagttagaacctggatccatggactgttggaacaagttgtcagttagctttacaagatagtttgtggctgccaaaaagataaaccttgaagttagtgctttgaccaacatcaagcaactactagttgaaactctaaaaaatttcataaagagatttaaggaaaaatcttctaatactaaaaaggtggatgatggacagcaatttgcattactacaagttggaatttgaacatgaacccctttttagaatgagctccagcaacaaggaaccactagcctttaggacttccaaaagagggccaaaaaatacatcaatttagaggaagcacaaataactgcttttggaggatattatcctactggtggtccagaatatgctcccaaagtgcagtttcttagaattacccttccagttgtgtcataagcaagcagatcgcctaatgtgtaattttcaacaataccaggatacacctacaaccttgcttttaccctgacttaatccaattttagagcactaggggtaacttagctcccaaagtaggtttgcaatatccctctcaatctgcgcctcccgcagcaagtgtagcagatgttcctcagagctcctagagtaagagatcttcaaaaagaagtacgcaaatagagaacaagaggcaaaagaaaggttaacctcacagtatactcagtataccgatttagtggacacccaagaatgtgtgtacttggccatgaggcaaaacccactattgaccttaaaaaattggccaactgacaacggagtcgaattgatattgatgcttgacacgtgttacacaattagaaatagaaattaaaagaagacaatgatttttatagaggtttggtcccctgagtaagcgggtaatgacctactccctttttttgacctactccccttttagttatattaattttgagagataatactattcagatcactatatgtgggatctaatatagctctctttagattaaagtgtatgaatcagtaggcaggtctctactgaaagagagataggaccttggaggcgtgtgagagagagacagagaggtagagagccctttgggcgtgtagagagagagagaagaggattcagacttagagctttatggcttaaaataagacttaatgacttagaatttttagggttaagttaaggctctttatataggagagcttaaaccctaattaacaaataaaataagtagatatttacacattattttaataaatacaaatgactaaattacccctttaaagtagatattttcgtagcatcttagtggcttgttaaggcccaactcgtagcttggcttgctgtccacggatgaaagttgcggatcaacgtcctgcaagaaaaaaagttagccggccatacacctgcaggatgcaggctggccggccatacaagttctgtaggttaaggtctggctgaccacgttcctactaggatctagcaggtcccattcttgcaagggtttggcagatcatgttcttgctagctttgttaagaagtggctaggtctttgcatgtgttggccaaccttggtgatggtcagcctctatagataaagcccaaccctttagaggtggaggccagcctttagatgtggaagctagcctttggagatggaggccagcttttgtacaccttttccttgtagaggtcaggctcccttggtcaaacagaagttccattggtctgaaagtcaccttttggccggccaactaatgctcaaaccctggccggtaggggtgagcaaaaaatccaaaaaactgaccaaaccgaatacaccgaccgtccgaacaccgaaaaaactgacaacaaaaaaaccgaaaaccaaaaaaattgccttcggttaaaactgctataacatggtcggttttagtgtcaatggaaaaccgaccgattaaaccgaaaaccgactgaacttgtatattatatataatatattatttttgtacatatttaatatacaattttattaaactagttttacttatatcttttttatttaaagtctcaatt

SEQ ID NO: 122042 - DNA, 671 bp, Cannabis sativa
aaataacacttaattataattatatagtgacttccgacatatcctaattttttaattttataaattttattatttattcacatatacagctaaacacaatttataaatttatcaatatttaccttccccacttaatatttatattaatcaaattattttcaactttcatatcaaatactactaaatatatttggtaatagatttgaattttttttatttaataaaatatacaaaaatctttgaccaattattatttcttttgtttttttaattttttttaccataattattaactagtaatttgcactataagtatttactttaattttcaattataaataaatacttaagtttaattttttatggtaagaatactttagttataattttaaaatttttgtaagtacatgattattaaatattaataaattacatgtgacaattcttgattggtctaaattattaattttttaattatttataaaaaaaattaatttaaatattccaatagaaaaataacaagtaaataataaagtataggtgtatgttacctgttgaatttaccatccttaattatctttttttattagtgaatcccgtgactaaggcacggattacatttacgtccccgtaccgtaaaaacaattaaaaaaatcacataataataataa

SEQ ID NO: 122043 - DNA, 2886 bp, Cannabis sativa
ctcttccgatcttgagttttatttagggcataaaacccaacaaccaagacccacctttaacatgttttttggctcagacccaacattactttctttttccatcatttgtttgtccatattgccagtagccacgtgaccactcaaacttgccatatccatccttctcttcttattttccagcataatagtcatatccttctcactaaggttgactatatcttccactatattactatcaatattctccccaggcttccctgatcctctctccttcgcattactatcacagcatttatctctatggcatgatatcatggaatcaatttccatgattttcgtagcagtatcagctgaattttgagcttctgaccgacgaacagaacctccaattgccgacgtagaatcttcgtttcccgtcttcaaccattgtgctccgatcagataattcttccttctcatctgtgccttcattcctaatccatatggcttaccgagttgatcaaaatgtttgtcgaaacgtttgggacaaaagtgctcagagtgaccaatgatcccacaaatgaaacaaaatgtaggcaagtgttcatatttgaaattagcccaaatccattccccattttctttgcatagcttcatacgacgcttcaatggcttctcaatatcaatagtagctcgaacccgcaaataatcacgccaaattccattgaagtttttcggatcagatttcacataggctcccacatatcctcctgcactacgcacaactttctccatcataaatctggttctaagatcatgtatttgaacccacatgtctattttgtgtagatgaaccgttctcagattctcccccctcttcagcctatgaaagatcaaaggagccttattgaaagtccaaggactactatctataacactttgaatatcaagttcatgataaaattggaaaaggtatagattagtctctaattctttgatatacacttccccggctgccacaatgaagccattaaatgtctcatagcatcaaagtctatagatcttcccgtcaaaaacttaccaataagacaccatctatcatcaaaaataatttcatcaccttcagttttcccttcaatcagcactccttcctcctcatcttcaatatttatttgatcgtattgatcggctagtatactagcattttgactactggacgccatattacaatcacaagcaaaaccaaaaaaacaaattcaaaaccaccagaacagagctcttccgccggacttacaaagacatgtcagaggacaagactttcgtacatgcatgatttttactttcttggaaggatcatgactcgtctttggatttagttcttaatataaattaataattagtcaatgtaattagcatccaccttagctaagctaaccaaacattataattaattacccttaagattcctattctattacattactattatcattaccattacatttatattataccaaatcaaatatcaccttttttttatcacttattgctatgaggtgaaaatagtgttgggtacaagaattggctaagtttacctaattccataaacacttggaatcttttaaataaatacttcattttttttattacttttgtcttttttttagtcttacatttttagaaaattaaattttaaaaatattttcttaaggtttttttttttttgaaaaaatatttttgtaagttttaaaattacaaaaatattatatttcaataatgattataataataatacaactaaaaaaacaattatagtgtagcttagattaaaaaaaaaaaaaaaaaactaaacatctacaaagaagaaaaaaaacaagaagacatcaactccattgtaatatgagaatcaaaatattaactcttgagcttgtatttttactatgattttttactaagtgtttacaatatgattctctttttgtattattatattatgtttgttataattttatacttttcaacttttttttttcttcttatagggttaatatggctggaataataatatatttttttataaataaaataaattgctacattaatgattgaaatgataatatcttgtaatttcaaagtgagatactataatatcatgagttatagataattaacacagcgaaaaaatcaactagattacaatataatttaatgtatcaatatgtactagtgcacattatgttaattaaaaaaaacgaaaaaacttatcattgcatttaaaaaatgtggcaaaaattttattaaatatatttatctacgtctagaaagcaacaaacatacaacaacaaaaaattgtcaataataatctaaacattcatcataaaaaatgcgcataaataaaaaaaaatacatgtagaggagatagaaaattagggtcatagaaatttgtttctttttatcttttttagaaggagaaaataaaataaaaaataaaaatgcacaattataatttaatgattttatataaattatttttaatagaaagaattttaattaatttgtaagggttagaataaaattaattaagattatttttttaaaaaaaaatgtaattaattaaagaaaaatagtatggaatagtttgagtgcaattagtaagaaaatataagtaagagaaaaagaggggaaaaagtgcttctaatttttttttttcaaaaaataaaaaataaaacaaaatcttgtaagagtaagaaagatagataaaaatgtttttctaaaaaaaatgtgagagatacaatgtatgagagacttatcgaaaaaaaataaaaaaaatacagtgtatgagagagagagagagagtgataaagagtaggcctgaacataaaaaccgctaaaccgtgggaaccgcct

SEQ ID NO: 122044 - DNA, 1688 bp, Cannabis sativa
tggtagtaaatctagatcctgataaaatatttccaacacaatcctataaggccagaaccttcataactattctaattcgcaaaatccctataagaaaccaattttttaaacttaaaacggaattaaaccttaccttaagctttcctgctccaagaattttctatcctgctactaccggagcttagatctctaggtttcaggttgaaattcgaaggaaattgatagggggagataagggtttttctcagaggacgaggattttttttcattacgtatgttttccgtttatgacttataacttatatatatactgttaacgttaatattaataatataataatgttattaataataataacagtaagtataataatattaatataataatatatttataataacttttaattaatggttatcctatcgtttcatagccacttagaaatttttacttctagggcactaaactaaattctgcatactcttaattaccccaatacttacattatctatttatcacaatattcccattaattctatcaattaaacttgttatgacatttttggtccccgatccagtctctaacgtcgtcaaacttaaaaatatttttattccaaatatagctcatatcgcattcacacatgctatataaatctttgaaatttataaattatgtttatttactcacttatatagatttaaaatttatgttgaactagattagtaggatcataatcccacttattacctgattaacccaaaatataaatataaaccctaattatttaccattacgcttatcgggatatcacatgactagtgggcaatgtgttagggacaccgtcctagacaatgtaaatccatgaactaaggaggaactgtcttcacctttggttgagctcccagacaaattagtcataaaattcaccaccgattcgctccaaatagcagtgatgctagaccttaagttcaaggaatccgctgctgacctcaagatcacttaaggaactactcgaagaattagttggatggtgatcttcagagaaaagactaagtaaatcttttcctattcgattgtcacctccccaatagttactcaggatcatctgcatacaaaggacaaagggaggtgagcaacaagacaaagtgacaagatttaggcaaaatattggtcaactatacctaagggtactagccaggcagttccattatataaacttgggaatcagtaaggtagaggttccaagtgtaagaacttggacaaacgttgaggtttaagttaattacttgactacaatagaatcaccctaaaaaagtgtcatatagagttcctaagggaaccaagtattggatcaggattgaacaggctcaaaaggccataacaaagttcttactagagtcagaagaggacaaaaaactctccactaccttacactatatttggtaggagggagaagtggagggatggagaggagaggagggagagaagtgggtggagagataacaaatcccttcgtttggcaatagggattgaaggagagaaaggagaggtgagaggatagcaaatccactgaaatctctaatttgcaatccctctaataatggaaggattgaaactctcattcttcaattattgtaaattacataaataccctcaacaaatattattaaaaaataattataagga

SEQ ID NO: 122045 - DNA, 794 bp, Cannabis sativa
ttaggaaaattggtaaagtggtcatatatgaccaattttaataaatttgcatttaggagaaaaattatagtaatgtaagtatattaattcaaatatcccgttttttattagtagtaaatgttaggctgattggttcgtgatttaaaatttataaaatttaaaattgtgattttgacatgaaaattttaattttgtgactgaaaatatattattgaaacggggttcagtatttataaattgtttttgaattttcaaataaaaatctacaaatatatccatattaaaatatgtgtttgtaagtttattttgtttttatattatttaaataatatgtatttattataattttcactctactaagattttatatattttcttgttttaatatttttatgttaatatttgaaataaacccatataaactatattttattttatatgtgtatttttttagaatgtgagaatgaaggaaaaaatattaatatatatatatatattatgcaaattaaaaataataaaattgattgtgttaataacaaataaaactctcctagtgtaaattataatcaaattacatttttttatagaagagaaaagataaaaacaaaaaaacaaatgcaatgataataataacaatcatattagaaaaatattactagatatacacttaatttatacacttaaacggcgtttggaatgaagtgttaaaaataatttgattatagagaatattatgaaggacaatatgattatagagaaatgtgtaaaatgtgtttggctatgaaaggtaatat

SEQ ID NO: 122046 - DNA, 2147 bp, Cannabis sativa
  modified_base (2118)..(2121): a, c, t, g, unknown or other
atattacatatttagaatatacaaattgtgggattgggacagcttatcatatctctgtgatacgatcccagatttatagggattgatcttatgctttacgatgccaattctagaattgctaagtgttgatgcactgctcggattatccactactcggctgggaaaacatcgtctgtacaggtgcatcctgtgccctgcttggagcatctctctcgggaagatatggggaatcaggcccacgtcacagtataaaaaatgggataacatttgcccccaagtctgtacgggacttccaaagttgcgtgtagacttcactcgagccgactttatatttgaatgggtgacacgtgttgagtgagtctgttggtgattcgatgtgattctgactaggagtctcttcagtttttggccaattaatgctctgattaattcatacctcgagacacgcctttctttttcacgcttttgacggttacccttctttggcacttgattgcttttaatttcccaatatttgctttttggggggaaatcgaagcgtttgaggttttgaattgattaccccctttcacaaattggcttataaatggggttgaaaattctcataaattatttttaccacttttctcacgaagcaacttcagagcaaaaagatttttctctctcaagtctgtcgtggggattctagcagaaagatttgaatagcttcatccgaacaacaccaaagcttcaaacagtgagtaagtttctcatctttctctcctttaattttgtatcttcaatcttctgggtttccattatagaaaatacaattgttcttgacttgttgtaggagatatgtagaaaatctaggctcgatacttcgtaatgttttactgtagtagatcgtatgacttcgttgcttatgacattttggctttaacctcacaatgttcaattttcaccttgcccatttaaagctttgtgaaaattaaccattgattcaaaaatttcaaacttttgggttacgaacgtaacctttacacatttttcatcttcttaatctgtcgagtagacctggtcggtatatttgcctatttttattcgatatcccggccaaatactcatctcgtgtattgtcttttgtaaatgaaccctggtgagttttggggaggcaaacaccgtatcaaccatgatttgcttcaacttttgtattaggaccaatctcgtctttgcgccagtccgtcctcttcgagtgaaggactttctaacttaagtttcaaagattgggaagtgagtagtgaacgttcttctactccaacccgaggtgcaacatcacttttactccgagcagattgcaggagaaggctacggtcaatttgtttgggagcttaggaagggttggagacattatcttctgtccaactagacttatatcgtctggcctagtgttgctgacactcttcctgtaggccgtccaagctctggtgccttcggtattttgattttcgttgttgccgtgactgttgcgtggcatacacaccaatacccgtccaggagaaggatgatggcccacacaaaatagacgatgcggagagttaatgcatctgaccctcacgtggctcagcatgccacgctgccaagtattgaacaagatctgcccgccatggaggaggaagattacgagcgggacgttgaggtccaagagatagaggaccaggacggcgtccgtcttgatagccattctaaggctgaggaggagggagtggctcgacctctacgttttggaggatataatgagtccggggagccagtgtctgagttgggagacgtcttggtcgagggggaagactatgtcactcaagagtttaccgaggcggtcccccataagaggcagagtgccctaggggctagattggtgtgtccttcgtccatcgtaactgagggccacttaaaaaatttggagaaggctgggtatcttggtggacttgagtgcttcctttcgtccccaaatcactgggcaacaagtccaaaggcatggtactgtgcctagtcgggtgctcataccaaacaaagggcaatgctgcctttgcacccatactttaagagggcagcaaatgttaggttttatgccctaannnnaactccatttcaatgtaatctatttt

SEQ ID NO: 122047 - DNA, 767 bp, Cannabis sativa
ttagcaaagtttgcactgcaattggaaaagcactgtagcgtgccttagcattagggcgttacaatgtctgttcaacattgacctaccctcttgtttgggcttgttggacaaccttttccaacttaatgaagctatctgctcactcgaggaactctttcatgatgctcgtcgagatctttctggtatctttccaaaattcactcaagggcaagatgcctctgagtatggccgcatatcggccttcttctatcaggcctttgaccttggtggcctcagccatgaacctttgaatgtagtctttgaaaggctcatattgtctttactttatttcaacgagatcctccaattgtgaaggtatttgtcttgaggcagagaattgaatatagaactcttgagagatttcttcccaagaattaaatcttcctagggccagcttgaaatatcacttttgggctatttctactagggttggcagaaatatttggcattgcacatctcagatacttattggagatctgtttggatctcaaagtattttaggtgtgttaggggatcttctttccctatgtacatattctaagttggcatcttgaactttggaagggaagtgcatttatgtatgtcaagaatggtgagccccttgaccaatccagtttaaggtttgatggtttcaggccaaccaagcccttaatcatgtcttatttaatccaactatgcttgcacagaaggatctgatgctgtaggtattggaaattattttaccaaga

SEQ ID NO: 122048 - DNA, 1909 bp, Cannabis sativa
  modified_base (1823)..(1823): a, c, t, g, unknown or other
acccaaacttggacccgaacccagacccagactgatacccgtacccaatgatatgttggcatcgcctagtcagattcattgttttggtgaagtcgttcaccagttcttgaagatgtcactttctggtgaaattgggtagactcaaaactccttgatttttccgatattccaccttgttaaaagagtgaaatatcaaagtgtggatttgactatcacaagtcgttgctctcatttactatgaaaaaatagtcagatggtcaagacggaattagattctgataagcaaaacccagcgcactaggctacatgtcaacctgggcgccgggtgcttcccgagtgacttctcgagcctcgtttcaataattctaaatattgagattgtgaacgagatctcctaccctatttttgaaaaaaaatatcacgcttgaggagtaaaaatatgtgaaacaggttgtatgtcaacctaggcacaaggcctaatgcatatgtcaacctgggcactgggaccctgctttggctcccaaaggatctcatttgctccctgagatcacttgtatcttcgctattccttaaaaaaagagattaccgaaacacttttcaagaaaactaactggaaatagcctaggttgacaaaatgtcaacatgggcgttgggcctaacaccagtgtcaacctagacactggggcagattttttccactaggtggttccgtttcattcccgaaaacattggtatcttaattatttatcaaaaaaaaaaaaagaatatgccagaagacttcttggaaaaattgattggaagtagtccaagttgataaaatgtcaacctaggtgctgggcccaacacttaggtcaacctgggtgatgggcccaacacttaggtcaacctaggcactgggtcccaattctggctcccaaatgactttttttgttccctaaaatacccaaatcttaatccttgatgaaaacaaagggtatgtctagaagaattattctaaactgctgatggaaatggcacaagttaacaaagtgtgaaactgggccctgggtccctgttttggtctccaagtcaatccatttctttctcaaaactacttgattctttgttttaattggatatgaataaaatgcttaggatacctcttcaatattgtgattggaagtgccacaggttgaaaatagttcaacctaggtgttgagtgaatcaggtgccaagggcgcttggtgcctcaggcactcaaaaataaaagtgttctgattcagattttggatcctcaaatatgttcgtgataggtcttattcatgtaaaagtataaattttgagccatttgcactgagtcggacccaaaaattgaagccctagttaggatgtcaccttgggcgctgggtgaaacttacttcctgggttaacttccgaggtgcagtttcatatatttttagttttcaggccttggacttgattcttctggtcttcttgatttagaatactgaaagatggtgagttggaaacaacttggtaggatccaaacacctattttggagttcccaaagtcaacctaggtacagggttagggacccctccaggttgactgctatgacttgggactacttaactccaggatgttttctttcttgccacgggtcaaatattgatgtccatgtcaccagaattagttttcgagaaacatattgtactgtgttatctcttcttctacttttcttatatatatacatatatagtgtaaaaatattggtgttgtaacatttatttaatattttatggtgtcttttgttgggatttatattaccaggatctagatttantaacatgtatgtttcattaacaccctaaatatgaattctctaatacgataaaattaaacatataagagtttagaaaatcttacatt

SEQ ID NO: 122049 - DNA, 1689 bp, Cannabis sativa
tcaagcccccccttccccaatgaggttcctctcttggaactgccgcggcctttcgagaccggcggcaatccaagctctaaaggcttgggtttggaagtggaaggtggattgtgtatttctaatggaaactaagattggtactagtcaaatgaagtcgatttgtaattctctgcaattcgagaatggtgcttttgttccttctgtgggacgtgcgggaggtgtttgtctgctgtggaacaggaatgttgatattaaggtgttggagagtcttgagtatggttttgtgtgtactgtcaatgatcatgagatttcaagtatttgggggatgttagcagtttatgggactccgtatgacgagcataagagagaattttgggaacatctctcgaatcttgccaattcgtttgatggtccttgggccctcatgggtgatctcaatactcttttgaatagagaggataaatcgggggggcgttcctttactcacagggatggtgctatccttcagaatttccttcgttctactggaagtattgatcttgggtatagtggttgcaaatacacttggttgaataagcgtaagaatggcgggttagtaaaggaaagattagaccgtgtgatcgtggataccaattggttaactgtgtgcccagaggggggggttcgtaatctgccaatcacttcttccgaccatggggcgatggtttttgactctatcatgtgtaagactaaaggattcagacccttcaggttcttcgaagcttggtttgaggacccttcttgctgggaagttatcaaggaggcgtggtgtagggataaccaagagaatgatagggggagtattgggaaaagcatcaatagaactcaaagtgctcttcggtggtggagtaagaatgttttcggggactgtgataacaagattaaggaattagaatttgagctccaaactcttcaatccaaagaggtgcatgaaacggacgaggtggctgaggaggatattcttaaaaatttgggcgagttatggagacgtaaagagtctatgtggaagcaacgttccagagaattatggctgtccaaaggcgatagaaattcttccttttttcatgcgtccaccatggtgcggaggaagagaaatcaaatatggaatctgaaaaattccaatggaatgttatgttcgaatgtcaaggagattggtacgatcctcaatgagtattttattgatctcttttcatctaaaggtcaggtttcttatgatggtcttgatgtcttgataagcaactcgatttctcactacgagaataacatgctcacggcgattcctgatcaggaggaaatcaggtcccatgtttttctaatgcatcccctcaaggcgcctggcccggatggcctttcgggatgtttctaccgcaaatgctggcactttgttggagatgatgtagtcaagagcattcagcgtttctttgcttccggaactctggatccgagtcttaatcattctttcatctgccttatcccgaaaggtaccaatccggattgtgtggagcgatatcggcctattgccttatgtaattttgtatacaaggttatagctcgcattttggcgcatcgtctgaaagtggttcttgatcatcttattgctcctacacaatcggcttttctccctggaaggtggatagccgagtcaacctt

SEQ ID NO: 122050 - DNA, 735 bp, Cannabis sativa
acatttttctacaataaaagtcttcatgatgtttaactacacttaatgacatttctcttgcatgttaacttggtacaacatattttaataattgaaaatatcataaattctactaaattatgcttaatgattaaattatttgaaaaataaaaagagaaaattttcatgtgtactcatcattatcataatttcaacttaaacaatagcttttcaatgatattgatattttactttttttttgttcgaaattgatattctactatattcaataactaagaaatatcataaacattagattctagaaaattatgtttaacaattaaattatttcacaaaaaagtttttcattgtgttcatcaacattttattatattctacaagaattatctgatgaaactcaaggaaaagaattagaaatatgaatttttatacaaaatacctaaaattatatattttttgtatttatatggattttttacccatttttcatgaaaaaacaactttacataattttataaaaaaatattattatccataaaaatattaaaaaattataaatttatatttttacaatttttttttgtcttttttatatatttataaaaatatccaatctcttctatcttactcatgtttaagtagatttctaaaatagttaaagactagagaatattttcctcttaagaaaaacataaaaaaaatgttgatatagagagtgtgattgtctagaagtca

SEQ ID NO: 122051 - DNA, 632 bp, Cannabis sativa
tataataatatgttatagaattttttttttctataaaggtgaagataaaccaaactcaaataattgtaaacttatatactatggtgaatacattccattccaattctaagttgttatactgaagtttttaaacacaaagattccactatgaattgatgtgttttggaagggtaaagcatatctatacaatctcttttatgaaatctcttttaaaatattatatatttaaaaaaaagtgtaataaacaatttgatagattgtaattattttatattgtatatattttgatgtgttttgtataaaatttttactttgtctatttttctacatgagaatatcgttgttttatatcgtttattgtattttttaatttattttatgtgaaaatcacatgctttcttttgttattatttttcccttcaattttattctattaaaaagcaccatatatatattaatatatgatttacatgtttatatattatctttttttttttaattttatttttatctatttctttcaatcaaaatacaaatgttgcttcatatacctctctttaatattattcatttttaattaataaataaaataaatataaacaaaaggcttaaaccaaaattattgaaatgga

SEQ ID NO: 122052 - DNA, 1933 bp, Cannabis sativa
  modified_base (1861)..(1875): a, c, t, g, unknown or other
acacaattacataatatagacactaattgctccacaattcaacttaaaattcaagcttaaagatataaaaataactctaaatcttagagttatcaatatgcgtactcataatttattacttttttagcatgcataaataatttaacatctataccaacgcgcatattacgcattataagaaagtcatagcaactcataatcaaaaactttattatcataatagacatgtattcactcaatacgtaatcacacaaccaattaattgccttataagacaatcctattttcatgcttcattaagtatccttaccactcattatccacgagctacgtatgtcaatatcgttgcccgatatagcaaatgataaggaagaaacctatctgctatttcaagaatagttactcataatggtaatcatcgtttccaatcctcaccattcgttccacaacctatgtatgtcactatcgttgcctgatacagtgaacgatacgtaagaaacctaaccacaattttagaagtaattactcataacggtaatgaccgtttctaacctttggtcataaccgaggcataacaaatacataaacaagatctccattataattgagattataacaatcacaattgttaattatttaaccataagttgtgcgtattactttttcttaccacaaaccaatattgggtgtgcgggccgacattggtggaaccatgctcgatgatcctgggtcctatgtcacaataacgaaacttaataaacaacttatctaaacgctaaaataaaccctaattccataaccgaacatctctaaactcccactggttcaaaataacttaaatatcactaaaattccctaacctaggctctaaaaaacaccctaaataaaattgattttgaggctagaaaccagagttttcccctgttggcaaaaccagttgaccggttttacagcacctgtgaaatcggttaatcagtttctttgttggcagaaacagaaaccctggtttttcacactaaaaatcaatcaaatctcctccaaacctgttcaaacttccagaacagttcaaaaccacaaatacaatgtatcacaagcacgaacttataacaattcatccattaactcaaaattacatgctcacatgaaattaaactcaataatcttcacctaaaccaattcaaatgaaacaaccactatctctaactaattcaaggttgaacaaattataaatcaagcctaaaaacacaatctaaacttaccttaacatgtcagccacaaaatcttagaactttaaccctaaactcaatctaaacttcaaaatcaagtgggaaaagataaataacttaccacacaacttagggaacttttattcttgatcaaatctataagaaacttggttgaaattaaagaaggaaggtgatgattgttgctgctcttagggcttcgaagggtagagggaaaaagagaaagaatttttgctatttttctaaatttcaaaaccttaattataaaacatatacgatttaaattagatattcagctagtagtttttaggatttccaaataatacaaaaataataataatactgtaattcaagcaaaaagaccgctccacccctcttaaacactatagcttaaaatacaatcctaagggtaatttagtcttttctaaccaatctcgtcaaaccaataacttaacattctaaactagtccgacattatttcaattaaatttattatttattatcgtgacatttctgaccactctgtcaagttccacggtccccaggcctaaaaatattttatctcaaaaatagtgtttactattcccacattatccaataaaatctccgtaattaannnnnnnnnnnnnnnttattcatttactcatatttccctaattaactcgtaattagtttaagtaagattataa

SEQ ID NO: 122053 - DNA, 1727 bp, Cannabis sativa
  modified_base (1599)..(1602): a, c, t, g, unknown or other
aactaagttatatccctaactctataaatacatattatgtcatcaattgtatacttttgataatcacatagataagattgatttgatttagaaacctacataagaagacttagttgatagtgttacactatcaaaatcaaattgtcatattctagattatatacaaatttgtatttgagttatttaattttctaacaagttgttgactaaaaactaagtcaacaatatggattaatgaaaacatgtcacttatacaagtaaccaaaatagacagaatttgaaagagcaaaacgaaccaaaatttgaaagtttttgccctaaaatttcattaccagggattaaagttgtacatttgggtcgggctttttggcacgacacgaaatcggtacgagcacgagtgacacgagtactgcatgacaccaaagaatatgggcttaggcccaaaacaacatgaataaacatgagtctaagcacgacacaaataatatgggcttagacacggtacgccacgaaaagcactacacgaaaacacaaatttcttagcacggaagcatgacacgaaaatacaaattttttagcacggaagcacgacataaaacacaaattcaaatccataaaataatttttttatttagtaattcatttactctttcatataaaagtactatatttaaatgtatttttgtttagtaattcatctactctttcatataaaaatatgacacgaatataatttttcttattgagattatgttaaatatttttttttcgctgaaagagattatgttgaacattatgtacaactttatgtgaaaatttagtaatgaaccacaattatggtaatattaatttgattattaaacatgtaattgtagtttttttttttttttgcaattttgaagctaattttaactgaaataatctatttgtgctttaaaatatagaaactaatttgaagagtaaaaaaaaagtttgacaattttctataggcccgtttaggcccatttgataaatacaagtaagtcatttcataaaaaataggctagcccgtttaggtctggtatggatttggcccaacacaaataatctgtgtctatgggctgggctagacttactttgaaatatgagccaggctgggctcacataaagaaagtgggcttttataaaaacgggttagatcgagccgtgctacccgaatgtatagctttattagggataatgagaaaattatattgtattactttattttatctattttgatttttacttttatttttatactagataacttagccgccgttcgtgcggcgaatttaaataaaaataaaactttaatataataaaaaagaaaagaaagtttcattaatacaaattaacttaaaataataattttaatgtataaaaattttgaaatagattttttttagtacaaaatccaattaccaaattatatattattattgattattgatttaactttttttaataaaataaaataaaattatataccaaaaaaatagaagaactaataaaatcaattagttagtatcatactattccacgagactagtctatttacataaatatatatatatatannnntatatatatatatggagaaggttctaatagttacaaaccatcatggttacatttttttagccattagattattattgaatagttatgattaatttggaaattaaataaaaataaataataattaa

SEQ ID NO: 122054 - DNA, 1032 bp, Cannabis sativa
cacttgacagaatggaattggaatttatgtgtttgatagggacgaatgcacggataacatgcgactccaaagactttaagaaacttgtaatctggtttcttaccatggacagtctcataaggagattgatttttcaaaactggtgtgggtaatctatttattagatacacaacagtttggaaagagtcccaccagaatttcaagggcatatgagcttgagcaaggagtgtcaaccccatctcgacaatatgtcgatgttttctctcggctcggccattctgagctgaagtatggggacaagagtgttggaaatctattccattttgaacaacacactcaacaaatgactgaaattcaccccccaatcggttttgtgtgatttaatttttctctcaaactggttttcaaccagcgttttgaattgaataaaggctgagagagcctcgtttttggttttgagaggatatatccaagtgtaccgtgtgtggtcatcaacaaagtgtatatagaacttaaagtttgggttggaaacaataggtgaaggaccccacaggtcagtatgtattaagtctaaaggacctttagctcgactgggattgctattaaatggtaaggcatgcaatttgccatattggcaggcttaacagaagttacattttccattaataactggttttacattgagtgtactcaatagaagactcaagacacgactagaaggatggcccaatctcttgtgccaattatccctcatgactacaaacttagatgcagcaacatgctgatcttttgatttaaaaacaacaccagtaaaaggcttagtagactgaaaacttaaatgctcatacgaattgataactgaactcccttgctgaccaccaacttgatacaaactgtccctaagtgtcccttggagaagcactctctttgtgtccatatccttctgttaggttatttttagtattaattttagattaattttagtatatttttaatttagttttaatcttgtttggagcatttttacgcttg

SEQ ID NO: 122055 - DNA, 918 bp, Cannabis sativa
  modified_base (144)..(162): a, c, t, g, unknown or other
  modified_base (229)..(233): a, c, t, g, unknown or other
  modified_base (379)..(379): a, c, t, g, unknown or other
aaattattaaaatggggtgcctttagaaaattttgggttatttacacccaaaaatttataaagacaccccatttaaataatttttattttatataaaatttatattttcaactatactaagtttttttaacttttttcttccannnnnnnnnnnnnnnnnnnatacctatcaaacaaaattaaattgtattttaaatattatggcaaaaaaaattaaaataaaaaattnnnnnaaattttcttagaaaaaaaaaatatacatgagttagaaaaaattatgaaaatgaaatcaaaataagtattgaaattaatataaaataatgtgaagaaacaattttaaaaaaaaaaataattagagtattttttaaaaattatttangtttatattttttttaataatgaggtgtatttataaatttatggggtgtaaatagaactccccttaatttttatgatcataaatacgaacatcaatatatcaattattggtataaccctttattatttttattctgttaattttaacggaatataatccttttgttaaacttttgcattcaatctaaaatgcgtagcaaatttctttttcttctccctcaaactcaaaatcaaaactatttatgttatataaatatatatatttaggatttttatgtaatatttttgtgttattccatttttcgtactatgacgcggtaatgcatactggtgacacgtgtccactattctctacacttggctggagaaagattccgaacagaacaagggcagatgatctgaacaacatatgaagccatttctccaagctgtgcatcaggacataactatttcaagatgatatcgtgaagctcaagaacaatccctacaatcatggaatcgtatcaaagggatatggcaagctgtccgaatccctcattt

SEQ ID NO: 122056 - DNA, 762 bp, Cannabis sativa
  modified_base (732)..(735): a, c, t, g, unknown or other
aatgtaagttaatatattaaatttatattttatgaagtttactttaaatataattttctaacaagttatatttatcagcaaggaaaaagttacattgagacttgaaaaattgtcatacaaagaaaggcacacacacctttatcaatgaggctgccaaaaatacatatataagactttataaaataattatttttaaatatattcaaataatttggttgatttctaacttattgttattattggaagagatggtgacaacccaaaatagtgttcctgaatcttcacaagcttctgagctttagatacttcaacaaactcttggagagaggcatggccatcagcgaggagtgggtcacaaattaaaagggcagtcatcaagacgatgctcttacgggaaataattgttgagatgtagaaacaaatacagatgttgactcaacagttgtcacatgaacgtcgggaaccaatggatattgagatgaatgatgcagctccaacccaacaattgcatccacaatcgtctcactcttaaatgcctgaagatgggtttggttcatcttttcaggcaatcggttttcacccaatgggttttcagcatcagcagtcgcaacagacttctattttgtttcagtaactgctatagcagcctcatgttccttcgtttgtgtaacaccctaactaacataggcgtattacgtgaattttaaacattgtgcagctcgttgctaatcnnnnaggtttatggaaaacgtgattaattaa
